United States Patent Application Publication US 2005/0196754 A1 - sequence listing, part 9

SEQ ID NO: 17594 - DNA, 849 bp, Homo sapiens
  SIMILAR (1)..(597): 1001254mologous to Escherichia coli similar to phosphotransferase system enzyme II,accession number U00006,Smith- Waterman Score=1003.
atgattcccttcgtggtatcgggcggtattttgctggcggtttccgtcatgttgtatggcaaaggcgcagtgccggatgccgtagccgatccaaatctgaaaaaactgtttgatatcggcgttgcgggcttgacgctgatggtgcctttcctcgcagcgtacatcggttattccattgcagagcgttctgcgctggctccgtgcgctatcggtgcctgggttggtaacagctttggtgcgggcttctttggtgcactgatcgccgggattatcggcggcatcgtggtgcattacctgaagaaaattccggtgcataaagttctgcgctcggtgatgcctatcttcattattcctatcgtcggcacactgattaccgcaggcatcatgatgtggggcttgggcgagcctgtaggggcgttgaccaacagcctgactcagtggcttcaggggatgcagcagggcagcattgttatgctggcggtgatcatgggtctgatgctggcgttcgatatgggcggtccggttaacaaagtggcctatgccttcatgctgatttgcgttgctcagggtgtttataccgtggtggccatcgctgccggctggaagagcgacgcggccttaaaccgaggttttcccatgaaaaaagatattcacccgaaatacgaagaaattactgctagctgctcttgcggtaacgtaatgaaaatccgctccaccgttggtcatgacctgaacctcgacgtgtgcagcaagtgccacccgttcttcactggcaaacagcgtgatgttgctaccggtggccgtgttgaccgcttcaacaagcgtttcaacatcccgggcagcaaataa

SEQ ID NO: 17595 - DNA, 1818 bp, Homo sapiens; identical to SEQ ID NO: 3697
  SIMILAR (394)..(906): 671254mologous to Mus musculus Pro-Pol-dUTPase polyprotein,accession number Y12713,Smith-Waterman Score=553.

SEQ ID NO: 17596 - DNA, 1581 bp, Homo sapiens; identical to SEQ ID NO: 15773
  SIMILAR (1182)..(1015): 601254mologous to Homo sapiens mariner transposase,accession number U49974,Smith-Waterman Score=177.

SEQ ID NO: 17597 - DNA, 1152 bp, Homo sapiens
  SIMILAR (346)..(669): 1001254mologous to Escherichia coli similar to phosphotransferase system enzyme II,accession number U00006,Smith- Waterman Score=546.
atgcaagctgctcataggttacgccctgcataccgtataaagactggcaaaccaccagctttggcagattatcatcctgcatatcaagaaatgctttcacgaaaacaggatcgtgtaatcgatcagatcgattttggcatcaaagacaccgtcgaaattctgcatatggggcagatccagagcatgggtcgcgagttcgcattgtctctcaggttttcaatccatggacacaatgtgcatggaaatgaaagcccagagatgggtcccgagcgtcgttcaggtttctatgatgaatggtcccctgagagaatcatacaatattataggcctgcccgggagcagcttatgaatgagttggtgcagatccttaaaaatacccgtcagcatttaatgacgggcgtttcacacatgattcccttcgtggtatcgggcggtattttgctggcggtttccgtcatgttgtatggcaaaggcgcagtgccggatgctgtagccgatccaaatctgaaaaaactgtttgacatcggcgttgcgggcttgacgctgatggtgcctttcctcgcagcgtacatcggttattccattgcagagcgttctgcgctggctccgtgcgctatcggtgcttgggttggtaacagttttggtgcgggcttctttggtgcgctgatcgacgcctttccacgtttgtctgaggagataaaccctgcactacctgaggcaaaagtgatggcctgccttgaggcagttgccaggcaagataatgttgattctcctcaggagctacccccaacacccctgtttgcttctagacctataactagactgaagtcctggtgggcccctggaggtgaagttgagagtgggacccacaagaagcgggaaagggctagggacacggcggacttcccagagatcggacacttgttacttgttgaaaaggcgccaccttccctgacaaagcgaaggcgcagcgaaacagtacgagtttggtcgaggccggctttgacggctttgcgggactggtgggtcctggatgctggcaaatttggactctaccagacccccccacgaggaaccgcagggccccctcttgccttccagagctccacacggaggatggaatgccctacagaaactcaagccacattgtag

SEQ ID NO: 17598 - DNA, 444 bp, Homo sapiens
  SIMILAR (91)..(252): 961254mologous to Escherichia coli hypothtycal protein in UNG 3' region,accession number D64044,Smith-Waterman Score=265.
acccaaagcgccgttcgatagctggctgaacgaatctctttaatcttaccggggcgcatcttgtgccccgttttctcctctgcgacaagggcgttttttcgacgctctcttatgaccgaaaacgctgttctccagttacgcgccgagcgtattgcgcgcgcaacacgtccttttcttgcccgcggaaatcgcgttcggccctgccaacgctgtcttttgccagagaaattatgtctctgttcgacaatcagcctttactttcaggtcctgacagcgatagccattggtattctccttggccatttctatcctgaaataggcgagcaaatgaaaccgcttggcgacggcttcgttaagccgcacctgcagactttaggaatatggataacagatgttgtttggaaccaagtgaaactcaaaggagtgtttttaaatagccaataa

SEQ ID NO: 17599 - DNA, 1248 bp, Homo sapiens
  SIMILAR (321)..(1): 1001254mologous to Homo sapiens eIF4E-transporter,accession number AF240775,Smith-Waterman Score=571.
tcatgggcccttggggggcgtctggcccctgtccggggaccctttctgtgtgtgccctgttcttcgcctcggttccccccccgccctaggtccctcggacctttcgggcaattcgaggtttccgtgagcccctgggtaccccgtgggccccggtgtcgcgtctttacgttcccggcgttttgggagccaaccggaggccaatgcccccaaaggatataggccaacaccgtacagcgtgtcctggttaaccaggtacggaacatagttctcactgtagccatgctgttcggtatgcagatccagcataaactgcgacagtgcgcggtgcatgcgagcaatctgccctttcattaccacaaagcgggaaccagtcagcttaactgcagctgcaaagtcgaggccagagtgcatttcacccagcgtcacgtggtcacgaacttcaaagtcaaactcacgcggggtaccccagcggctgacttcaacgttgtcattttcgtctttacctaccggcacttcatctgcaggcaggttagggatggtcagcgcgatatcgcgaatttcagcctgtaaagcatccagctcggcttttgctgcatccagctcttcgcccagtttgttcacttccagacgtaaaggctcgatatcttccccgcgcgctttcgcctggccaatggatttcgatcgggagttacgctccgcttgcaggttttccgttttgacctgcaatactttacgacgctcttcaagagcgcccagcttatctacatccagccccagccagtcaataatcccctgtgccgcatgacgtccttctgccattgcggtaaccaccagatccgcaccacgcacggcgtcaccaccagcgaagattttcggattggtggtctggtaacggtactggctttccacatccgcgatgatgcggccccatttgtccatatcatgggtcaccagcagcattcccggcgcttgtttttgcataatgctttccagcagatcgaggatgcgcgcctgtgctaccacgtcaaggtcggtggtcggttcatcggcgatgataaacggtgattcacacagcaccgccatcgcaatcatcatgcgctgcaacatgccgccgctcatctcgaacgggtacagcttcagcacgcgcgcggcgttttccagccccaccgcttctatggcagcggtaagcgtagcgtcatcggcgggtttccctaacgccaggcaggtttcccgcgcgtgggtgtgcat

SEQ ID NO: 17600 - DNA, 2008 bp, Homo sapiens
  SIMILAR (1)..(747): 1001254mologous to Escherichia coli amylomaltase,accession number U18997,Smith-Waterman Score=1326.
atggaaagcaaacgtctggataatgccgcgctggcggcggggattagccccaattacatcaatgcccacggtaaaccgcagtcgattagcgccgaaaccaaacggcgtttgcttgacgcgatgcatcaacgtaccgccacgaaagtggcggtaacgccagtcccgaatgtcatggtttataccagcggcaaaaaaatgccgatggtggtggagggcagcggcgaatatagctggctgctgaccaccgaagaaggaacgcagtacaaaggccatgtaacggggggcaaagcgttcaatctaccgacgaagctgccggaaggttatcacacgctgacactcacccaggacgaccagcgcgcgcattgccgggtgattgtcgccccgaaacgctgttacgaaccgcaggcgttgctgaataaacaaaagctgtggggtgcctgcgttcagctttatacgctgcgatcggaaaaaaactggggtattggggattttggcgatctcaaagcgatgctggtggatgtggcaaaacgtggcgggtcgttcattggcctgaacccgattcatgcgctctatccggcaaatccggagagcgccagcccatacagcccgtcttctcgccgttggctgaatgtgatttatatcgacgttaacgccgttgaagatttccatcttagcgaagaggctcaggcctggtggcagttgccgacaacgcaacagacgctgcaacaggcgcgcgatgcagactgggaatacgaagatgacgccgtattccgtagctatatcgacgacgaatatatgggccacaagtggcaatgcgttgaatttgctcgccgttttctctttctgaattacggtgtggtctttactgacgtgggtatggcgtgggagattttctcgctgcgcttcctgcgagaagtggttaatgacaacatcctgccattgcaggcatttcctaacggctcgccgcgtgcgccggtcgcgggtgcgcttcttatctgggataaaggcggtgaatttaaagacactggccatgtcgccatcattacccaattgcatggcaacaaagtccgtattgcggaacagaacggagagcggagtattttccgctggcggatactcaagcccattggaaaggggaaagattctctggaacccttgggaactaaagacgggttttccttgcctaggcactaccggtccaggaaagcgggtttacccaaagaaaatgccccgggcgtttatgacgcgctgccgttcctcattgccaacactaaacaggtgatggggctcgaagagctaccggaagagccgtttatcaataccgccggacttaacgtcgtggtactgggcggcggcgacaccgcgatggactgtgtgcgtaccgcactgcgccacggcgcgagtaacgtcacctgcgcttatcgtcgtgatgaagctaacatgccaggctcgaagaaagaagtgaagaacgcccgcgaagagggggccaacttcgaatttaacgtccagccggtggcgcttgagctgaatgaacaaggtcacgtctgcgggattcgtttcctgcgcacgcgtcttggagagccggatgcccaggggcgtcggcgtccagtgccggtggaaggcagtgaatttgtcatgccagccgacgcggtgattatggcgtttggcttcaatccgcacgggatgccgtggctggagtcgcacggtgtaacggtagacaaatggggccgcatcatcgcggatgtggaaagccagtaccgttaccagaccaccaatccgaaaatcttcgctggtggtgacgccgtgcgtggtgcggatctggtggttaccgcaatggcagaaggacgtcatgcggcacaggggattattgactggctggggcgccagcgccagctctaccagtcccctcagtgcggctgcgcgctcctccagcggccccgagcagcccagcaccgccagcgccccggccagcgccagtgtctgatgcctgcagaggtggagggcaagg

SEQ ID NO: 17601 - DNA, 563 bp, Homo sapiens
  SIMILAR (364)..(3360): 1001254mologous to Homo sapiens dJ417I1.1 (KIAA0576 protein),accession number AL136311,Smith-Waterman Score=5455.
atgccgtggctggagtcgcacggtgtaacggtagacaaatggggccgcatcatcgcggatgtggaaagccagtaccgttaccagaccaccaatccgaaaatcttcgctggtggtgacgccgtgcgtgacaaaattctctccgataactatttcaccctgcacaacattacttacgatctcacgcgcaaagacggcgaagttatccgccataaacgtgaagtgtacgatcgcggcaatggtgcgacgatcctcctgtacaacacgaagaaaaagaccgtggttctgattcgtcagttccgtgtcgctacctgggttaatggcaatgaaagcgggcagctgattgaaagctgcgccgggctgctggataacgacgaaccggaagtgtgtattcgcaaagaagcgattgaagagacgggctatgaagtgggtgaagtgcgcaaattatttgaactgtatatgtcgccaggcggtgtgactgagctaatccacttttttatcgccgaatacagtgacaatcagcgcgctaacgccggtggcggggtcgaagatgaagatattgaagg

SEQ ID NO: 17602 - DNA, 741 bp, Homo sapiens
  SIMILAR (28)..(294): 1001254mologous to Escherichia coli K12 heat shock protein hslVU, ATPase subunit, homologous to chaperones,accession number AE000467,Smith-Waterman Score=446.
ttaagctacaaagcgtaaggatctcccatgtctgaaatgaccccacgcgaaatcgtcagcgaactggataagcacatcatcggccaggacaacgccaagcgttctgtggcgattgctctgcgtaaccgctggcgtcgcatgcagctcaacgaagagctgcgccatgaagtgaccccgaaaaatatcctgatgatcggcccgaccggtgtcggtaaaactgaaatcgcccgtcgtctggctaagctggcgaatgcgccgttcatcaaagttgaagcgaccaaattcaccgaagtcgaatgtggctgccaatctaaaaactggactcccaagaggagcacaactatcttccattccctccttgaacctcattattaacctgcgtgggatgtacgcctgtgggtgctcccattgtctgcccgtaggttcttcccctgggggtccctggcttacgtgtttgtctcgtatatatgagggctttgcgatcccggcgtcagcggctttctgccagtcgcgtgtgccccgatgagtccgtgattgtctatgaatgccttgcttacggtctgtgtccagcttgacagctggtccagtggtagctacatgtccctggaaagacttctgcaaggccacccagtcctgctgcacctgcttgcacctgcatacaatggcacctggcctgacaaccagtgctgccgtggcttgaacctgtggacagacttcctcaaggcagcatggcatggccat

SEQ ID NO: 17603 - DNA, 491 bp, Homo sapiens
  SIMILAR (290)..(490): 1001254mologous to Escherichia coli DAHP synthase (EC 4.1.2.15),accession number J04221,Smith-Waterman Score=337.
aatggaagtcgcggaagtggaagccttgtaccgtaaaaatcagatcccgtggattaacagtcccaattattcggtagaagagattgccaccaagatcctcgatatcatgggccttagtcgccgaatgtactagagaactagtgcattagcttatttttttgttatcatgctaaccacccggcgaggtgtgacacacctcgcacttgaaatcagcagcgattggtttatcgtgatgcgcatcacttcccggcagtcctgccgtagaagcaacaaatttctgagacttgtaatgaacagaactgacgaactccgtactgcgcgtattgagagcctggtaacgcccgccgaactcgcgctacggtatcccgtaacgcctggcgtcgccacccatgtcaccgactcccgccgcagaattgaaaaaatactgaatggtgaagataagcgactgttggtcattattggcccctgctcgatccacgatctcaccgctg

SEQ ID NO: 17604 - DNA, 972 bp, Homo sapiens; identical to SEQ ID NO: 8852
  SIMILAR (1470)..(1886): 891254mologous to Homo sapiens Human secreted protein, SEQ ID NO: 8141,accession number G04060,Smith-Waterman Score=651.

SEQ ID NO: 17605 - DNA, 841 bp, Homo sapiens
  SIMILAR (101)..(484): 1001254mologous to Escherichia coli biotin carboxylase,accession number M80458,Smith-Waterman Score=632.
gaagcggacaaatccggtaccgtgaaagcaattctggtcgaaagtggacaaccggtagaatttgacgagccgctggtcgtcatcgagtaacgaggcgaacatgctggataaaattgttattgccaaccgcggcgagattgcattgcgtattcttcgtgcctgtaaagaattgggcatcaagactgtcgctgtgcactccagcgcggatcgcgatctaaaacacgtattactggcagatgaaacggtctgtattggccctgctccgtcagtaaaaagttatctgaacatcccggcaatcatcagcgccgctgaaatcaccggcgcagtagcaatccatccgggttacggcttcctctccgagaacgccaactttgccgagcaggttgaacgctccggctttatcttcattggcccgaaagcagaaaccattcgcctgatgggcgacaaagtatccgcaatcgcggcgatgaaaaaagcgggcgttgctgggtccgcatggaaaagtgtaggaggaattgacattctcagtgcaagttcagcagaaggaacagagaaaggcagaggaatgaaggaaaccacatttgtactcaccaatgccatgttaggaagaaagaaattggatgcacttgatttcaaagtcaacatctttcatgagcatctgatacagcagttcctgagcagaacaaaacaacaaaaacaggacagacaggagtcattgctgcttgttgcaccagatcctggactcgctaatcggactaatctcctgctgcacgtgcataccatccgccgtccacagggttctaagcagattcttccttgccgtaagccgtccatgatatga

SEQ ID NO: 17606 - DNA, 1074 bp, Homo sapiens
  SIMILAR (65)..(3): 901254mologous to Escherichia coli 2-oxoglutarate dehydrogenase,accession number J01619,Smith-Waterman Score=94.
ttaaccagatcttgttgctgtttctggtgaacggacatataccctaccgccggaaagccggaagccgacgcggcctgcataacgcagagaagccccaaacggaatcacttcacggaaatgatgctggctgcagtaccatgcgccctggttgagcggctcttcctggcaccagacaaaatccttgacgtgagcaaactgctgcaacacttcctgcatcgctttatgcgggaacgggtagagttgctcgatacgcacaatggcgacatcgtgttgattgttcttacgacgctgttccagcaggtcgtaataaaccttaccagaacacatcactacgcgcttcacgcccttcggatcaagctcgtcgaataaataaaggatacacaatgagtagcgtagatattctggtccctgacctgcctgaatccgtagccgatgccaccgtcgcaacctggcataaaaaacccggcacgcagtcgtacgtgatgaagtgctccctcccctttgccggacatacgctgcattttgttgagttcgatccggcgaatttttgtgagcaggatttactctggctgccgcactacgcacaactgcaacacgctggacgtaaacgtaaaacagagcatttagccggacggatcgctgctgtttatgctttgcgggaatatggctataaatgtgtgcccgcaatcggcgagctacgccaacctgtctggcccggtgtttaaaggttcttcgctgatgttcctcaaaccgggcatgcaggttccggtttctcagctgatccgcggtattaacctgcaatcgggtaacgatgcttgtgtcgccatggccgattttgccgctggtagccaggacgctttcattgcctggccgataacgtaactggtcatcattttggtcaggatctgcgttctgttcggcgagcactttgccggagttatagtcaatcaggatgtaggactccgcatcgatctgcggtacacccgggatcatagttttgatattcaggtcatcggcatgtgcagcagagataaaggctgtgcaaagagccgtggtgagcgccaggcgcttcat

SEQ ID NO: 17607 - DNA, 659 bp, Homo sapiens
  SIMILAR (659)..(207): 871254mologous to Homo sapiens Human PRO1780 (UNQ842) amino acid sequence SEQ ID NO:282,accession number Y99419,Smith-Waterman Score=703.
cttgctagtgcatgcaaagcttgtgcactggcctgtctgtttataccaactgtctgttgcacttgggcaaaacccatggctgttaccctaacattcaatctgccatatgcaaagcaaccatcccccccatattctgcaccagccttgtgcatgtcaatcagctgcacatgcatgtgccctgcaacactgcattctggcccatatccttgtggtactggtttaataggtttttccatcaagcctccaatataaacagtgttgggaagcaggggccgggcaaaatcaaaggcaaaatcagagttaacaaaccacaactctgctttcagtagaagatgagacaaaactggcctagagccttctgggaaatgctccttgatggtgttgtcaaatgtagactgcatgtcccattggctcctggagaaactaaagaacatcagaaaattcttcactcggccccagaagtccatgtgatcagtcagcaaggaagggaatactggaacataagacaaggggcttggtagcccaaaatccaaagagccgaatgtggtgggaagaatggccacaaatggtttcacaagcttctcagcaatcaggaaagaacagaaatcaaatgcttcaacaaataccagatcatagttctcattctttaaggaatccat

SEQ ID NO: 17608 - DNA, 2220 bp, Homo sapiens
  SIMILAR (1669)..(2208): 961254mologous to Escherichia coli EntD protein,accession number D90700,Smith-Waterman Score=895.
  misc_feature (1)...(2220): n = a,t,c or g
gcagccacccagctgccatgccatgcccagcagctttccacaaagctacatagtgcccagagtgagccccaggaagaacacaaagacgtcgagcaggttctgctcattccagggctgcaggaaggcataaggcttgaggtgtgctgccccctgtccccaccccatctggaggatgtagtcgattcagcccaccggccactgtgcagtcattttttaaatagaaaggatatcatggattccttaaagaatgagaacttcgacatggtgatagttgaaacttttgactactgtcctttcctgattgctgagaagcttgggaagccatttgtggccattctttccacttcattcggctctttggaatttgggctaccaatccccttgtcttatgttccagtattccgttccttgctgactgatcacatggacttctggggccgagtgaagaattttctgatgttctttagtttctgcaggaggcaacagcacatgcagtctacatttgacaacaccatcaaggaacatttcacagaaggctctaggccagttttgtctcatcttctactgaaagcagagttgtggttcattaactctgactttgcctttgattttgctcgacctctgcttcccaacactgtttatgttggaggcttgatggaaaaacctattaaaccagtaccacaaacaggcaataacaaggatgtggagaaagcaaactcgcacattgtttgtgggaatttaaatcagtacaaccactatggaaagcagtttagaggctggataaggcgttcacgccgcatccggcatctgggctcgattggcccacctggggtggtttgcgaaccccggttagtccgagggtggcaaacggagaaatgtcttgagctaccggtagaagagaatttcaccggggagacacgtgcaaggctagcaagcacaatagggcatcgacgaactagaggagagacgcacacgcaaacacaacacagctataggaccgacagagcacaagagcgagactcggccacggcacacctccgtgaaaggtggttaccgctgtttgacttcgcttaccagggttttgcccgtggtctggaagaagatgctgaaggactgcgcgctttcgcggctatgcataaagagctgattgttgccagttcctactctaaaaactttggcctgtacaacgagcgtgttggcgcttgtactctggttgctgccgacagtgaaaccgttgatcgcgcattcagccaaatgaaagcggcgattcgcgctaactactctaacccaccagcacacggcgcttctgttgttgccaccatcctgagcaacgatgcgttacgtgcgatttgggaacaagagctgactgatatgcgccangctggcctgacaaaagaacaagtgctgcgtctgcgcgaagagtttggcgtatatgcggttgcttctggtcgcgtaaatgtggccgggatgacaccagataacatggctccgctgtgcgaagcgattgtggcagtgcttggcggatatccgatgagcggcagacatcgtgcggtacttatcgaggtgtggtccccgtcgaagcttcgtggtcgtgaaattcggctccgagtacggcgattcgaggccggcgctccgggagtcctgcggggccccccgggggcggacccagtctcgaatatggtcgatatgaaaactacgcatacctccctcccctttgccggacatacgctgcattttgttgagttcgatccggcgaatttttgtgagcaggatttactctggctgccgcactacgcacaactgcaacacgctggacgtaaacgtaaaacagagcatttagccggacggatcgctgctgtttatgctttgcgggaatatggctataaatgtgtgcccgcaatcggcgagctacgccaacctgtctggcctgcggaggtatacggcagtattagccactgtgggactacggcattagccgtggtatctcgtcaaccgattggcattgatatagaagaaattttttctgtacaaaccgcaagagaattgacagacaacattattacaccagcggaacacgagcgactcgcagactgcggtttagccttttctctggcgctgacactggcattttccgccaaagagagcgcatttaaggcaagtgagatccaaactgacatattctcctcataccttatagtccaaagttggcagtacttctga

SEQ ID NO: 17609 - DNA, 804 bp, Homo sapiens
  SIMILAR (417)..(803): 941254mologous to Escherichia coli Hypothetical protein HI1355,accession number D90751,Smith-Waterman Score=687.
tgacattgcgtgatgttcagggaaaaatgaagaaagccgggcagccgtgggaaaaggctaaagcgtttgataactcttgtccgctttccgggtttattcccgcggcggaatttaccggcgacccgcaaaatacaacgctgagcctgagcgtaaacggcgaacaacgccagcaaggtacgactgcggacatgatccataaaatcgttccgctgatcgcttatatgagcaagttttttaccctcaaggccggtgacgttgtgttgacaggcacgcctgatggctacggcccgttgcaaagcggtgatgagctgacagtcactttcgatgggcattctttgacaactcgcgttttgtaatactttttgccgcctgaaagcgcggcaaaacttgcatcgctgtgccagactggttataaggtgcgttttaacgtaatggcggaacacctgatgagcgatgtacctttctggcaaagtaaaaccctggacgaaatgagcgatgcggaatgggagtcgttgtgtgatggttgcggtcagtgttgcctgcataaactgatggatgaagacaccgacgaaatctacttcactaacgtcgcctgtcgccagctcaatattaaaacctgtcaatgtcggaactacgaacgtcgtttcgagtttgaacccgactgcattaaattaacccgtgaaaatctgccaacattcgaatggctgccaatgacctgcgcttatccgtttgctgcgggaagtaaagatttacctgcgtggaatccgctacttactgggtcgaaagcggcaatgcatggtgaac

SEQ ID NO: 17610 - DNA, 2361 bp, Homo sapiens; identical to SEQ ID NO: 6252
  SIMILAR (1402)..(2358): 891254mologous to Homo sapiens putative p150,accession number U93568,Smith-Waterman Score=1439.

SEQ ID NO: 17611 - DNA, 2835 bp, Homo sapiens; identical to SEQ ID NO: 7486
  SIMILAR (607)..(1695): 921254mologous to Homo sapiens putative p150,accession number U93563,Smith-Waterman Score=1804.

SEQ ID NO: 17612 - DNA, 3480 bp, Homo sapiens; identical to SEQ ID NO: 4232
  SIMILAR (1075)..(2646): 741254mologous to Homo sapiens putative p150,accession number U93563,Smith-Waterman Score=1984.

SEQ ID NO: 17613 - DNA, 3529 bp, Homo sapiens; identical to SEQ ID NO: 6262
  SIMILAR (305)..(1849): 891254mologous to Homo sapiens putative p150,accession number U93572,Smith-Waterman Score=2317.

SEQ ID NO: 17614 - DNA, 3021 bp, Homo sapiens; identical to SEQ ID NO: 6263
  SIMILAR (214)..(1176): 911254mologous to Homo sapiens putative p150,accession number U93569,Smith-Waterman Score=1506.

SEQ ID NO: 17615 - DNA, 4374 bp, Homo sapiens; identical to SEQ ID NO: 2325
  SIMILAR (1)..(3291): 991254mologous to Homo sapiens unknown,accession number AF148856,Smith-Waterman Score=5719.

SEQ ID NO: 17616 - DNA, 2010 bp, Homo sapiens
  SIMILAR (664)..(1803): 751254mologous to Homo sapiens putative p150,accession number U93569,Smith-Waterman Score=1407.
atggacagcaacacaataatagtgagggacttcagtactccactgccagcactagacaggtcatcaacacagaaaatcaacaaagaaacaatggatttaaactataccttggaacaaatggacttaacagatacatacagaacatttcatccaactgctgcagaatacacattctattcaacaacacatggaactttctccaaggcagaccatatgataggccataaaacaagcctcaataaatttcagaaaattgaaattatatcaagcactctctcagactacagtggaataaaactggaaatcaactccaaaaggaatcttcaaaatcatgcaaatacatggaaattaaataacctgctcctaaataagcattgggtcaaaaatgaaatcaagatggaaattaaaaagctcttcaaactgaacagtaataatgacacaacctatcaaaaccttttagatacagcaaaggcagtgttaagaggaaagttcatagccctaactgcctacaacgaaaagactgaaagagcacaaactgacattctaagcaagcagcggaatgcagcaggtccgagtgaatggagtttgcccctaccagcaccgaagcagctggctagttcttgcgctcatgtactccagttcctgcccgcaaaggggtcagggaaatatcctgctttatcaacacaatactatagagcacaactagagaagcaagagcaaacacattcaaaagctagcagaaggcaagaaataactaagatcagagcagaactgaaggagatagagacacaaaaaacccttcaaaaaatcaatgaatccaggagctggttttttgaaaagatcaacaaaattcgtagaccactagcaaggctaataaagaagaaaagagagaagaatcagatagatgcaataaaaaatgataaaggggatatcacccccaatcccacagaaatacaaactaccatcagagaatactataaacacctctacacaaatgaactagaaaatctagaagaaatggataaattcctcaacacatacaacctcccaagactaaaccaggaagaagttgaatctcttaatagaccaataacaggctgtgaaattgaggcattaattaatagcttaccaaccaaaaaaagtccaggaacagacggattgacagccaaattctaccataggtacaaggaggagctggtaccattccttctgaaacgattccaatcagtagaaaaagagagaatcctccctaactcattttatgaggccagcatcatcctgataccaaagcctggcagagacgcaacaaaagaagaaaattttcgaccaatatccttgatgaacatcgatgcaaaaatcctcaataaaatactggcaaaccgaatccagcagcacatcaaaaagcttatccaccatgatcaagtgggcttcatccctgggatgcaaggctggttcaacatatgcaaatcaataaatgtaatccagcatataaacagaaccaatgacaaaaaccacattattatctcaatagatgcagaagaggccttcaacaaaattcaacagcccttcatgctaaaaactctcaataaattagccccaaatctccttaagctgataagcaacttcagcaaagtctcaggatacaaaatcaacgtgcaaaaatcacaagcattcttatacaccaataacagacaaacagagagccaaatcatgagtgaactcccattcacaattgcttcaaagagaataaaatacctaggaatccaacttataagggatgtgaaggaccttttcaaggaaaactacaaacctctgctcaacgaaataaaagaggacacaaacaaatggaagaacattccatgctcatggataggaagaatcaatatcatgaaaatggccacactgcccaaggacctttcctttgtgcacatgaagagagagaacgctggtgtctcctctacttataaggacgtcagtcctattgcatgccacccttatgacctcatttaa

SEQ ID NO: 17617 - DNA, 2168 bp, Homo sapiens; identical to SEQ ID NO: 10213
  SIMILAR (979)..(2166): 881254mologous to Homo sapiens putative p150,accession number U93563,Smith-Waterman Score=1863.

SEQ ID NO: 17618 - DNA, 2067 bp, Homo sapiens
  SIMILAR (1)..(2028): 891254mologous to Homo sapiens putative p150,accession number U93574,Smith-Waterman Score=3151.
atgaaggagatagagatacaaaaatcccttccaaaaatcaatgaatccaggagctggttttttgaaaagatccacaaaattgatagactgctagcaagattaataaagaagaaaagagagaagaatcaaatagacacaataaaaaatgataaaggggatatcaccgccaatcccacagcaatacaaactaccatcagagaatactataaacacctctatgcaaataaactagaaaatctagaagaaatggataaattcctcgacacatacaccctcccaagactaaaccaggaagaagctgaatctctgaatacaccaataacaggctctgatattgaggcaataattaatagcttaccaaccaaaaagagtccaggaccagatggattaacagctgaattctaccagaggtacaaggaggagctgaaaaaggagggaatcctccttagctcattttatgaggccagcatcctcctgataccaaagccgggcagagacacaaccaaaaaagagaattttagaccaatatccttgatgaacattgatgcaaaaatcctcaataaaatactggcaaaccgaatccagcagcacatcaaaaagcttatccaccatgatcaagtgggcttcatccctgggatgcaaggctggttcaacatatgcaaatcaataaatgtaatccagcatataaacagaaccaaagacaaaaatcacacgattatctcaatagatgcagaaaaggcctttgacaaaattcaacagcccttcatgctaaaaactctcaataaattgggtattgatgggacgtatctcaaaataataagagctatctatgacaaacccacagccaatatcatactgaatggacaaaaactggaagcattccctttgaaaactggcacaagacagggatgccctgtctcaccagtcgtatttaacacagtgttggaagttctggccagggaaatcaggcaggagaaggaaataaagggcattcaattaggaaaagaggaagtcaaacggtccctgtttgcagatgacatgattgtatatctagaaaaccccatcgtctcagcccaaaatctcctaaaactgataagcaacttcagcaaagtctcaggatacaaaatcaatgtgcaaaaatcacaagcattcttatacaccaataacagacaaacagagagccaaatcatgagtgaactcccattcacaattgctccaaagagaataaaatacctaagaatccaacttacaagggatgtgaaggacctcttcaaagagaactacaaactactgctcaatgaaataaaagaggatacaaacaaatggaagaacattccatgctcatgggtaggaagaatcaatatcgtgaaaatggccatactgcccaagggaattcatagattcaatgccatccccatcaagctaccaatgactttcttcacagaattggaaaaaactactttaaagttcatatggaaccaaaaaagagcccgcatcgccaagtcaatcctaagccgaaagtacaaagctggaggcagcatgctacctgacttcaaattatgctacaaggctacagtaaccaaaaaagcatggtactggtaccaaaacagagatatagaccaatggaacagaacagagccctcagaaataatgccacacatctataactatctgatctttgacaaacctgagaaaaacaagcaatggggaaaggattccctatttaataaatggtgctgggaaaactggctaaccatatgtagaaagctgaaactggatcccttccttacaccttatacagaaataaattcaaggtggattaaagacttaaatgttagacctaaaaccataaaaactctagaagaaaacctaggaaataccattcaggacataggcatgggcaaggacttcatgtctaaaacaccaaaagcaatggcaacaaaagccaaaattgacgaatgggatctacttaaactaaaagagtttctgcacagcaaaagaaactaccgtcagagtgaacaggcaacctacagaatgggagacaatttttgcaatctactcatctga

SEQ ID NO: 17619 - DNA, 3457 bp, Homo sapiens; identical to SEQ ID NO: 6064
  SIMILAR (3290)..(3457): 941254mologous to Homo sapiens ORF2 contains a reverse transcriptase domain.; ORF2,accession number M80341,Smith-Waterman Score=279.

SEQ ID NO: 17620 - DNA, 3633 bp, Homo sapiens
  SIMILAR (1)..(3096): 991254mologous to Homo sapiens unknown,accession number AF149422,Smith-Waterman Score=5311.
atggtaaagggatcaattcaacaagaggagctaactatcctaaatatttatgcacccaacacaggagcacccagattcataaagcaagtcctcagtgacctacaaagagacttacactcccacacattaataatgggagactttaacaccccactgtcaacattagacagatcaacgagacagaaagtcaacaaggatacccaggaattgaactcagctctgcaccaagcggacctaatagacatctacagaactctccaccccaaatcaacagaatatacatttttttcagcaccacaccacacctattccaaaattgaccacatagttggaagtaaagctctcctcagcaaatgtaaaagaacagaaattataacaaactatctctcagaccacagtgcaatcaaactagaactcaggattaagaatctcactcaaagccgctcaactacatggaaactgaacaacctgctcctgaatgactactgggtacataacgaaatgaaggcagaaataaagatgttctttgaaaccaacgagaacaaagacaccacataccagaatctctgggacgcatgcaaagcagtgtgtagagggaaatttatagcactaaatgcctacaagagaaagcaggaaagatccaaaattgacaccctaacatcacaattaaaagaactagaaaagcaagagcaaacacattcaaaagctagcagaaggcaagaaataactaaaatcagagcagaactgaaggaaatagagacacaaaaaacccttcaaaaaatcaatgaatccaggagctggtttcttgaaaggatcaacaaaattgatagaccgctagcaagactaataaagaaaaaaagagagaagaatcaaatagactcaataaaaaatgataaaggggatatcaccaccgatcccacagaaatacaaactaccatcagagaatactacaaacacctctacgcaaataaactagaaaatctagaagaaatggatacattcctcgacacatacaccctcccaagactaaaccaggaagaagttgaatctctgaatagaccaataacaggctctgaaattgtggcaataatcaatagcttaccaaccaaaaagagtccaggaccagatggattcacagccgaattctaccagaggtacaaggaggaactggtaccattccttctgaaactattccaatcaatagaaaaagagggaatcctccctaactcattttatgaggccagcatcattctgataccaaagccgggcagagacacaaccaaaaaagagaattttagaccaatatccttgatgaacattgatgcaaaaatcctcaataaaatactggcaaaccgaatccagcagcacatcaaaaagcttatccaccatgatcaagtgggcttcatccctgggatgcaaggctggttcaatatacgcaaatcaataaatgtaatccagcatataaacagagccaaagacaaaaaccacatgattatctcaatagatgcagaaaaagcctttgacaaaattcaacaacccttcatgctaaaaactctcaataaattaggtattgatgggacgtatttcaaaataataagagctatctatgacaaacccacagccaatatcatactgaatgggcaaaaactggaagcattccctttgaaaactggcacaagacagggatgccctctctcaccgctcctattcaacatagtgttggaagttctggccagggcaatcaggcaggagaaggaaataaagggtattcaattaggaaaagaggaagtcaaattgtccctgtttgcagacgacatgattgtatatctagaaaaccccatcgtctcagcccaaaatctccttaagctgataagcaacttcagcaaagtctcaggatacaaaatcaatgtacaaaaatcacaagcattcttatacaccaacaacagacaaacagagagccaaatcatgactgaactcccattcacaattgcttcaaagagaataaaatacctaggaatccaacttacaagggatgtgaaggacctcttcaaggagaactacaaaccactgctcaaggaaataaaagaggacacaaacaaatggaagaacattccatgctcatgggtaggaagaatcaatatcgtgaaaatggccatactgcccaaggtaatttacagattcaatgccatccccatcaagctaccaatgactttcttcacagaattggaaaaaactactttaaagttcatatggaaccagaaaagagcccgcatcgccaagtcaatcctaagccaaaagaacaaagctggaggcatcacactacctgacttcaaactatactacaaggctacagtaaccaaaacagcatggtactggtaccaaaacagagatatagatcaatggaacagaacagagccctcagaaataatgccgcgtatctacaactatctgatctttgacaaacttgagaaaaacaagcaatggggaaaggattccctatttaataaatggtgctgggaaaactggctagccatatgtagaaagctgaaactggatcccttccttacaccttatacaaaaatcaattcaagatggattaaagatttaaacgttagacctaaaaccataaaaaccctagaagaaaacctaggcattaccattcaggacataggcgtgggcaaggacttcatgtccaaaacaccaaaagcaatggcaacaaaagccaaaattgacaaatgggatctaattaaactaaagagcttctgcacagcaaaagaaactaccatcagagtgaacaggcaacctacaacatgggagaaaattttcgcaacctactcatctgacaaagggctaatatccagaatctacaatgaactcaaacaaatttacaagaaaaaaacaaacaaccccatcaaaaagtgggcgaaggacatgaacagacacttctcaaaagaagacatttatgcagccaaaaaacacatgaaaaaatgctcatcatcactggccatcagagaaatgcaaatcaaaaccactatgagatatcatctcacaccagttagaatggcaatcattaaaaagtcaggaaacaacaggtgttccagcctgctggctccagagagtccagatggtccagatgaggaaggtttccccacaacacagcacagctgtgctaccaaaaagcagccagactgcttctttaagcaggccctgatcttgttcctcctgactggaaccaaagacaaaaatcacatgattatctcaatagatgcagaaaaggccatcaataaaattcagtatcccttcaagttaaaaaccctcaataaactaggtattgaaggagcacacatcaaaataataagagccatatatgacaaactcacagccaatatcataccgaatgggcaaaagctggaagcatttcccttgaaaagcagcacaagacaaggataccctctctcacaactcctattcaacatagtattggaagttctggccagggcaatcaggcaagataaagaaataaaggataatcttggtattcacagaatagccgagagaagagaccaccaggagttcacacgtgtgaggcaaatgtccactcaccatgctctaatggcctacagagttctgtag

SEQ ID NO: 17621 - DNA, 3384 bp, Homo sapiens; identical to SEQ ID NO: 6067
  SIMILAR (1)..(3129): 981254mologous to Homo sapiens unknown,accession number AF148856,Smith-Waterman Score=5357.

SEQ ID NO: 17622 - DNA, 2199 bp, Homo sapiens
  SIMILAR (1)..(1083): 911254mologous to Homo sapiens putative p150,accession number U93572,Smith-Waterman Score=1695.
atgaagatgttctttgaaaccaatgagaacaaagacacaacataccagaatctctgggacacattcaaagcagtgtgtagagggaaatttatagcactacatgcccacaagagaaagcaggaaagatccaaaattgacaccctaatgtcacaattaaaagaactagaaaagcaagagcaaacacattcaaaagctagcagaaggcaagaaataactaaaatcagagcagaactgaaggaaatagagaccaaaaaaacccttcaaaaaattaatgaatccaggaactggttttttgaaaagatcaacaaaatcgatagactgctagcaagactaataaagaagagaagagagaagaatcaaatagacgcaataaaaaatgataaaggggatatcaccagcgatcccacagaaatacaaactaccatcagagaatactacaaacacctctacgcaaataaactagaaaatctagaagaaatggataaattcctcgacacatccaccctcccaagactaaaccaggaagaagttgaatctctgaatagaccaataacaggctctgaaattgtggcaataatcaatagcttaccaaccaaaaaaagtccaggaccagatggattcacagccgaattctaccagaggtacaaggaggagctggtatcactccttctgaaactattccaattaatagaaaaagagggaatccttcctaactcattttatgaggccagcatcatcctgataccaaagccgggcagagacacaaccaaaaaagagaattttagaccaatatccttgatgaacattgatgcaaaaatcctcagtaaaatactggcaaaccgaatccagcagcacatcaaaaagctgatccaccatgatcaagcaggcttcatccctgggatgcaaggctggttcaacatatgcaaatcaataaatgtaatccatcatataaacagaaccaaagacaaaaaccacatgattatctcaatagatgcagaaaaggcctctgacaaaattcaacaacccttcatgctaaaaactctcaataaattagaattggaaaaaactactttaaagttcatatggaaccaaaaaagagcccggatcgccaagtcaatcctaagccaaaagaacaaagccggaggcatcaagctacctgacttcaaactatactacaaggctacagtaaccaaaacagcatggtattggtaccaaaacagagatatagatcaatggaacagaacagagccctcagaaataacgctgcatatctacaactatctgatctttgacaaacctgagaaaaacaagcaatggggaaaggattccctatttaataaatggtgctgggaaaactggctagccatatgtagaaagctgaaactggatcccttccttacaccttatacaaaaattaattcaagatggattaaagacttaaacgttagacctaaaaccataaaaaccctagaagaaaacctaggcattaccattcaggacataggcatgggcaaggacttcatgtctacaacaccaaaagcaatggcaacaaaagccaaaattgacaaatgggatctaattaaactaaagagcttctgcacagcaaaagaaactaccatcagagtgaacaggcaacctacaaaatgggagaaaattttcacaacctactcatctgacaaagggttaatatccagaatctacaatgaactcaaacagatttacaagaaaaaaacaaacaaccccatcaacaagtgggcgaaggacatgaacagacacttctcaaaagaagacatttatgcagccaaaaaacacatgaaaaaatgctcatcatcactggccatcagagaaatgcaaatcaaaaccacaatgagagaccatctcacaccagttagaatggcaatcattaaaaagtcaggaaacaacaggtgccagcagaaggatgggaccctccagattctgcaggagaagggggaggactcctccttgccctggcggcacctccactgctgccaccgaggccgacggtacagcacccacagcttcctacccacgccaggccaggtggctccgcagtgctcctactcccacttcccaggacccccagacttgctgctgctgccaccactaaggccaatgccaatacaaccactgctgctgtcaccctcgatgcaccggcactccctacaaggcccctactag

SEQ ID NO: 17623 - DNA, 3927 bp, Homo sapiens
  SIMILAR (1)..(2958): 991254mologous to Homo sapiens unknown,accession number AF149422,Smith-Waterman Score=5110.
atgggagactttaacaccccactgtcaacattagacagatcaacgagacagaaagtcaacaaggatacccaggaattgaactcagctctgcaccaagcagacctaatagacatctacagaactctccaccccaaatcaacagaatatacatttttttcagcaccacaccacacctattccaaaattgaccacatagttggaagtaaagctctcctcagcaaatgtaaaagaacagaaattataacaaactatctctcagaccacagtgcaatcaaactagaaatcaggattaagaatctcactcaaagccactcaactacatggaaactgaacaacctgctcctgaatgactactgggtacataacgaaatgaaggcagaaataaagatgttctttgaaaccaacgagaacaaagacaccacataccagaatctctgggacgcattcaaagcagtgtgtagagggaaatttatagcactaaatgcctacaagagaaagcaggaaagatccaaaattgacagcctaacatcacaattaaaagaactagaaaagcaagagcaaacacattcaaaagctagcagaaggcaagaaataactaaaatcagagcagaactgaaggaaatagagacacaaaaaacccttcaaaaaatcaatgaatccaggagctggttttttgaaaggatcaacaaaattgatagaccactagcaagactaataaagaaaaaaagagagaagaatcaaatagacacaataaaaaatgataaaggggatatcaccaccgatcccacagaaatacaaactaccatcagagaatactacaaacacctctacgcaaataaactagaaaatctagaagaaatggatacattcctcgacacatacactctcccaagactaaaccaggaagaagttgaatctctgaatagaccaataacaggctctgaaattgtggcaataatcaatagtttaccaaccaaaaagagtccaggaccagatggattcacagccgaattctaccagaggtacaaggaggaactggtaccattccttctgaaactattccaatcaataggaaaagagggaatcctccctaactcattttatgaggccagcatcattctgacaccaaagccgggcagagacacaaccaaaaaagagaattttagaccaatatccttgatgaacattgatgcaaaaatcctcaataaaatactggcaaaccgaatccagcagcacatcaaaaagcttatccaccatgatcaagtgggcttcatccctgggatgcaaggctggttcaatatacgcaaatcaataaatgtaatccagcatataaacagagccaaagacaaaaaccacatgattatctcaatagatgcagaaaaagcctttgacaaaattcaacaacccttcatgctaaaaactctcaataaattaggtattgatgggacgtatttcaaaataataagagctatctatgacaaacccacagccaatatcatactgaatgggcaaaaactggaagcattccctttgaaaactggcacaagacagggatgccctctctcaccgctcctattcaacatagtgttggaagttctggccagggcaatcaggcaggagaaggaaataaagggtattcaattaggaaaagaggaagtcaaattgtccctgtttgcagacgacatgattgtttatctagaaaaccccatcgtctcagcccaaaatctccttaagctgataagcaacttcagcaaagtctcaggatacaaaatcaatgtacaaaaatcacaagcattcttatacaccaacaacagacaaacagagagccaaatcatgggtgaactcccattcacaattgcttcaaagagaataaaatacctaggaatccaacttacaagggatgtgaaggacctcttcaaggagaactacaaaccactgctcaaggaaataaaagaggacacaaacaaatggaagaacattccatgctcatgggtaggaagaatcaatatcgtgaaaatggccatactgcccaaggtaatttacagattcaatgccatccccatcaagctaccaatgactttcttcacagaattggaaaaaactactttaaagttcatatggaaccaaaaaagagcccgcatcgccaagtcaatcctaagccaaaagaacaaagctggaggcatcacactacctgacttcaaactatactacaaggctacagtaaccaaaacagcatggtactggtaccaaaacagagatatagatcaatggaacagaacagagccctcagaaataatgccgcatatctacaactatctgatctttgacaaacctgagaaaaacaagcaatggggaaaggattccctatttaataaatggtgctgggaaaactggctagccatatgtagaaagctgaaactggatcccttccttacaccttatacaaaaatcaattcaagatggattaaagatttaaacgttagacctaaaaccataaaaaccctagaagaaaacctaggcattaccattcaggacataggcgtgggcaaggacttcatgtccaaaacaccaaaagcaatggcaacaaaagccaaaattgacaaatgggatctaattaaactaaagagcttctgcacagcaaaagaaactaccatcagagtgaacaggcaacctacaacatgggagaaaattttcgcaacctactcatctgacaaagggctaatatccagaatctacaatgaactcaaacaaatttacaagaaaaaaacaaacaaccccatcaaaaagtgggcgaaggacatgaacagacacttctcaaaagaagacatttatgcagccaaaaaacacatgaagaaatgctcatcatcactggccatcagagaaatgcaaatcaaaaccactatgagatatcatctcacaccagttagaatggcaatcattaaaaagtcaggaaacaacagctcgagggaagcagccccgaagcctccgcggcggcggcggcggcggtcgcggatcctctccaggctgctcgcaaagtccggccggccggaggcagccgccaactcctctcaacttctgccgatccgctgggcgaagcaacacgcttcctgcgcgtctctcctaggggctgagccggtctccgagggtctcggccgcctccactccctggcgctgcacacaacttacgtggaggccaggcccgcgcggggggcccagagaaagccggcgccgggcgaggctcttgcaggttctcagacccgaacacagacctgggttagagttggggacttgcctgtaataagtgacttacccattgccctcaacctaaggaagccttgccatttaaaacctcccaatggagcctatcaaagcgtgcttcaaagtgtgagggaggctgagagaggaattacagaaccgcctgacattggctgcaacctgatggggagatctgactcaaggaacagtacgatggccattgatgtccccgcccacgcactctgtagaagccttgggaatcttttcaaagcactgcccccacccgagagcatcatgacttctgttgctgggacaaaggtaagaatcattaggaaacacgatcacagtagtgcacctgcttacgcacgatatccagcccagagaaggtcccgcttcctaagccctcctgagactcaccagccacaagcccacatctatactaagttctttcgaaggccctctttactgctggacattcttcctttgtgcaacacgttaataaacccaacttggttcagccacagcgctgcaatgaacattcacggcataaaaaggaatgagagcatgtcttttgcaggagcatggatggagctggaggttatcatccttagcaaactaacacaagaacagaaaaccaaataccgcaagttctcacttataagtgggcactaa

SEQ ID NO: 17624 - DNA, 3348 bp, Homo sapiens; identical to SEQ ID NO: 6068
  SIMILAR (1)..(3093): 981254mologous to Homo sapiens unknown,accession number AF149422,Smith-Waterman Score=5291.

SEQ ID NO: 17625 - DNA, 2385 bp, Homo sapiens
  SIMILAR (1)..(2166): 991254mologous to Homo sapiens unknown,accession number AF148856,Smith-Waterman Score=3667.
atggtaaagggatcaattcaacaagaggagctaactatcctaaatatttatgcacccaatacaggagcacccagattcataaagcaagtcctcagtgacctacaaagagacttagactcccacacattaataatgggagactttaacaccccactgtcaatattagacagatcaacgagacagaaagtcaacaaggatacccaggaattgaactcagctctgcaccaagcagacctaatagacatctacagaactctccaccccaaatcaacagaatatacatttttttcagcaccacaccacacctattccaaaattgaccacatagttggaagtaaagctctcctcagcaaatgtaaaagaacagaaattataacaaactgtctctcagaccacagtgcaatcaaactagaactcaggattaagaatctcactcaaagccgctcaactacatggaaactgaacaacctgctcctgaatgactactgggtacataacgaaatgaaggcagaaataaagatgttctttgaaaccaacgagaacaaagacaccacataccagaatctctgggacgcattcaaagcagtgtgtagagggaaatttatagcactaaatgcctacaagagaaagcaggaaagatccaaaattgacaccctaacatcacaattaaaagaactagaaaagcaagagcaaacacattcaaaagctagcagaaggcaacaaataactaaaatcagagcagaactgaaggaaatagagacacaaaaaacccttcaaaaaatcaatgaatccaggagctggttttctgaaaggatcaacaaaattgatagaccgctagcaagactaataaagaaaaaaagagagaagaatcaaatagacacaataaaaaatgataaaggggatatcaccaccgatcccacagaaatacaaactaccatcagagaatactacaaacacctctacgcaaataaactagaaaatctagaagaaatggatacattcctcgacacatacactctcccaagactaaaccaggaagaagttgaatctctgaatagaccaataacaggctctgaaattgtggcaataatcaatagtttaccaaccaaaaagagtccaggaccagatggattcacagccgaattctaccagaggtacaaggaggaactggtaccattccttctgaaactattccaatcaatagaaaaagagggaatcctccctaactcattttatgaggccagcatcattctgataccaaagccaggcagagacacaaccaaaaaagagaattttagaccaatatccttgatgaacattgatgcaaaaatcctcaataaaatactggcaaaccgaatccagcagcacatcaaaaagcttatccatcatgatcaagtgggcttcatccctgggatgcaaggctggttcaatatacgcaaatcaataaatgtaatccagcatataaacagagccaaagacaaaaaccacatgattatctcaatagatgcagaaaaggcctttgacaaaattcaacaacccttcatgctaaaaactctcaataaattaggtattgatgggacgtatttcaaaataataagagctatctatgacaaacccacagccaatatcatactgaatgggcaaaaactggaagcattccctttgaaaactggcacaagacagggatgccctctctcaccgctcctattcaacatagtgttggaagttctggccagggcaatcaggcaggagaaggaaataaagggtattcaattaggaaaagaggaagtcaaattgtccctgtttgcagacgacatgattgtttatctagaaaaccccatcgtctcagcccaaaatctccttaagctgataagcaacttcagcaacgtctcaggatacaaaatcaatgtacaaaaatcacaagcattcttatacaccaacaacagacaaacagagagccaaatcatgggtgaactcccattcacaattgcttcaaagagaataaaatacctaggaatccaacttacaagggacgtgaaggacctcttcaaggagaactacaaaccactgctcaaggaaataaaagaggacacaaacaaatggaagaacattccatgctcatgggtaggaagaatcaatatcgtgaaaatggccatactgcccaagagatacaagcagctggatgtagagaggaacacacaggtggaagagcacaccaacaggtaccggctgacaccagcaggccatcaaccggcgaggcgaaatgatgcggagtttggcccaggtggtcggggttatgagcagcgggacaccaaagaagagagccacacccccatcacaagccctgagaggggaacaagggaactttccctgtttcacttataa

SEQ ID NO: 17626 - DNA, 3723 bp, Homo sapiens; identical to SEQ ID NO: 6070
  SIMILAR (1)..(3003): 971254mologous to Homo sapiens unknown,accession number AF149422,Smith-Waterman Score=5062.

SEQ ID NO: 17627 - DNA, 3897 bp, Homo sapiens; identical to SEQ ID NO: 6071
  SIMILAR (1)..(2748): 971254mologous to Homo sapiens unknown,accession number AF149422,Smith-Waterman Score=4641.

SEQ ID NO: 17628 - DNA, 2427 bp, Homo sapiens
  SIMILAR (2408)..(2425): 1001254mologous to Homo sapiens putative p150,accession number U93563,Smith-Waterman Score=54.
atgggctgcgttcgccagattataccattagggacacatccagtcgtgcaccaactaaccagtattcctcaaaactgtcaaagtcctcaaaaaacaaggaaagatcgggaaattggacagccaagaggagcctatggagacatgagaagcaaatgtaatgtgatgctgatgatggaatcctggaacagaaaaagaacattagaaatacaaactaccatcagagaatactataaacacctctacacaaataaactagaaaacctagaagagatggataaattccttgacacatacaccctcccaagactaaaccaggaagaagttgaatctctgaatagaccaataacacactctgacattgtgacaatcatcaatagcttaccaaccaaaaaaaagcccgggaccagacagattcacagccaaattctaccagaggtacaaggaggagctggtaccattccttctgaaactattccaatcaatagaaaaagaggaatcctccctaactcattttatgaggccagcatcatcctgataccaaagcttggcagagacacaacaaaaaaagagaattttagaccaatatccctgatgaacactgatgcaaaaatcctcaataaaatactggcaaaccgaatccagcaacatatcaaaaagcttatccaacatgatcaagtgggcttcatccctgggatgcaaggctggttcaacatacgcaaatcaataaacataatccagcatataaacagaatcaaagacaaaaaccacatgattatctcaatagatgcagaaaaggcctttgacaaaattcaacaacccttcatgctaaaaactctcaataaattaggtattgatgggacgtatctcaaaataataagagctatctatgacaaacccacagccaatatcatactgaatggacaaaagctggaagcattccctttgaaaactggcacaagacagggctgccctctctcaccactcctattcaacatagtgttggaagctctggccagggcaatcaggcaggagaaggaaataaagggtattcaattaggaaaagaggaagtcaaattgtccctgtttgcagatgacatgattgtatatctagaaaaccccattgtctcagcccaaaatctccttaagctgataagcaacttcagcaaagtctcaggatacaaaatcaatgtacaaaaatcacaagcattcttatacaccagcaacagacaaacagagagccaaatcatgagtgaactcccattcacaattgcttcaaagagaataaaatacctaggaatccaacttacaagggatgtgaaggacctcttcaaggagaactacaaaccactgctcaaggaaataaaagaggatacaaacaaatggaagaacattccatgctcatggataggaagaatcaatattgtgaaaatggccatactgcacaaagcactttatagattcaatgccatccccatcaagctaccaatgactttcttcacagaattggaaaaaactactttaaagttcatatggaaccaaaaaagagcctgcattgccaagtcaatcctaagccaaaagaacaaagctggaggcatcacgctacctgacttcaaactacactacaaggctacagtaaccaaaacagcatggtactggtaccaaaacagagatatagatcaatggaacagaacagagccctcagaaataataccacccatctacaactatctgatctttgacaaacttgacaaaaacaagaaatggggaaaggattgcctatttaacaaatggtgctggcaaaactggctagccatatgtagaaagctgaaactggatcccctccttacaccttatacaaaaatcaattcaagatggattaaagacttaaacgttagacctaaaaccataaaaaccctggaagaaaacctaggcattaccattcaggacataggcatgggcaaggacttcatgtccaaaacaccaaaagcaatggcaacaaaagacaaaattgacaaatgggatctaattaaactaaagagcttctgcacagcaaaagaaactaccatcagagtgaacaggcaacctacaaaatgggagaaaattttcgtaacctactcatctgacaaagggctaatatccagaatctacaatgaactcaaacaaatttacaagaaaaaaacaaacaaccccatcaaaaagtgggcgaaggacatgaacagacacttctcaaaagaagacatttatgcagccaaaaaacacatgaaaaaatgctcatcatcactggccatcagagaaatgcaaatcaaaaccacagtgagataccatctcacaccagttagaatggcaatcattaaaaagtcaggaaacaacagctgctggagaggatgtggagaaataggaacactgacactgttggtgggactgtaa

SEQ ID NO: 17629 - DNA, 3783 bp, Homo sapiens; identical to SEQ ID NO: 6073
  SIMILAR (1)..(3045): 981254mologous to Homo sapiens unknown,accession number AF148856,Smith-Waterman Score=5206.

SEQ ID NO: 17630 - DNA, 2811 bp, Homo sapiens
  SIMILAR (1)..(1581): 951254mologous to Homo sapiens putative p150,accession number U93569,Smith-Waterman Score=2587.
atgggagactttaacaccccactgtcaacattagacagatcaacgagacagaaagttaacaaggatatccaggaattgaactcagctctgcaccaagcagacctaatagacatctacagaactctccaccccaaatcaacagaatatacatttttttcagcaccacaccacacctattccaaaattgaccacatagttggaagtaaagctctcctcagcaaatgtaaaagaacagaaattataacaaactgtctctcagaccacagtgcaatcaaactagaactcaggattaagaaactcactcaaaaccgctcaactacatggaaactgaacaaaaatgactactgggtacataatgaaatgaaggcagaaataaagatgttctttgaaaccaacaagaacaaagacacaacataccagaatctctgggacacattcaaagcagtgtgtagagggaaatttatagcactaaatgcccacaagagaaagcaggaaagatccaaaattgataccctaacatcacaattaaaagaaccagaaaagcaagagcaaacacattcaaaagctagcagaaggcaagaaataactaaaatcagagcagaactgaaggaaatagagacacaaaaaacccttcaaaaaattaatgaatccaggagctggttttttgaaaggatcaacaaaattgatagaccgctagcaagactaataaagaagaaaagagagaagaatcaaatagacccaataaaaaatgataaaggggatatcaccaccgatcccacagaaatacaaactaccatcagagaatactacaaacacctctacacaaataaactagaaaatctagaagaaatggataaattcctcgacacatacactctcccaagactaaaccaggaagaagttgaatctctgaatagaccactaacaggctctgaaattgtggcaataatcaatagcttaccaaccaaaaagagtccaggaccagatggattcacagccgaattctaccagaggtacaaggaggaactggtaccattccttctgaaactattccaatcaatagaaaaagagggaatcctccctaactcatttgatgaggccagcatcatcctgataccaaagccgggcagagactcaaccaagaaagagaattttagaccaatatccttgatgaacattgatgcaaaaatcctcaataaaatactggcaaaccgaatccagcagcacatcaaaaagcttatccaccatgatcaagtgggcttcatccctgggatgcaagtctggttcaatatacgcaaatcaataaatgtaatccagcatataaacagaaccaaagacaaaaaccacatgattatctcaatagatgcagaaaaggcctttgacacaattcaacaacccttcatgctaaaaactctcaataaattaggtattgatgggatgtatctcaaaataataagagctatctatgacaaacccacagccaatatcacactgaatgggcaaaaactggaagcattccctttgaaaactggcacaagacagggatgccctctctcaccattcctattcaacatagtgttggggtatcccagtctacttctaccacatacttacactcctgatcatgtagttggacctggagcagacattgatcccactcaaataacctttcccggatgcatttgtgtcaaaactccctgcctccctggcacttgctcctgtctccgccatggagagaactatgatgataactcatgccttagagatataggatctggaggaaagtatgcagagcctgtttttgaatgcaatgtcctgtgccgatgcagtgaccactgcagaaacagagtggtccagaaaggtctacagttccacttccaagtgttcaagacgcataaaaaaggctggggacttcgtaccttggaatttataccgaaaggaaggtttgtctgtgaatatgctggtgaggttttaggattctctgaagttcagagaagaattcacttacaaacaaaatccgactccaattacattatagccatcagggaacatgtttataatgggcaggtaatggaaacatttgttgaccctacttatataggaaatattggaagattccttaatcattcttgtgagccaaaccttttgatgattcctgtccgaattgactcaatggtacctaagttggcactttttgcagccaaagatattgtgccagaagaagaactctcttatgattattcaggaagatatcttaatctaacagtcagtgaagacaaagaaaggctagatcatgggaaactaaggaaaccttgttactgtggtgccaaatcatgtactgctttcctgccttttgacagttctctgtactgccccgtagaaaagtcgaacatcagttgtggaaatgagaaggaacccagcatgtgtggctcagccccttctgtgttcccctcctgcaagcgattgacccttgaggttgatgccttccctcccaatggttatggcttatacaacatagtggggaacgcatgggaatggacttcagactggtggactgttcatcattctgttgaagaaacgcttaacccaatggtccccatccctgctggagtatttacaatgggcacagatgatcctcagataaagcaggatggggaagcacctgcgaggagagttactattgatgccttttacatggatgcctatgaagtcagtaatactgaatttgagaagtttgtgaactcaactggctatttgacagaggtccctcacacaacacctggggattatgggaactacaattcaagatga

SEQ ID NO: 17631 - DNA, 4845 bp, Homo sapiens
  SIMILAR (166)..(2919): 971254mologous to Homo sapiens putative p150,accession number U93563,Smith-Waterman Score=4662.
atggcgattgcaatggcggttcgctgcatccatcagcccatcatctacattaggtttagcgcttccttcaggagctcttttagggcaggcctggtggtgacaaaatctctcagcatttgcttgtctataaagtattttatttctccttcacttatgaagcttagtttggctggatatctctcagaccacagtgcaatcaaactagaactcaggattaagaatctcactcaaagccgctcaactacatggaaactgaacaacctgctcctgaatgactactgggtacataacgaaatgaagacagaaataaagatgttctttgaaaccaacgagaacaaagacaccacataccagaatctctgggatgcattcaaagcagtgtgtagagggaaatttatagcactaaatgcctacaagagaaagcaggaaagatccaaaattgacaccctaacatcacaattaaaagaactagaaaagcaagagcaaacacattcaaaagctagcagaaggcaagaaataactaaaatcagagcagaactgaaggaaatagagacacaaaaaacccttcaaaaaatcaatgaatccaggagctggttttttgaaaggatcaacaaaattgatagaccgctagcaagactaataaagaaaaaaagagagaagaatcaaatagacacaataaaaaatgataaaggggatatcaccaccaatcccacagaaatacaaactaccatcagagaatactacaaacacctctacgcaaataaactagaaaatctagaagaaatggatacattcctcgacacatacactctcccaagactaaaccaggaagaagttgaatctctgaatagaccaataacaggctctgaaattgtggcaataatcaatagtttaccaaccaaaaagagtccaggaccagatggattcacagccgaattctaccagaggtacaaggaggaactggtaccattccttctgaaactattccaatcaatagaaaaagagggaatcctccctaactcattttatgaggccagcatcattctgataccaaagccgggcagagacacaaccaaaaaagagaattttagaccaatatccttgatgaacattgatgcaaaaatcctcaataaaatactggcaaaccgaatccagcagcacatcaaaaagcttatccaccatgatcaagtgggcttcatccctgggatgcaaggctggttcaatatacgcaaatcaataaatgtaatccagcatataaacagagccaaagacaaaaaccacatgattatctcaatagatgcagaaaaagcctttgacaaaattcaacaacccttcatgctaaaaactctcaataaattaggtattgatgggacgtatttcaaaataataagagctatctatgacaaacccacagccaatatcatactgaatgggcaaaaactggaagcattccctttgaaaactggcacaagacagggatgccctctctcaccgctcctattcaacatagtgttggaagttctggccagggcaatcaggcaggagaaggaaataaagggtattcaattaggaaaagaggaagtcaaattgtccctgtttgcagacgacatgattgtttatctagaaaaccccatcgtctcagcccaaaatctccttaagctgataagcaacttcagcaaagtctcaggatacaaaatcaatgtacaaaaatcacaagcattcttatacaccaacaacagacaaacagagagccaaatcatgagtgaactcccattcacaattgcttcaaagagaataaaatacctaggaatccaacttacaagggatgtgaaggacctcttcaaggagaactacaaaccactgctcaaggaaataaaagaggacacaaacaaatggaagaacattccatgctcatgggtaggaagaatcaatatcgtgaaaatggccatactgcccaaggtaatttacagattcaatgccatccccatcaagctaccaatgactttcttcatagaattggaaaaaactactttaaagttcatatggaaccaaaaaagagcccgcatcgccaagtcaatcgtaagccaaaagaacaaagctggaggcatcacgctacctgacttcaaactatactacaaggctacagtaaccaaaacagcatggtactggtaccaaaacagagatatagatcaatggaacagaacagagccctcagaaataacgccgcatatctacaactatctgatctttgacaaacctgagaaaaacaagcaatggggaaaggattccctatttaataaatggtgctgggaaaactggctagccatatgtagaaagctgaaactggatcccttccttacaccttatacaaaaatcaattcaagatggattaaagatttaaacgttagacctaaaaccataaaaaccctagaagaaaacctaggtattaccattcaggacataggcgtgggcaaggacttcatgtccaaaacaccaaaagcaatggcaacaaaagccaaaattgacaaatgggatctaattaaactaaagagcttctgcaaagcaaaagaaactaccatcagagtgaacaggcaacctacaacatgggagaaaattttcgcaacctactcatctgacaaagggctaatatccagaatctacaatgaactcaaacaaatttacaagaaaaaaacaaacaaccccatcaaaaagtgggcgaaggacatgaacagacactactcaaaagaagacatttatgcagccaaaaaacacatgaagaaatgctcatcatcactggccatcagagaaatgcaaatcaaaaccactatgagatatcatctcacaccagttagaatggcaatcattaaaaagtcaggaaacaacagagatcagagagctgggaagatcagtgaaagacttgtgattacctcagaaatgattgaaaatatccaatctgttaaggcatactgctgggaagaagcaatggaaaaaatgattgaaaacttaagacaaacagaactgaaactgactcggaaggcagcctatgtgagatacttcaatagctcagccttcttcttctcagggttctttgtggtgtttttatctgtgcttccctatgcactaatcaaaggaatcatcctccggaaaatattcaccaccatctcattctgcattgttctgcgcatggcggtcactcggcaatttccctgggctgtacaaacatggtatgactctcttggagcaataaacaaaatacaggatttcttacaaaagcaagaatataagacattggaatataacttaacgactacagaagtagtgatggagaatgtaacagccttctgggaggagggatttggggaattatttgagaaagcaaaacaaaacaataacaatagaaaaacttctaatggtgatgacagcctcttcttcagtaatttctcacttcttggtactcctgtcctgaaagatattaatttcaagatagaaagaggacagttgttggcggttgctggatccactggagcaggcaagacttcacttctaatggtgattatgggagaactggagccttcagagggtaaaattaagcacagtggaagaatttcattctgttctcagttttcctggattatgcctggcaccattaaagaaaatatcatctttggtgtttcctatgatgaatatagatacagaagcgtcatcaaagcatgccaactagaagaggacatctccaagtttgcagagaaagacaatatagttcttggagaaggtggaatcacactgagtggaggtcaacgagcaagaatttctttagcaagagcagtatacaaagatgctgatttgtatttattagactctccttttggatacctagatgttttaacagaaaaagaaatatttgaaagctgtgtctgtaaactgatggctaacaaaactaggattttggtcacttctaaaatggaacatttaaagaaagctgacaaaatattaattttgcatgaaggtagcagctatttttatgggacattttcagaactccaaaatctacagccagactttagctcaaaactcatgggatgtgattctttcgaccaatttagtgcagaaagaagaaattcaatcctaactgagaccttacaccgtttctcattagaaggagatgctcctgtctcctggacagaaacaaaaaaacaatcttttaaacagactggagagtttggggaaaaaaggaagaattctattctcaatccaatcaactctatacgaaaattttccattgtgcaaaagactcccttacaaatgaatggcatcgaagaggattctgatgagcctttagagagaaggctgtccttagtaccagattctgagcagggagaggcgatactgcctcgcatcagcgtgatcagcactggccccacgcttcaggcacgaaggaggcagtctgtcctgaacctgatgacacactcagttaaccaaggtcagaacattcaccgaaagacaacagcatccacacgaaaagtgtcactggcccctcaggcaaacttgactgaactggatatatattcaagaaggttatctcaagaaactggcttggaaataagtgaagaaattaacgaagaagacttaaaggagtgcttttttgatgatatggagagcataccagcagtgactacatggaacacataccttcgatatattactgtccacaagagcttaatttttgtgctaatttggtgcttagtaatttttctggcagagtgggctcctgcgtggcccaagcctcctgacgagcaccgccccctgctccacggcacccagtcccatagaccgcccaagggctga

SEQ ID NO: 17632 - DNA, 3282 bp, Homo sapiens
  SIMILAR (697)..(2484): 961254mologous to Homo sapiens putative p150,accession number U93572,Smith-Waterman Score=3012.
gttgcttcacagtcttcccttctatctgattcagtggaccaagtaaatgactctctggtaactgcagaggctatttcctggaatgaatcaacgagtgaaacgaataactctatggtgactgaattcatttttctgggtctctctgattctcagggactccagaccttcctatttatgttgttttttgtattctatggaggaatcgtgtttggaaaccttcttattgtcataacagtggtatctgactcccaccttcactctcccatgtacttcctgctagccaacctctcactcattgatctgtctctgtcttcagtcacagcccccaagatgattactgactttttcagccagcgcaaagtcatctctttcaagggctgccttgttcagatatttctccttcacttctttggtgggagtgagatggtgatcctcatagccatgggctttgacagatatatagcaatatgcaaacccctacactacactacaattatgtgtggcaacgcatgtgtcggcattatggctgtcgcatggggaattggctttctccattcggtgagccagttggcctttgccgtgcacttacccttctgtggtcccaatgaggtcgatagtttttattgtgaccttcctagggtaatcaaacttgcctgtacagatacctacaggctagatattatggtcattgctaacagtgaaatacaaactaccatcagagaatactacaaacacctctacgcaaataaactagaaaatctagaagaaatggataaattcctggacacatacactctcccaagactaaaccaggaagaagttgaatctctgaatagaccaataacagaagctgaaattgtggcaataatcaatagcttaccaaccaaaaagagtccaggaccagatggattcacagccgaattctaccagaggtacaaggaggaactggtaccattccttctgaaactattccaatcaatagaaaaagagggagtcctccctaactcattttatgaggccagcatcattctgataccaaagccaggcagagacacaacaaaaaaagagaattttagaccaatatccttgatgaacattgatgcaaaaatcctcaataaaatactggcaaaacgaatccagcagcacatcaaaaagcttatccaccaagatcaagtgggcttcatccctgggatgcaaggctggttcaatatacgcaaatcaataaatgtaatccagcatataaacagagccaaagacaaaaaccacatgattatctcaatagatgcagaaaaggcctttgacaaaattcaacaacccttcatgctaaaaactctcaataaattaggtattgatgggacgtatttcaaaataataagagctatctatgacaaacccacagccaatatcatactgaatgggcaaaaactggaagcattccctttgaaaactggcacaagacagggatgccctctctcaccactcctattcaacatagtgttggaagttctggccagggcaattaggcaggagaaggaaataaagggtattcaattaggaaaagaggaagtcaaattgtccctgtttgcagacgacatgattgtatatctagaaaaccccattgtctcagcccaaaatcttcctaagctgataagcaacttcagcaaagtctcaggatacaaaatcaatgtacaaaaatcacaagcattcttatacaccaacaacagacaaacagagagccaaaccatgagtgaactcccattcacaattgcttcaaagagaataaaatacctaggaatccaacttacaagggacgtgaaggacctcttcaaggagaactacaaatcactgctcaaggaaataaaagaggatacaaagaaatggaagaacatgccatgctcatgggtaggaagaatcaatatcgtgaaaatggccatactgcccaaggtaatttacagattcaatgccatccccatcaagctaccaatgactttcttcacagaattggaaaaaactactttaaagttcatatggaaccaaaaaagagcccgcattgccaagtcaatcctaagccaaaagaacaaagctggaggcatcacgctacctgacttcaaactatacgacaaggctacagtaaccaaaacagcatggtactggtaccaaaacagagatatagatcaatggaacagaacagagccctcagaaataatgccgcatatctacaactatctgatctttgacaaacctgagaaaaacaagcaatggggaaaggattccctatttaataaatggtgctgggaaaactggctagccatatgtagaaagctgaaactggatcccttccttataccttatacaaaaatcaattcaagatggattaaagacttaaacgttagacctcaaaccataaaaaccctagaagaaaacctaggctttaccattcaggacataggcatgggcaaggacttcatgtctaaaacaccgagagaggcactcttatgcattgttggtgagaatacaaaatggagcaaagaccccagtgctttatccacacctccaacaagctgcagtcgaccacaaagaagaaacaagtctgtctcccatgggtcctacccacaccccctgctgttcaccatgaatgatagagtcaacagtgtgaaaacgaccatactgccaaaagcaacctacaaattcaatgcaattcccatcaaaataccaccatcattcttcacagaactagaaaaaacaaggctaaaattcacatggaaccaaaaaagagcccacatagccaaagcaagactaagcaaaaagaataaatctagaggcatcacattactcgacttcaaactatactataaggccatagtcaccaaaacagcatggtactggtataaaaataggcatatagaccaatggaatagaatagagaacccagaaataaagccaaatactttcagccaactgatctttgacaaagcaagcaaaaacataaagtggggaaaggacaccctattcaacaaatggtgctggtataattggcaagccacatgtagaagaatgcaactggatcctcatctctcaccttataaacaaatcaactcaagatggttcacagacttaaatctaagacctgaaaccataaaaattctagaagataagattggaaaaacccttctagacattggcttaggcaaagacttcacaatcaagaacccaaaagcaaacacaacaaagataaatagatgggacttaattaaactgaaagccttctgcacatcaaaataa

SEQ ID NO: 17633 - DNA, 2883 bp, Homo sapiens
  SIMILAR (518)..(2785): 991254mologous to Homo sapiens putative protein-tyrosine kinase,accession number AF116826,Smith-Waterman Score=3928.
atgaccggacaggcgcagaccaccaaccagctcatttcacttacactgttcacaagtaagaccatgaatggaaaaaagtcaatggcaaaaatcccacatcctgctaaagttggttatgtggacacttttctagcgagcgagtctgccttcaagctggaaagatccaaaattgacaccctaacatcacaattaaaagaactagaaaagcaagagcaaacacattcaaaagctagcagaaggcaagaaataactaaaatcagagcagaactgaaggaaatagagacacaaaaaacccttcaaaaaatcaatgaatccaggagctggttttttgaaaggatcaacaaaattgatagaccgctagcaagactaataaagagaaaaagagagaagaatcaaatagacacaataaaaaatgataaaggggatatcaccaccgatcccacagaaatacaaactaccatcagagaatactacaaacacctctacgcaaataaactagaaaatctagaagaaatggatacattcctcgacacatacactctcccaagactaaaccaggaagaagttgaatctctgaatagaccaataacaggctctgaaattgtggcaataatcaatagtttaccaaccaaaaagagtccaggaccagatggattcacagccgaattctaccagaggtacaaggaggaattggtaccattccttctgaaactattccaatcaatagaaaaagagggaatcctccctaactcattttatgaggccagcatcattctgataccaaagccgggcagagacacaaccaaaaaagagaattttagaccaatatccttgatgaacattgatgcaaaaatcctcaataaaatactggcaaaccgaatccagcagcacatcaaaaagcttatccaccatgatcaagtgggcttcatccctgggatgcaaggctggttcaatatacgcaaatcaataaatgtaatccagcatataaacagagccaaagacaaaaaccacatgattatctcaatagatgcagaaaaagcctttgacaaaattcaacaacccttcatgctaaaaactctcaataaattaggtattgatgggacgtatttcaaaataataagagctatctatgacaaacccacagccaatatcatactgaatgggcaaaaactggaagcattccctttgaaaactggcacaagacagggatgccctctctcaccgctcctattcaacatagtgttggaagttctggccagggcaatcaggcaggagaaggaaataaagggtattcaattaggaaaagaggaagtcaaattgtccctgtttgcagacgacatgattgtttatctagaaaacctcatcgtctcagcccaaaatctccttaagctgataagcaacttcagcaaagtctcaggatacaaaatcgatgtacaaaaatcacaagcattcttatacaccaacaacagacaaacagagagccaaatcatgggtgaactcccattcacaattgcttcaaagagaataaaatacctaggaatccaacttacaagggatgtgaaggacctcttcaaggagaactacaaaccactgctcaaggaaataaaagaggacacaaacaaatggaagaacattccatgctcatgggtaggaagaatcaatatcgtgaaaatggccatactgcccaaggtaatttacagattcaatgccatccccatcaagctaccaatgactttcttcacagaattggaaaaaactactttaaagttcatatggaaccaaaaaagagcccgcattgccaagtcaatcctaagccaaaagaacaaagctggaggcatcacactacctgacttcaaactatactacaaggctacagtaaccaaaacagcatggtactggtaccaaaacagagatatagatcaatggaacagaacagagccctcagaaataatgccgcatatctacaactatctgatctttgacaaacctgagaaaaacaagcaatggggaaaggattccctatttaataaatggtgctgggaaaactggctagccatatgtagaaagctgaaactggatccctttcttacaccttatacaaaaatcaattcaagatggattaaagatttaaacgttagacctaaaaccataaaaaccctagaagaaaacctaggcattaccattcaggacataggcgtgggcaaggacttcatgtccaaaacaccaaaagcaatggcaacaaaagccaaaattgacaaatgggatctaattaaactaaagagcttctgcacagcaaaagaaactaccatgagagtgaacaggcaacctacaacatgggagaaaattttcacaacctactcatctgacaaagggctaatatccagaatctacaatgaactcaaacaaatttacaagaaaaaaacaaacaaccccatcaaaaagtgggcgaaggacatgaacagacacttctcaaaagaagacatttatgcagccaaaaaacacatgaagaaatgctcatcatcactggccatcagagaaatgcaaatcaaaaccactatgagatatcatctcacaccagtgcagctggaagcccttctcttcctaacccctgtccatgaggagtcgtgtcacctggtcccccgagatgggattgtagcaggagggcatgtgttaagcccgtttcaagagatactcttcttgctcttgcagctgcttgctctcatctctgagctgcccttctcaggctgctcttgccttacccagatgcaacaaatagtatcagtggactcagaggaccaaagtgatggaagagtcatggacgaatggagcctgagacctgaatcattgctaaaagatgaactacttagaaatgttgttcgataa

SEQ ID NO: 17634 - DNA, 3213 bp, Homo sapiens
  SIMILAR (1177)..(1641): 991254mologous to Escherichia coli 'ferrichrome-iron receptor precursor',accession number D26562,Smith-Waterman Score=840.
atgtcaagtgaatgggagtggttgaggtgctcagaagttaaaggtcagagagacgtgaggccagggtgtttggggtgggactttcgtgtgtatattgttgaggacacccaggatgaggacagaacttggagtgtcaaggaagcctgtgagctggtccttagagttcaggaaatgatcatcacaagggtggtagatgctgcaccacaccacacctattccaaaattgaccacatagttggaagtaaagctctcctcagcaaatgtaaaagaacagaaattataacaaactgtctctcagaccacagtgcaatcaaactagaactcaggattaagaatctcactcaaagccgctcaactacatggaaactgaacaacctgctcctgaatgactactgggtacataacgaaatgaaggcagaaataaagatgttctttgaaaccaacgagaacaaagacaccacataccagaatctctgggacgcattcaaagcagtgtgtagagggaaatttatagcactaaatgcctacaagagaaagcaggaaagatccaaaattgacaccctaacatcacaattaaaagaactagaaaagcaagagcaaacacattcaaaagctagcagaaggcaagaaataactaaaatcagagcagaactgaaggaaatagagacacaaaaaacccttcaaaaaatcaatgaatccaggagctggttttttgaaaggatcaacaaaattgatagaccgctagcaagactaataaagaaaaaaagagagaagaatcaaatagacgcaataaaaaatgataaaggggatatcaccaccgatcccacagaaatacaaactaccatcagagaatactacaaacaactctacgcaaataaactagaaaatctagaagaaatggatacattcctcgacacatacactctcccaagactaaaccaggaagaagttgaatctctgaatagaccaataacaggctctgaaattgtggcaataatcaatagtttaccaaccaaaaagagtccaggaccagatggattcacagccgaattctaccagaggtacaaggaggaactggtaccattccttctgaaactattccaatcaatagaaaaagagggaatcctccctaactcattttatgaggccagcatcattctgataccaaagccaggcagagacacaaccaaaaaagagaattttagaccaatatccttgatgaacattgatgcaaaaatcctcaataaaatactggcaaaccgaatccaacagcacatcaaaaagcttatccaccatgatcaagtgggcttcatccctgggatgcaaggctggttcaatatacgcaaatcaataaatgtaatccagcatataaacagagccaaagacaaaaaccacatgattatctcaatagatgcagaaaaggcctttgacaaaattcaacaacccttcatgctaaaaactctcaataaattaggtattgatgggacgtatgtcaaaataataagagctatctatgacaaacccacagccaatatcatactgaatgggcaaaaactggaagcattccctttgaaaactggcacaagacagggatgccctctctcaccgctcctattcaacatagtgttggaagttctggccagggcaatcaggcaggagaaggaaataaagggtattcaattaggaaaagaggaagtcaaattgtccctgtttgcagacgacatgattgtttatctagaaaaccccatcgtctcagcccaaaatctccttaagctgataagcaacttcagcaaagtctcaggatacaaaatcaatgtacaaaaatcacaagcattcttatacaccaacaacagacaaacagagagccaaatcatgggtgaactcccattcacaattgcttcaaagagaataaaatacctaggaatccaacttacaagggatgtgaaggacctcttcaaggagaactacaaaccactgctcaaggaaataaaagaggatacaaacaaatggaagaacattccatgctcatgggtaggaagaatcaatatcgtgaaaatggccatactgcccaaggtaatttatagattcaatgccatccccatcaagctaccaatgactttcttcacagaattggaaaaaactactttaaagttcatatggaaccaaaaaagagcccgcattgccaagtcaatcctaagccaaaagaacaaagctggaggcatcacactacctgacttcaaactatactacaaggctacagtaaccaaaacagcatggtactggtaccaaaacagagatatagatcaatggaacagaacagagccctcagaaataatgccgcatatctacaactatctgatctttgacaaacctgagaaaaacaagcaatggggaaaggattccctatttaataaatggtgctgggaaaactggctagccatatgtagaaagctgaaactggatcccttccttacaccttatacaaaaatcaattcaagatggattaaagatttaaacgttagacctaaaaccataaaaaccctagaagaaaacctaggcattaccattcaggacataggcgtgggcaaggacttcatgtccaaaacaccaaaagtaatggcaacaaaagccaaaattgacaaatgggatctaattaaactcaagagcttctgcacagcaaaagaaactaccatcagagtgaacaggcaacctacaacatgggagaaaattttcgcaacctactcatctgacaaagggctaatatccagaatctacaatgaactcaaacaaatttacaagaaaaaaacaaacaaccccatcaaaaagtgggcgaaggacatgaacagacacttctcaaaagaagacatttatgcagccaaaaaacacatgaagaaatgctcatcatcactggccatcagagaaatgcaaatcaaaaccactatgagatatcatctcacaccagttagaatggcaatcattcaaaagtcaggaaacaacagggacaacacaaaggaagcactgctgtgtaacaacttggtggctgaagtcttggaggccaaacaggctcagaagcttcaaggcaaagcagccgtcctcagcctctcaaaaatctatgcgatcacagagacaaatgctgagacacccaacaggaagatgaaaattaaactgaagagacccatgaccaaattgcacccaagcatccaaatgttggtg

SEQ ID NO: 17635 - DNA, 2561 bp, Homo sapiens
  SIMILAR (1)..(1119): 941254mologous to Homo sapiens putative p150,accession number U93569,Smith-Waterman Score=1801.
atgaaggcagaaataaagacgttctttgaaactaacaagaacaaagacacaacataccagaatctctgggacacatttaaagcagtgtgtagagggaaatttatagcactaaatgcccacaagagaaagcaggaaagatctaaaattgacaccctaacatcacaattaaaagaactagaaaagcaagagcaaacatattcaaaagctagcagaaggcaagaaataactaagatcagagcagaactgaaggaaatagagacacaaaaaacccttcaaaaaattaatgaatccaggagctggttttttgaaaagatcaacaaaattgatagaccactaacaagactaataaagaagaaaagagagaagaatcaaatagactcaataaaaaatgacaaaggagatatcaccactgatcccacagaaatacaaactaccatcagagaatactataaacacctctacgcaaataaactagaaaatctagaagaaatggataaattccttgacacatacaccctcccaagactaaaccaggaagaagttgaatccctgaatagaccaataacaggctctgaaattgaggcaataattaatagcttacccaccaaaaaaagtccaggaccagatggattcacagctgaattctaccagaggtacaaggaggagctggtaccattccttctgaaactattccaatcaatagaaaaagagggaatcctccctaactcattttatgaggccagcatcatcctgataacaaagcctggcagacacacaacaaaaaagaattttagaccaatatccttgatgaacattggtgcaaaaatcctaaataaaatactggcaaaccgaatccagcaacacatcaaaaagcttatccaccatgatcaagtgggcttcatccctgggatgcaaggctggttcaacatacgaaaatcaataaatgtaatccagcatataaacataaccaacgacaaaaatcacatgattatctcaatagatgcagaaaatgcctttgacaaaattcaacaacgcttcatgctaaaaactctcaataaattaggcattgatgggatgtatctcaaaataataagagctatctatgacaaacccacagccacccaaaatctccttaagctgataggcaacttcagcaaagtctcaggatacaaaatcaatgtacaaaaatcacaagcattcttatacaccaataacagccaaacagagagccaaatcatgactgaactcccattcacaattgcttcaaagagaataaaatacctaggaatccaacttacaagggacgtgaaggacctcttcaaggagaactacaaaccactgctcagtgaaataaaagaggatacaaagaaagggaagaacattccatgctcatgggttggaagaatcaatatcatgaaaatggacatactgcccaaggtgatttatacattcaatgccatccccatcaagctacctatgactttcttcacagaagtggaaaaaactactttaaagttcatttgcaaccaaaaaagagcccgcattgccaagtcattcctaagccaaaagaacaaagctggaggcatcacgccacctgacttcaaactatactacaaggctacagtaaccaaaacagcatgctactggtaccaaaacagagatatagaccaatggaacagaacagagccctcagaaattatgcagcatatctacaactatctgatctttgacaaacctgacaaaaacaagcaatggggaaaggattccctatttaataaatggtgctgggaaaactggctagccatatgtagaaagctgaaactggattccttccttacaccttatacaaaaattaattcaagatggattaaagacttaaatattagacctaaaaccataaaaaccctagaagaaaacctaggcagtatcattcaggacataggcatgggcaaggacttcatgtctaaaacaccaaaagcaatggcaacaaaagccataattgatgaatgggatctgattaaactaaagagcttctgcacagcaaaagaaaccaccatgagagtgaacaggcaacctacagaatgggagaaaattttcgcaacctactcatctgacatagggctaatatccagaatctacaatgaactcaaacaaatttacaagaaaaaaaacaaacaaccccatccaaaagtggccaaaggatatgaacagacacttctcaaaagaagacatttatgcagccaacagacacatgaaaaaatgctcatcatcactggccatcagagaaatgcaaatcaaaaccacaatgagataccatctcacaccagttagaatggcgatcattaaaaagtcaggaaacaacaggtgctggagaggatgtggagaaataggaacacttttacactgttggtgggactgtaaactagttcaaccattgtggaagtcagtgtggcgattcctcagggatctagaactagaaataccatttgacccagccatcccattactgggcatacacccaaaggactataaatcatgctgctataacgacacatgcacac

SEQ ID NO: 17636 - DNA, 5044 bp, Homo sapiens
  SIMILAR (3300)..(3482): 431254mologous to Homo sapiens putative p150,accession number U93570,Smith-Waterman Score=122.
atgacaggatcaaattcacacataacaatattaactttaaatataaatggactaaattctgcaattaaaagacacagactggcaagttggataaagagtcaagacccatcagtgtgctgtattcaggaaacccatctcatgtgcagagacacacataggctcaaaataaaaggatggaggaagatctaccaagcaaatggaaaacaaaaaaaggcaggggttgcaatcctagtctctgataaaacagactttaaaccaacaaagatcaaaagagacaaagaaggccattacataatggtaaagggatcaattcaacaagaggagctaactatcctaaatatttatgcacccaatacaggagcacccagattcataaagcaagtcctgagtgacctacaaagagacttagactcccacacattaataatgggagactttaacaccccactgtcaatattagacagatcaacgagacagaaagtcaacaaggatacccaggaattgaactcagctctgcaccaagcagacctaatagacatctacagaactctccaccccaaatcaacagaatatacatttttttcagcaccacaccacacctattccaaaatcgaccacatagttggaagtaaagctctcctcagcaaatgtaaaagaacagaaattataacaaactatctctcagaccacagtgcaatcaaactagaactcaggattaagaatctcactcaaagccgctcaactacatggaaactgaacaacctgctcctgaatgactactgggtacataacgaaatgaaggcagaaataaagatgttctttgaaaccaacgagaacaaagacaccacataccagaatctctgggacgcattcaaagcagtgtgtagagggaaatttatagcactaaatgcctacaagagaaagcaggaaagatccaaaattgacaccctaacatcacaattaaaagaactagaaaagcaagagcaaacacattcaaaagctagcagaaggcaagaaataactaaaatcagagcagaactgaaggaaatagagacacaaaaaacccttcaaaaaatcaatgaatccaggagctggttttttgaaaggatcaacaaaattgatagaccgctagcaagactaataaagaaaaaaagagagaagaatcaaatagacacaataaaaaatgataaaggggatatcaccaccgatcccacagaaatacaaactaccatcagagaatactacaaacacctctacgcaaataaactagaaaatctagaagaaatggatacattcctcgacacatacactctcccaagactaaaacaggaagaagttgaatctctgaatggaccaataacaggctctgaaattgtggcaataatcaatagtttaccaaccaaaaagagtccaggaccagatggattcacagccgaattctaccagaggtacaaggaggaactggtaccattccttctgaaactattccaatcaatagaaaaagagggaatcctccctaactcattttatgaggccagcatcattctgataccaaagccgggcagagacacaaccaaaaaagagaattttagaccaatatccttgatgaacattgatgcaaaaatcctcaataaaatactggcaaaccgaatccagcagcacatcaaaaagcttatccaccatgatcaagtgggcttcatccctgggatgcaaggctggttcaatatacgcaaatcaataaatgtaatccagcatataaacagagccaaagacaaaaaccacatgattatctcaatagatgcagaaaaagcctttgacaaaattcaacaacccttcatgctaaaaactctcaataaattaggtattgatgggacgtatttcaaaataataagagctatctatgacaaacccacagccaatatcatactgaatgggcaaaaactggaagcattccctttgaaaactggcacaagacagggatgccctctctcaccgctcctattcaacatagtgttggaagttctggccagggcaatcaggcaggagaaggaaataaagggtattcaattaggaaaagaggaagtcaaattgtccctgtttgcagacgacatgattgtttatctagaaaaccccattgtctcagcccaaaatctccttaagctgataagcaacttcagcaaagtctcaggatacaaaatcaatgtacaaaaatcacaagcattcttatacaccaacaacagacaaacagagagccaaatcatgggtgaactcccattcacaattgcttcaaagaggataaaatacctaggaatccaacttacaagggatgtgaaggacctcttcaaggagaactacaaaccactgctcaaggaaataaaagaggacacaaacaaatggaagaacattccatgctcatgggtaggaagaatcaatatcgtgaaaatggccatactgcccaaggtaatttacagattcaatgccatccccatcaagctaccaatgactttcttcacagaattggaaaaaactactttaaagttcatatggaaccaaaaaagagcccgcattgccaagtcaatcctaagccaaaagaacaaagctggaggcatcacactaccttacttcaaactatactacaaggctacagtaaccaaaacagcatggtactggtaccaaaacagagatatagatcaatggaacagaacagagccctcagaaataatgccacatatctacaactatctgatctttgacaaacctgagaaaaaacaagcaatgggaaaaggattccctatttaataaatggtgctgggataactggctagccatatgtagaaagctgaaattggatcccttccttgcaccttatacaaaaatcaattcaagatggattaaagacttaaacgttagacctaaaaccataaaaaccctagaagaaaacctaggcaataccattcaggacataggcatgggcaaggacttcatatctaaaacaccaaaagcaatggcaacaaaagccaaaattgacaaatgggatctaattaaactaaagagcttctgcacagcaaaagaaactaccatcacagtgaacaggcaacctacagaatgggagaaaattttcgcaacctactcatctgacaaagggctaatatccagaatctacaatgaactcaaacaaatttacaaaaaaaaaaaaaaaacaagcccaccaaaaagtgggcaaaggatatgaacagacacttctcaaaagaagacatttatgctgccaaaaaacacatgaaaaaaatgctcatcatcactggccatcagagaaatgcaaatcaaaaccactatgagatatcatctcacaccagttagaatggcaatcattaaaaagtcaggaaacaacagggacatggatgaagctggaagccgtcactctcagcaaactaacataggaacagaaaaccaaacaccgcatgttctcactcataagtgggagttgaacaatgagaacacacagatgcagagaggggaacaacacaccctggagcctgttggaggagaaggtgaattaagaaaagataatcactcaaccaaaaatgaccagtacgataataggcattttcaactggctgtaggaaatggccttatggctaagaccttcatggtcagtttcttctataaagccagtgcctacgttgtacccacaggagaattgccagatttagatataattcagttaaaacaatttggaaacgcattgtcacatctaacagtaggaacctcagtcactcaaatacaaaatttaaatacaatgggaataattggatcccaagatagcagggaccaactggccacactcaaatgtcaaggtaaaggggacccaaaatatcaatgtgatcctccagttaaagtaggtgctaatggaggtcagataattaatgaagttttagctcaggtccaacttacagtgggtccaaagacaaatggatattggagaatgacagtggattatcataagcttaaccaagatgtgactccaattgtagctgctgtaccagatgtggtttcattgcttgaggttatatcaactcttcaaaaagacttctattgctttttccttctgcaaaatatcacactggtccattatattgatggcattatgctgactgaatccagtgagcaagaagtagcagacacactggacttattgactagtatacgtggactcatggaatgccttatccaccatcatggtatcccacacagcattgcctctgaccaaggccctcactttatggctaaagaattgtgggagtgggctcatgctcatggaattcactggtcttaccatattccccatcatcctgaagcagctggattgatagaatggcggaatgaccttttgaagtcacaattacaacaccaactaggtgacaatgctttgcagggctggggcaaagttctccagaaggccatgtatgctctgaatcagcatccaatatatgttactgtttttcccattgccaggattcataagtcctggaatcaaggggtggaagtagaagtggcatcactcaccatcacccctagtgatccactagcaaaatttttgctttccgttcccacaacattacattctcctggcctagaggtcttagttccagctggaggaatgctgccaccaggagacacaacaatcccattgaactggaagttaatattgccacctggacactttgggctcctcctacctttaagtcaacaggctaagaaggcagttacagtgttggctagggtgattgacccagactatcaggatgaaatcagtctactactccacaatggaggtaaggaagagtatgcatggaattcaggagatccattaggtgtctcttggtattaccatgccctgtcattaaggtcaatgagaactacaacagtgcaatccaggcaggattacaaatggcccagatacctcaggaatgaagatttgggtcatgttaccagggaaaaaaaacacaacctgctgaggtgcttgctgaaggctaagggaatatag

SEQ ID NO: 17637 - DNA, 471 bp, Homo sapiens
  SIMILAR (125)..(172): 1001254mologous to Escherichia coli 2,4-dienoyl-CoA reductase,accession number U93405,Smith-Waterman Score=76.
ttgctcttcgtgcccgtcgtatgtgctatgattttcctgatggcaattttgacgctcggcaatgtactttctgtcagctcgccggattatatgaccctgaatgctgtcacggattttggccagccgcaaccggatgcgatttgccgtagaagtagtgcgtgcggtgcgcgaaccgtcggcaacgacttcattattatctaccgactgtcgatgctcgacctggtcgaagacggcgggacttttgccgaaacggtagagctggcgcaggcagttgaagcggcgggcgcgaccattatcaacaccggcattggctggcatgaagcacgtattccgaccattgccacgcccgtgccgcgcggcgcatttagctgggtcacgcgcaaactgaaaggccacgtctcgctgccgctggtaaccacaaaccggattaacgatccgcaggttgccgacgatattctctcgagtacgcat

SEQ ID NO: 17638 - DNA, 505 bp, Homo sapiens
  SIMILAR (276)..(1): 1001254mologous to Escherichia coli Glycerol metabolism operon regulatory protein,accession number D90754,Smith-Waterman Score=490.
gccattacggctgagaatgcaggcggtttcatcgaggataaacagcgcacactctcgcggtgccatatattcccaggcatcttccagcgcagcctgcccgagcgtcagcatcgctttcttacgccgataaatagaagcaaatgtcacgccctgggcctgatgtggtacgttccatgtctcccgtttcatcagcttattgcatcgctcccaggaggttgcaattaagggagatatgccccgaccatcgttgttaaaagcgccactcatatcccgcatcccttatgacaaaaggtgttccggctcgcaattttaagtattaatacacgtaaaagtttcaatatggaacattcattaaagcatatgtttcactatgaaacataatttggggtaattttcttttcccttgcctgatgcacaatggattcatcggcagtcagtggtcgccgtgtcgttgaacatcatccatgccctaccgtaattgctggagcaaaataatgaaaaaatt

SEQ ID NO: 17639 - DNA, 837 bp, Homo sapiens
  SIMILAR (1)..(303): 1001254mologous to Escherichia coli K12 transport of D- alanine, D-serine, and glycine,accession number AE000492,Smith- Waterman Score=535.
atgttgtatgtgaatcctagtgtgattggcgcgttcacgatgattacaaccgtttccgcgattctgtttatgttcgtctggacgattatcctttgctcgtaccttgtgtatcgcaaacagcgtcctcatctacatgagaagtcgatctacaagatgccgctcggcaagctgatgtgctgggtatgtatggcgttctttgtgttcgtggtcgtgttgctgacactggaagatgacactcgccaggcgctgctggttaccccgctgtggtttatcgcgctggggttgggctggctgtttattggtggtgcaggcttctggcggcggtgtgacgttattggtggtgtgtttaatcacttccagcagttcgcccgcttcatcgtgctcgctttccattacgctgattggccccattgcctggctgcccatgccttgtttgatcatcgggaagaggatctgctcttctttcatcatgtggctggaaagctcttcatgcagcatggtcagcttttgccttacctcagtatctgcaagacgcacatgtcgaaagcccgcttcgaatttcgctgggaagaccagtttaatctggccctcgacccgtttaccgcccgcgcttatcacgatgaaaccctgccgcaagagtcaggcctgtctcgatcaaatcttcgttggcaaagtcacctcgtgcctggtgaatcctcgcgcctgccacgaaaccaaaatgccaatccttcccgccgtgcagaaaaaaaatctggcggtggtcgaaacattcagaagctcattaatgaagtcactgtagaggagtttgacaagaaactgctgtcacatgcaatacag

SEQ ID NO: 17640 - DNA, 2229 bp, Homo sapiens
  SIMILAR (1299)..(766): 1001254mologous to Escherichia coli 4-alpha-l- fucosyltransferase,accession number M87049,Smith-Waterman Score= 911.
tcacagcatcaggggatgagccgggatcgcagagccaagtttggggtccggagtacaaataacgaaaccttttgcgccactggcagccaggctgtcgatcgcgttcaatgttttttcgccatccggcacggcaatcttaataacctcaaaccctaaatccttcccggctttatcggcaaacttccattcggtctggaaccacggctcttccggttgcttcaccagaaaaccgagcttcaggttctccgccatagcggattgtgacataacggctgccagaccaatggctgccagggctttagtaaatttgtgcatggttctctccgttttcagccccaggatgtgatgagccgacatcgaggtgccaaacaccgccgtcgatatgaactcttgggcggtatcagcttgcatgcctgcaggtccgttgcggtatgtcacggtctcccgtttgaccagccggtaaccgagcaggaactggcggatggttaccacattgaatattccggtatgaagttcggtctgttcttcgtgggtgagtacatcgggattgtgaccatctcgcgtccgcgttatgaccaggtaatgtccttcggctggaaaatctgcctgccgctgacgctgatcaacttgctggtaacggcggctgtcattctccaggttcgtagtatctggatgatcggcctgcacgcgttcgccaaatgcgaaacgcgaatgtacccggaagagccggtctatctgccgccccgttatcgtggtagtatcgttattcattccatagcgttttagtgccagccagaacatgccaacaatccccagcacgcccgccgccgccagcatccacaacgaaatccagccgcgaataatgccaataaacaggaagatagcgaatgcgatgatgatattggcgcgagtgccgccgacaatcatataagtcagcaagccaaaggcgaccgtgctgacgaggaaaaacagccacgctttgctgtcctggcgcagaaagtagaccaccagcatcgccgggatgaaaaagtaaaagaagcgttttaacgccacgccggagacttcactggaaaagatctgactgtaggagttaagccggaacagcaaaaagccgttgtgcatgaagaagatgccgacgcttaccagcgcgatacccatcaggatcacccacgtaagattggtctccacgcggttcatggtaaacagcggacggcgcggtacatcagcaacgcgtttgcgtaggcgggttttgtaggtgacatagtaaaccgcgtagaagcagcccgcagaaagcaacgctaaaggctgcaactgcttcgccatccagtcggcaataaacggctgggcgtcgcggttgggatgaataccgtcatcctgcatccattgtggcttgaggtagacctcttccataaaaaagggcagcagcggaacatcaaactctttggcgagtttggggtaaatggcgctaaaggcttcattataacggcgaccatagtttgcaggcagacgtatttgcattaacaatggttcagcgttggcggctttgacatcctgcaaaatctggcgcagcgtttgctcggtttgctgtggctgaaaaccacgcaaaccgtcattgccgcccagttcaaccagcacccaacgcggctgatgcgacgttttactctgccaattatcattcaacaaggcaggccaggccgcgctggcagacattcgatacccggcgctcaggctatcacccagaatcaataacgtgtccgcttcggcggcacggaagttaacaggacaggaacttgctatggttaccccatcaatatcttgtgggctaaggtggggggatatgagaggaagatgcgaaggaggcttttggttggggagaagggcggcaatgagatgtggctgtagttcaggaacagtcagggaagcagataattttggtaaaatatctgggccgccgtattgcaacaagcaataaaacaggcacatccgctcaaacacgtagaagcaacctttgaaagccagcaccagtttattgatgcggtgataacccttaaaccgataatagaaacgcagggaaccagctttattttgttgctccatcccagcctgcaacgtgtagctaaataccataaaaacttcccccatgcgacgatgactgagcggcgttttgccttttttatatttcagttccagttgggcgttatccgccagccacggtaattccttgtccat

SEQ ID NO: 17641 - DNA, 1578 bp, Homo sapiens
  SIMILAR (971)..(1576): 981254mologous to Escherichia coli 2,4-dienoyl-CoA reductase,accession number U93405,Smith-Waterman Score=1021.
gtcctgtggcatatgagcgaaggtatggctgacttttcctaattgactggtcatcaactgccgcatctgttccacaggatggagcaacaaaataaagctggttccctgcgtttctattatcggtttaagggttatcaccgcatcaataaactggtgctggctttcaaaggttgcttctacgtgtttgagcggatgtgcctgttttattgcttgttgcaatacggcgggtaaccgttaagagttcagtgattgcccgtccctgacttgccgtcgcgtcaaggcgcaagacccgcgccgcctgggcattaataaattgcaaattaccctgctcgtcccagctaatcacgccatcatccatactttctaacagggcattaagttgatttaaatgacggttagtttcagcgagcaaactgtccgtcagcagtaaatttccgacctcgcgggcgattgccaacgtcaacggcaaatcagctgcggtagtttgctcaaccggacacgccagcgctattgttcccgtcaatcggcccttgctgtcaaacaacggcgttgcacaaaaggcccagttccagagtacctgtttgaaatgttgatcggccatcgtttgcggatcgccattacggctgagaatgcaggcggtttcatcgaggataaacagcgcacactctcgcggtgccatatattcccaggcatcttccagcgcagcctgcccgagcgtcagcatcgctttcttacgccgataaatagaagcaaatgtcagttgatacgaaccctgctaagtaccctgtgtactccaaaatgtggtccaggattcaagcatcggattgttctgtgcaagagcagtgacctttctaagacattcccagctgcacaatgtccagaggaaagcaaacctcctgtccgcatccgctgcagtttgggccgctgccctcctcctcgctgggtcacaggagactggggccagtcgactctagagatccccgacctggtcgaagacggcgggacttttgccgaaacggtagagctggcgcaggccattgaagcggcgggcgcgaccattatcaacaccggcattggctggcatgaagcacgtattccgaccattgccacgcccgtgccgcgcggcgcatttagctgggtcacgcgcaaactgaaaggccacgtctcgctgccgctggtaaccaccaaccggattaacgatccgcaggttgccgacgatattctctcgcgcggcgatgccgatatggtatcgatggcgcgaccgtttcttgctgatgcggagctgctgtcaaaagcgcaatcgggacgagccgatgagatcaacacttgtattggctgcaatcaggcctgtctcgatcaaatcttcgttggcaaagtcacctcgtgcctggtgaatcctcgcgcctgccacgaaaccaaaatgccaatccttcccgccgtgcagaaaaaaaatctggcggtggtcggtgcgggacctgctgggctggcgtttgccattaacgcggcggcgcgtgggcatcaggtaacattgtttgacgctcatagcgagattggcgggcagtttaatatcgccaaaca

SEQ ID NO: 17642 - DNA, 774 bp, Homo sapiens
  SIMILAR (40)..(702): 991254mologous to Escherichia coli shikimate dehydrogenase,accession number Y00710,Smith-Waterman Score=1120.
tcagggacctgcaggaactgtttcgacaggggtaacataatggaaacctatgctgtttttggtaatccgatagcccacagcaaatcgccattcattcatcagcaatttgctcagcaactgaatattgcacatccctatgggcgcgtgttggcacccatcaatgatttcatcaacacactgaacgctttctttagtgctggtggtaaaggtgcgaatgtgacggtgccttttaaagaagaggcttttgccagagcggatgagcttactgaacgggcagcgttggctggtgctgttaataccctcatgcggttagaagatggacgcctgctgggtgacaataccgatggtgtaggcttgttaagcgatctggaacgtctgtcttttatccgccctggtttacgtattctgcttatcggcgctggtggagcatctcgcggcgtactactgccactcctttccctggactgtgcggtgacaataactaatcggacggtatcccgcgcggaagagttggctaaattgtttgcgcacactggcagtattcaggcgttgagtatggacgaactggaaggtcatgagtttgatctcattattaatgcaacatccagtggcatcagtggtgatattccggcgatcccgtcatcgctcattcatccaggcatttattgctatgacatgttctatcagaaaggaaaaactcctttaacagagggtctggtcaaaccttctgcatttgttcactttatactaataactaaatcatttagtaaataa

SEQ ID NO: 17643 - DNA, 863 bp, Homo sapiens
  SIMILAR (222)..(863): 951254mologous to Escherichia coli similar to Alcaligenes eutrophus pHG1 D-ribulose-5-phosphate 3 epimerase,accession number U00006,Smith-Waterman Score=1067.
atgccgtcctgcgtcgcgaaatgcgtcagatggaaggtgcatggctggggagcgatctggtcgatcagggtaaggagcgtctgaatcgtctgggcttctttgaaactgtcgataccgatacccaacgtgttcgggtagcccggaccaggttgatgtcgtctacaagatgcgtaagcctcggtggacgtctcttctataatgacttccaggcagatgacgcagacctgtccgactataccaacaagaagatcgaaattatcgacagccatgccgattacttccacatcgatatcatggacggtcactttgtccccaatctgacactctcaccgttcttcgtaagtcaggttaaaaaactggcaactaaaccgctcgactgtcatctgatggtgacgcggccgcaggattacattgctcaactggcgcgtgcgggagcagatttcatcactctgcatccggaaaccatcaacggccaggcgttccgcctgattgatgaaatccgccgtcatgacatgaaagtggggctgatccttaacccggagacgccagttgaggccatgaaatactatatccataaggccgataaaattacggtcatgactgtcgatcccggctttgccggacaaccgttcattcctgaaatgctggataaacttgccgaactgaaggcatggcgtgaacgagaaggtctggagtacgaaattgaggtggacggttcctgcaaccaagcaacttacgaaaaactgatggcggcaggggcggatgtctttatcgtcggcacttccggcctgtttaatcatgcggaaaatatcgacgaagcatggagagttatgaccgcgcagattctggctgcaaaaagcgag

SEQ ID NO: 17644 - DNA, 893 bp, Homo sapiens
  SIMILAR (56)..(697): 951254mologous to Escherichia coli similar to Alcaligenes eutrophus pHG1 D-ribulose-5-phosphate 3 epimerase,accession number U00006,Smith-Waterman Score=1067.
atgcgtaagcctcggtggacgtctcttctataatgacttccaggcagatgacgcagacctgtccgactataccaacaagaagatcgaaattatcgacagccatgccgattacttccacatcgatatcatggacggtcactttgtccccaatctgacactctcaccgttcttcgtaagtcaggttaaaaaactggcaactaaaccgctcgactgtcatctgatggtgacgcggccgcaggattacattgctcaactggcgcgtgcgggagcagatttcatcactctgcatccggaaaccatcaacggccaggcgttccgcctgattgatgaaatccgccgtcatgacatgaaagtggggctgatccttaacccggagacgccagttgaggccatgaaatactatatccataaggccgataaaattacggtcatgactgtcgatcccggctttgccggacaaccgttcattcctgaaatgctggataaacttgccgaactgaaggcatggcgtgaacgagaaggtctggagtacgaaattgaggtggacggttcctgcaaccaagcaacttacgaaaaactgatggcggcaggggcggatgtctttatcgtcggcacttccggcctgtttaatcatgcggaaaatatcgacgaagcatggagagttatgaccgcgcagattctggctgcaaaaagcgagcaatggggccaacaggtgtatgccattgtacaaaataccgaccaggcgcaggcagttatgccttatggtccaaaatgtctttatgttcttgcgcaaaacgacgcgctgcaacgcactgaaaattacgccgaaagcattgctgccctgctgaaagataaacaccccgctatgttgctgttggccgcgacgaaacgtg

SEQ ID NO: 17645 - DNA, 2057 bp, Homo sapiens
  SIMILAR (151)..(2055): 971254mologous to Shigella flexneri outer membrane antigen Oma90,accession number AF120927,Smith-Waterman Score=3210.
aagggcggaccggtatccgagcgggttcaagacttttgttatcgcattggctcgattctgctggtgctgttaatggggcttgcacttttcaatgatttctctcggttatgagagttagttaggaagaacgcataataacgatggcgatgcaaaaagttgctcatagcgtcgctgctgtttagcagcgccaccgtatacggtgctgaagggttcgtagtgaaagatattcatttcgaaggccttcagcgtgtcgccgttggtgcggccctcctcagtatgccggtgcgcacaggcgacacggttaatgatgaagatatcagtaataccattcgcgctctgtttgctaccggcaactttgaggatgttcgcgtccttcgtgatggtgatacccttctgtgtctcgtgcaagaacgtccgaacattgccagcattactttctccggtaacaaatcggtgaaagatgacatgctgaagcaaaccctcgaggcttatggtgtgcgtgtgggcgaatccctcgatcgcacccccattgccgatatcgagaaaggtctggaagacttctactacagcgtcggtaaatatagcgccagcgtaaaagctgtcgtgaccccgctgccgcgcaaccgtgttgacctaaaactggtgttccaggcaggtgtgtcagctgaaatccagcaaattaacattgttggtaaccatgctttcaccaccgacgaactgatctctcatttccaactgcgtgacgaagtgccgtggtggaacgtggtaggcgatcgtaaataccagaaacagaaactggcgggcgaccttgaaaccctgcgcagctactatctggatcgcggttatgcccgtttcaacatcgactctacccaggtcagtctgacgccagataaaaaaggtatttacgtcacggtgaacatcaccgaaggcgatcagtccaagctttctggcgttgtagtgagcggcaaccttgccgggcactccgctgaaattgagcagctgactaagatcgagccgggtgagctgtataacggcaccaaagtgaccaagatggaagatgacatcaaaaagcttctcggtcgctatggttatgcctatccgcgcgtacagtcgatgcccgaaattaacgatgccgacaaaaccgttaaattacgtgtgaacgttgatgcgggtaaccgtttctacgtgcgtaagatccgttttgaaggtaacgatacctcgaaagatgccgtcctgcgtcgcgaaatgcgtcagatggaaagtgcatggctggggaacgatctggtcgatcagggtaaggagcgtctggatcgtctgggcttctttgaaactgtcgataccgatacccaacgtgttccgggtagcccggaccaggttgatgtcgtctacaaggtaaaagagcgcaccaccggtagcttcaactttggtattggttacggtactgaaagtggcgtgagcttccaggctggtgtgcagcaggataactggttaggtacaggttatgctgttggtatcaacgggaccaaaaacgattaccagacctatgctgaactgtcggtaaccaacccgtacttcaccgtagatggcgtaagcctcggtggtcgtctcttctataatgacttccaggcagatgacgccgacctgtccgactataccaacaagagttatggtacagacgtgacgttgggcttcccgattaacgaatataactcgctgcgtgcaggtctgggttatgtacataactccctgtccaacatgcagcctcaggttgcgatgtggcgttatctgtactctatgggtgaacatccgagcacctctgatcaggataacagcttcaaaacggacgacttcacgttcaactatgcttgcccctataacaagcttgaccgtggttacttcccgacagatggttcacgtgtcaacctgaccggtaaagtgaccattcctggatcggataacgaatactacaaagtgacgttagacacggcgacttatgtgccgatcgatgacgatcacaaatgggttgttctggggcgtacccgctggggttatggtga

SEQ ID NO: 17646 - DNA, 366 bp, Homo sapiens
  SIMILAR (2)..(358): 1001254mologous to Escherichia coli No definition line found,accession number U00006,Smith-Waterman Score=622.
tgattcgatcctcctcgcacagcatacccgccatcgtaacggtgtccatacagtacttgccggattcgtcgaagtgggcgaaaccctcgagcaggcagtcgcgcgggaagtgatggaagagagcggaattaaagttaaaaacttgcgttacgtgacttctcagccgtggccgtttcctcagtctttaatgaccgcgtttatggcggaatatgacagcggcgacatcgtgatcgacccgaaagaattgctcgaggcgaactggtatcgctatgacgatttgccgttactcccgccgcccggcaccgtagcgcgccgtctgatagaagatacggtggcgatgtgtcgggcagagtatgagtgatgatt

SEQ ID NO: 17647 - DNA, 2265 bp, Homo sapiens
  SIMILAR (1155)..(754): 981254mologous to Escherichia coli similar to,accession number D90890,Smith-Waterman Score=661.
ttaatgacatctaaagtaatgaatgctttcagagattttcaatttactttgctgaaaaccattagaggaatcactatctgtggcagctatagtgttacaaaatgtatttcttatataataagacttcaaagttgaaattttaatggctttcgacgccatcatggtggcggtgccaacttcataaacctgcaaaatagccggcgcgttgccggtacgaaatgcggcaatccccgcgcttaaattctgttcgtagttgcctttataggtcggtacaattttgtaatccgggttttcggcgttaaaacgttgggccagagaatccacctctttacccagttccccttccatagaatgccagaacggaatggtcgtcactgcctgtgcattccccattaacgccagtccgagcgccagtgctgaagttctcaccgcttcattcgccagcagcgcatcaccagtatcggaaagcactacatggccgttttccagcacgtagccgcgatccgccagctttagcgcctggttggcgttctgctcgacgagaaagatagtcatcccctgctcgcgcagctgctcgatggtgtcgaaaatttggaccatcgccagcatctgctgttcaccgccggacatggtgcccgcccgctgatacgcgctcatgcagacgtggaagagaactgcgaccatcccttcatccttattgtgcatccatccatccatcccatcatttatttgtccatccatccatccactatccgtggggaacgcctgatgacgcagatcccactcatcaagcattttctcgctggcgtcacaggcctcaagcttactcagcagatgcgcttttgcgagaacgtctgcctcccactcatcgccaccgcgggcaatcgccagactcactaacatcgcttccatattggcgcgggcgtcgaaaatatcgagcagctcctgctctgacatagacgccacccgataccctttttgattcaccaccgtgaccagccgttccgccaccagttgcgaaagagcttcccgtaacggcccaacgccaagtgcataacgcgatgtcagcaaactcattcgtaatttttcatccggtagaaaattaccgcgaataatatcgttcttcagccagcgatagccatccagagacgtaatggctgcgtccatagcgtagtttccattgtgatgcacacatttgttcatccagcgtccaccacattcccaccacacaccatcacagcagcgctggcaagccatcaacatgtgtccaagccatagggtgttgccatcaatagcagctgcagcctcaaactccaccatttcaatttgcttcctgcaaggctttgttgatatgttcccgctggcctgggcagggatctccatgttctttatgcgctttatgctcggcttctcggaagcgccatcattcccggcgaacgcccgaattgtcgccgcctggttcccgacgaaagaacgtggtactgcctccgccatcttaactcggcgcgatatttctcgcaagctgaatatattagcttccagcatcccggtgttgttaccctcactactacttccgaggttccaggttccttcgttatttgccactgcagtacctgtcagcgcagcacctctcataatcgccccgtcagtttgattattaaagaccccgccagccgacatcatccgccctgttacactgccactattattgaatacccccgcgttctgcacgattttattgatggttccggtgttgttcactaacgaactatcagcaccagcattcatggtaatttgcgcagtcatttctccggcattattgaggattccaccgctaacatcgacgttattcgtcatcaccccggcatttttaatgacggcacccttgtcaagttttactaagttattgatgatgccaccgctggtattttccagaagaccgcttgataccgtaatttgatcaccggaaagcgttccgctattaacaacattcccagccagcttatcagtcacagcagcagatttatttagcgttacagtttctccgcttcgtgtaatcgtatcgccaccggtatagatcagtgaggtgaaatcatctgtattattgtactcattccccgattggcacacgccgaaagtgcagattgtaccatagttaacaattgttcctgtgccatcgttataaaacgcctgaacagtaccaacattgatattgataacacccgtctggtcgttgatagcagatacatgctcataaacagccat

SEQ ID NO: 17648 - DNA, 1041 bp, Homo sapiens
  SIMILAR (472)..(1023): 891254mologous to Escherichia coli similar to,accession number D90863,Smith-Waterman Score=826.
atgttggtgggggaaccgggtaccgcaaaatctcttctttctgaattactggcaaccgctattagcggcgatgccgggttaaccatccagggcggggcatctaccaccgaagatcaaatcaagtatggctggaactacgccctgcttatcaatcatggtccgtcaacggaagcgctggtccctgccccgctttatcagggaatgcgcgacggcaaaatcgtccgtttcgaagagataacgcgtacaccgctggaagtgcaggactgtctgttagcttcagcactggcgctcggactggcgttaatggggaatgcacaggcagtgacgaccattccgttctggcattctatggaaggggaactgggtaaagaggtggattctctggcccaacgttttaacgccgaaaacccggattacaaaattgtaccgacctataaaggcaactacgaacagaatttaagcgcggggattgccgcatttcgtaccggcaacgcgccgacgtattttgcaggtcatataatgcaagcctgcggcgttgctctttccgctactatctactttattcgccgcaaagtggttagtttaagcgatcagaaactcaatatcgccatgacctttgtcggctcaatgagcggcgcactgctggtgcaatacgttcaggctgatgtcttacggcagattttgcccattctggtaatttgtatcggcctctatttcttgctgatgccaaagctaggtgaagaagaccgccagcgccggatgtacggtttacccttcgcgttaatagccggtggctgcgtcggtttttatgatggattctttggcccggctgccgggtcgttttacgcgctggccttcgttacgctgtgcggatttaacctcgccaaagccacggctcacgccaaattactcaacgcaacgtcaaacatcggcggtttactgctgtttattctcggcggcaaagtgatttgggcgacgggctttgtcatgctggtggggcagttcctcggcgcgccgcatggggttccgacttgtgtttag

SEQ ID NO: 17649 - DNA, 1731 bp, Homo sapiens
  SIMILAR (646)..(1173): 941254mologous to Escherichia coli argininosuccinate lyase,accession number U00006,Smith-Waterman Score=847.
tgtagagtttgattcagaccttctatattttcccgcttatccgtgccccatctcccattttccctcacccacgccgtcaccgccttgtcatctttctgacaccttactatcttacaaatgtaacaaaaaagttatttttctgtaattcgagcatgtcatgttaccccgcgagcataaaacgcgtgaattcgcgcattcggtacaacaagagagataaacgatgaaaccgttacattatacagcttcagcactggcgctcggactggcgttaatggggaatgcacaggcagtgacgaccattccgttctggcattctatggaaggggaaccgggtaaagaggtggattctctggcccaacgttttaacgccgaaaacccggattacaaaattgtaccgacctataaaggcaactacgaacagaatttaagcgcggggattgccgcatttcgtaccggcaacgcgccggctattttgcaggtttatgaagttggcaccgccaccatgatggcgtcgaaagccattaaaccggtgtatgacgtgtttaaagaggcagggattcagttcgatgagtcgcagtttgtgccgacggtttcaggttactactccgacagcaaaacgggccacttactctcccagccattcacgcagatcaacggttcaaaccattcaacgactcactgcgctttgattaccgtctggcggagcaggatattgttggctctgtggcctggtccaaagccctggtcacggtaggcgtgttaaccgcagaagagcaggcgcaactggaagaggcgctgaacgtgttgctggaagatgttcgcgccaggccacaacaaatccttgaaagcgacgccgaagatatccatagctgggtggaaggcaaactgatcgacaaagtgggccagttaggcaaaaagctgcataccgggcgtagccgtaatgatcaggtagcgactgacctgaaactgtggtgcaaagataccgttagcgagttactgacggctaaccggcagctgcaatcggcgctggtggaaaccgcacaaaactatcaggacgcggtaatgccaggttacactcacctgcaacgcgcccagccggtgacgttcgcgcactggtgcctggcctatattgagatgctggcgcgtgatggtatccgaactcgaggtgtaatactgtctccttttacccgggcaatttaccccctaaaaaaaagggtccacccaccgcaatgggccccacggcgaaaaatcacaacttgcaaaagcgaggcgggccccaccagccggaaaggccggataacactgaggaaacggccacggctgagaagtcacgtaacgcaagtttttaactttaattccgctctcttccatcacttcccgcgcgactgcctgctcgagggtttcgcccacttcgacgaatccggcaagtactgtatggacaccgttacgatggcgggtatgctgggcgaggaggatcgaatcatcgcgacggatggcaacaataatgcagggggcgatttgcgggtagtaacgctcacggcaatggctgcacagcatcgcccattcggttttgctcggatacatttcatgcccgcagtaaccacagtatttatgcgatcggtaaaactccgccagttgtacgcctcgtccggccagttgaaacagcccaacatcgagatcaatgacctgacgtaccgaccccatatcgtgacgccgctgctgttgtactaa

SEQ ID NO: 17650 - DNA, 1605 bp, Homo sapiens
  SIMILAR (547)..(975): 851254mologous to Homo sapiens Human PRO1431 (UNQ737) amino acid sequence SEQ ID NO:315,accession number Y99428,Smith-Waterman Score=563.
atgatgaagctgattaatcgcagtaagcaatcacctattggtcgccgcgcttgcgatgttgcgctggcagctcacttgcaaacatatggcgactatgggcgaagcaagatgaaagagacttatacggtgaaggttgacagcgatgtctcatatgtcctgaaaccaaccagcagaggggagcaggctgaccaagccttctctctgggcatcgggatctgcttcatcgaactgcagggctgcagcgtccgggagaccaagagtcgaagctttgacctgcttcacaccccatcgctgcttcagagctgggcggccgctctgcaggaagcagtaaccgagaccctgtctgactacgaggtggctgagaagatctggtctaatcgggccaaccggcagtgtgcggactgtgggtcctcccgcccagattgggctgctgtcaatttgggggtggtcatctgcaagcagtgtgcagagcctgaagctggacaccgagtgtcttgggagtatgagatagtcagagccccagctcctgtctgtgggggagccatcacggtgttcgtgcagtccatagcgcttctcaatgtactgcaacgactggagcagaggcggcagcaggcttcagagcgggaggctccaagcatagaacagaggttacaggaagtgcgagagagcatccgccgggcacaggtgagccaggtgaagggggctgcccggctggccctgctgcagggggctggcttagatgtggagcgctggctgaagccagccatgacccaggcccaggatgaggtggagcaggagcggcggctcagtgaggctcggctgtcccagagggacctctctccaaccgctgaggatgctgagctttctgactttgaggaatgtgaggagacgggagagctctttgaggagcctgcccccaagccctggccacgagggccctcccctgccctgcacacgtggtatttcagctatcagcatagggtagagcaggactcgggaaaccagacaacggaggaggaaagagcaaaagatcacacaaaggaaacgaaaatatcaaacataccccggaaccacaaccactcacacaagcaggagacagagcaagaagacgtcgaacaatacactgaaggggacaagaagcgcaacaaggacaagaacaagggaaaactaacggaaaaagcagagacgccagagggaatagagaaaaaacaagctgagggagctcaggaggtcccccggggagacagcgaggggaggccggttggggaacgcgagagcccttcatctgaggacgatgacatgaatgaggacacagtagagaggattgttcgctgcatcatccagaatgaagccaatgctgaggccttgaaggagatgctgggggacagtgaaggagaagggacagtgcagctgtccagtgtggatgccacctccagcctgcaggacggagccccctcccatcatcacacagtgcacctgggctctgcagccccttgcctccattgcagccgcagcaagaggcctccacttgtccgtcagggacgctccaaggaaggaaaaagccgcccccggacaggggagaccactgtgttctctgtgggcagg

SEQ ID NO: 17651 - DNA, 637 bp, Homo sapiens
  SIMILAR (379)..(573): 1001254mologous to Bacteriophage phi-80 xis-polypeptide (aa 1 -65),accession number X04051,Smith-Waterman Score=371.
atctgcaccgcgtcagtgctcgccgggctatatccagcaaaggcagtacccgcgaaacagcgagtgatgtcgtagccactttgggagtgcagtgatgatgaagctgattaatcgcagtaagcaatcacctattggtcgccgcgcttgcgatgttgcgctggcagctcacttgcaaacatatggcgactatgggcgaagcaagatgaaagagacttatacggtgaagttgaaaggcgtaaaagtctgggtggaggtggtgaaccgaaaggcgagctacgtggccacagcgatgaccggcatgcgccgtctccgctccctgcccgggcaggttggttgaaaaagattttgaatggcccgaacgggcaactggagagagctatggatgatattttggtaacgtcagacctgaccagtcgctacaaaatttcacgcaaaaccctttggtcatggcaaagtgcagacacaatgcctcggggcttcgtatgcccgttcccaccccctgactggcccggcaaccctaaccgctggcgctctgagtcaatcaaagagtgggaggataaaaagaagataaattaactgaagggctctccgatgatctcttcaagatggctctgccaaacgcggagccagtgtttct

SEQ ID NO: 17652 - DNA, 1101 bp, Homo sapiens
  SIMILAR (487)..(1035): 971254mologous to Escherichia coli yejV,accession number U00008,Smith-Waterman Score=885.
atgatgaagctgattaatcgcagtaagcaatcacctattggtcgccgcgcttgcgatgttgcgctggcagctcacttgcaaacatatggcgactatgggcgaagcaagatgaaagagacttatacggtgaaggttgaaggcgtgaaagtctgggtggaggtggtgaaccgaaaggcgagctacgtggccacagcgatgaccggcatgcgccgtctccgctccctgcccgggcagctggacggcggcttggtggagggttgtgtggtccacgagagtgaaccgactaacaccgacgaccagggactaatggggcgggcggggcacccgccaaaggaccgcgcgtctgtggctgacccgtgccacgatatatggatcctcgacgagccttttaccgcgattgacgttaacggtgtcgatcgtctgacccagcgtatggcgcagcatacggagcagggggggattgtgattctgactacccaccagccgctcaacgttgctgaaacgtttcgccatagcgccgaaatcgccaacccgctgtggttcttcctgattgtaattaccctttttccgctcagtatcggtccggagccgcaactgctggcgcgtattgcaccgggcattatctgggttgctgcgctgctttcatccttgctggcgctggaacgactgttccgtgacgatttgcaggacggcagtcttgaacaattgatgttgttgccgttacccttgcccgccgttgtgctggcgaaggtgatggcgcactggatggtaaccggtctgccgttactcatcctttcgccactggtagcaatgctactgggaatggatgtttatggctggcaagtgatggcgctgacgctgctgctgggaacgcctacgcttggctttctcggtgcaccgggcgtggcgctgacagtgggacttaagcgcggtggtgtgctgctcagcatactggtgttaccgctgactatcccattactcatctttgccaccgccgcgatggacgcggcttctatgcatttgcccgttgacgggatttgctgtaaaccggcatacgcctccgtccgatcacggcatgccgcgaacgcgttgattacctag

SEQ ID NO: 17653 - DNA, 369 bp, Homo sapiens
  SIMILAR (1)..(255): 1001254mologous to Escherichia coli similar to,accession number D90883,Smith-Waterman Score=443.
atggcctggctggcaactcaggaaaacggcgagcaggtcgagcatgaagagacgccgtatccgctggtcgatgatctggagcgtttttatggtcatctggaacaaacgctgctggcaaccggttttatccgtgaaaaccatccggggcaggtgatgaataaattgcgccgtctgtttacccgtgcgcgcccggaaagccaggagttgaatatcctgcgcgggattctggcttctattgagcagcagaataaagggcctacagtgaacagaaccgtaggtcggataaggcgttcacgccgcatccgacagccgttgcctgatgcgacgcgtaatgcgtcttatcaggcctacagtgaacagaaaccgtag

SEQ ID NO: 17654 - DNA, 766 bp, Homo sapiens
  SIMILAR (392)..(186): 921254mologous to Escherichia coli K12 putative tRNA synthetase,accession number AE000169,Smith-Waterman Score=316.
caacgtaggtttgcggtccggtagacacaatggtgacaggttccgcactttcacgcagcgttttcgccatcagctctaccgcggtacagttttgcggtgcgaatgtcggttccggtaatgccgggccgtcgagaccgctttcgccgtgcacattgtccgcgataatcaactcacgcattaacggttttaccgcgcccgcctgctaccggaatatcggtgcgattaagcaaggtcagcatacgcagaacattgcgtaaggttttttgtggtgtgtggtttccggcggaagacgtaattgctttgacatcaagctctggtgaggcgagggcgagaactattgcgatagcgtcgtcatgacttgggtcgcaatctaacagaattggcagtgccattgttgctccttgaggtgtgcttctttgcgacaagggtaacgccaggatgtaacagatacgaggggcgaaacgataaagcgtgagatggcgcgcaattgggtatgcgcgccagagtgattaatgcaggattttcgcgaggaagtcttttgcgcggtccgatttcggatcatcgaagaaagcgtctttcggcgagtattcgacaattttaccctcgtccataaagatcacccgattcgcctctttacgggcaaagcccatttcgtgggtcaccaccatcatggtcattccttcgttcgccagttccaccatcacgtccagtacttagttgatcatctccggatacagcgcagatgtcggttcgtcaaacagcatcg

SEQ ID NO: 17655 - DNA, 837 bp, Homo sapiens
  SIMILAR (409)..(660): 981254mologous to Escherichia coli K12 putative periplasmic protein,accession number AE000396,Smith-Waterman Score=407.
  misc_feature (1)...(837): n = a,t,c or g
atgagtggaggaatcctcagagcacctcagacaccgcggggtagcccttcctcggcgtcatgctgtaggcactccttgcgcctcgtgacggcagcaccgctggtgtgtggtcctcgggtttgtccggcgccagcggctctggacttgccgcctgttgttgctgttgacgtgcccgcagcgcaccatcggagcctcaggtcctgccagcgatgcgctcagcccgataccccaagccatccaagtccaggtgatgtcacccctccgcctgaccaacacagtaaggtccaagttcctctgagccttcttgggccgtggccccagggaaagcaggtgacccacatcacagtgccgagtgggcaaggaactcgaccccgagtaaggaccaagcatgacggagaccacatacccatctgtgtaacggcctatcagggcaaagtgctgctggttgggcagtcaccaaatgctgaactttcggctcgcgccaaacagattgctatgggcgtagacggtgccaacgaagtgtataacgagattcgtcagggccagccgattggtctgggcgaagcatctaacgatacgtggatcaccaccaaagtgcgttcgcagctcttaaccagcgacctggtgaaatcgtccaacgtgaaagtgaccaccgaaaacnggcctacaacgatacaaaccgtaggtcagataaggcgtttacgccgcatccgacatgttttccctcaaatcagaacaacagcgccagcccgccgacaatcacaccagacactgccaccatcgcacctgtcagccataaggctttcgccgggacgctttgcgcagcataatcagtga

SEQ ID NO: 17656 - DNA, 3978 bp, Homo sapiens
  SIMILAR (619)..(1344): 991254mologous to Escherichia coli Copper amine oxidase precursor (EC 1.4.3.6) (Tyramine oxidase),accession number D90777,Smith-Waterman Score=1236.
atgggctgctatgacgacatcgagcaggctgacgcgtttgtgctgtggggcgcaaacatggcggaaatgcacccgatcctctggtcgcgcatcactaaccgtcgtctctctaaccagaacgtcaccgtggcggtgctttctacctaccagcatcgtagcttcgagctggcggataacggcatcatctttacgccgcaatctgacctggtgatcctgaactacatcgccaactatatcattcaaaacaatgcgataaatcaggacttcttcagcaagcacgttaacctgcgcaaaggggcgacggacatcggctacggtttacgtccgacccatccgctggaaaaagcagcgaagaatccgggttctgacgcctccgaaccgatgagctttgaagattacaaagccttcgttgccgagtatacgctggaaaaaactgccgaaatgaccggcgtgccgaaagaccagttagaacaactggcgcagctgtatgccgatccgaacaagaaagtcatctcctactggacgatgggcttcaaccagcatactcgtggcgtgtgggctaacaacctggtctacaacctgcacctgctgaccggcaaaatttcccagccgggttgcgatggcgcgtacgtgaaagtgaagcctggtgcgcaaacagcaattgttaatggtcagcctctggcactgcaagtaccggtagtgatgaaagacaataaagcctgggtttctgacacctttattaacgatgttttccagtccgggctggatcaaacctttcaggtagaaaagcgccctcacccacttaatgcgctaactgcggacgaaattaaacaggccgttgaaattgttaaagcttccgcggacttcaaacccaatacccgttttactgagatctccctgctaccgccagataaagaagctgtctgggcgtttgcgctggaaaacaaaccggttgaccagccgcgcaaagccgacgtcattatgctcgacggcaaacatatcatcgaagcggtggtggatctgcaaaacaacaaactgctctcctggcaacccattaaagacgcccacggtatggtgttgctggatgatttcgccagtgtgcagaacattattaacaacagtgaagaatttgccgctgccgtgaagaaacgcggtattactgatgcgaaaaaagtgattaccacgccgctgaccgtaggttatttcgatggtcaagatggcctgaaacaagatgcccggttgctcaaagtcatcagctatcttgatgtcggtgatggcaactactgggcacatcccatcgaaaacctggtggcggtcgttgatttagaacagaaaaaaatcgttactcggtccgctacgttgttgccttcatcatcagttacgccctgcataacggataaagactggcaaaccaccagctttggcagattatcatcctgcatatcaagaaatgctttcacggtcagcgaactggcattgatggcagataaatccgccgccagcggcaatacggctgaaggtcggacttccgccatggcagaaaacaggatcgtgttatcgatcagatcgattttggcatcaaagacaccgtcgaaattctgcatatgggggcgtgagtatcaactgcaaccgaatgttgagtgggatgcgcactatctacacggcgatggctggctgggcgagtggcaatgtgtctcgcacagcgatgatagtttgtgtctggtgtatgaacatcgcagcggtgtctatcactatcgggtaagtcaggcgtttcatttaacggcggatacgctgacggtgacgctctctgtcaccaatcaaggggcagagacgctgccatttggtaccggctggcatccttattttccgttgtcgccgcaaacgcggattcaggcacaggcgagcggttactggctggagcgggagcagtggctggcggatcgtccgccgcttcctcaaaccctgtttgccgcctgtcagcatctgctggcgatgttcgttgcggtgatcacgccagcgctattaatctgccaggcgctgggtttaccggcacaagacacgcaacacattattagtatgtcgctgtttgcctccggtgtggcatcgattattcaaattaaggcctggggtccggttggctccgggctgttgtctattcagggcaccagcttcaactttgttgccccgctgattatgggcggtaccgcgctgaaaaccggtggtgctgatgttcctaccatgatggcggctttgttcggcacgttgatgctggcaagttgcaccgagatggtgatctcccgcgttctgcatctggcgcgccgcattattacgccgctggtttctggcgttgtggtgatgattatcggcctgtcgctaattcaggttgggttaacgtccattggcggcggttacgcagccatgagcgataacaccttcggcgtcagctcggtaccatgtcttcccggcgacgatggaactgtgcatctcgccttcggttttgcgctgattgttggcatccccgtggggatgattgccgggattacgcgccataagtggcaggataacttgatcaacgccatcgccttactgggcttttcaatcccggtgttctggctggcgcttctgttgacgctgttttgttcactcacgctagggcgtttcgatctgctctacgaagtgaaaccgattaccggttttgcgttgattgatgcctggctttcggactcaccatggcgggatgaaatgatcatgagcgcaatccgccatatgatattgcccgtgatcaccctgtcggttgcgccaacaactgaagtgatccgcctgatgcgtatcagcactatcgaagtgtatgaccagaactatgtaaaagcggcggcgacccgcggtttgtcgcgctttactattttgcgtcgccacgttctgcataacgcgttaccgccggttattcctcgcctgggcttacagttttccaccatgctgacgctggcgatgatcaccgaaatggtttttagctggccgggtttaaagaatcgcattccccgctctaacgcctgtgcgcccttctgtgccacaggctccgcctgtcctggcctgccgcgccgtctaacttccgtcatacctacggttaactccgacctacaagcgtcacgcaaaacagagttcctgttcaggaatactttcaacatcacagttgtcactgccgccgcgatcgatggtcagaaaatcggtgacgcgctgccaggcgaaaagtgggtgatgccagacgttacgatgcgtacagtcttgctcaagaatctcaaccagcgccaaatcgtggtaacgctccaccaggccattgttaatatggaaaaaatcccgttgctgcgagcgggccgtctgattcattcgtacaaccccgggctggcttgcgaaacttatatggctcaagtctatggctggatgaccgttggcttgttgctgaccgcatttgttgcctggtatgcggctaattccgcggccgtgatggagctgttgttcactaaccgtgtctttttaatcggtctgatcatcgcgcaattagcattggttattgtgttatcagcgatgattcaaaagctgagcgcaggtgtaacgacgatgctctttatgctttattcggcgctgacgggtcttacgctttccagtatattcattgtctataccgctgcttctatcgccagtactttcgtcgttactgccgggatgttcggcgcaatgagcctgtacggttacaccacgaagcgcgatttaagtggctttggcaatatgctgtttatggcgttaatcggcattgtgctggcatcgctggtcaacttctggttgaaaagcgaagcattgatgtgggcagttacctacatcggcgtgattgtctttgtcggattgacggcgtatgacacgcagaaactgaaaaatatgggtgagcagattgatacccgcgacacgtatcccgcgtgctgttaa

SEQ ID NO: 17657 - DNA, 1590 bp, Homo sapiens
  SIMILAR (571)..(1128): 981254mologous to Escherichia coli GltL,accession number U10981,Smith-Waterman Score=912.
atgcttatcgccgaaggattaatgaccgccaaaaatatcacggtgattaccaacagtctcccggcagcgtttgccctttccgaaaataaagacattactctggtcgtctgtggtggcacggtccgccataaaacgcgctcgatgcatggttccattgccgagcgttcattacaggatattaatgccgatttaatgtttgtcggtgctgatggtattgatgcggttaatggtattacgacctttaatgaaggttattctattagcggtgcgatggtcacagccgctaataaagtgattgccgttctcgattcatcgaaatttaaccgtcgcggttttaatcaggtactaccaatcgaaaaaattgacattattattaccgatgatgctgtgtcagaggtggataaactggcattgcagaagacgcgggatacctcactggtgtatgtcttatccctggccgatttcttccgtaccgcctcaaccattggtgagcgtgatggtacgcaggttgagatgatcctgtttgccggatttgtttatctcgttattagtcttagcgcgtcgttgttggtgctgaccgactgctcaaccgaagtgaaaaaaggcgaagtggtggtggtttgcggcccgtctggttccggcaaatcaacgctgattaaaaccgtcaacggcctcgaaccggtgcagcaaggtgaaatcaccgtcgatggtatcgtggttaacgacaagaaaaccgatctggcaaagctgcgttcccgcgtcgggatggtattccagcatttcgagctgttccctcatctgtcgattatcgaaaacctgaccctggcgcaggtgaaagtgcttaaacgcgataaagcgccggctcgtgaaaaagccctgaaactgctggagcgtgtcgggctttctgctcacgccaataagtttccggcgcactattccggcggtcagcagcagcgtgtggcaatcgctcgcgcgttgtgtatggatcctattgcgatgctgtttgacgaaccgacatcggcgctggatccggagatgatcaacgaagtactggacgtgatggtggaactggcgaacgaaggaatgaccatgatggtggtgacccacgaaatgggctttgccgtaaagtggcgaatcggaagcacacaacaaggagcacaattgcactgcaatcgctggctacatgtacgtaagcatctgctcgtggcttactacaatctggttggcattaagcctggcaaagaatcgtacatgaggctaaacgaaaaagcccttgatgatttttgtcagagcctggtcgattacttgtctgccggacatttcagtatttatgagcgcattcttcataagctggaaggcaacgggcaactcgcgcgcgccgcgaagatttggccgcaactcgaagccaatactcaacagattatggattactacgattccagtctggaaaccgccatcgatcatgataattaccttgagtttcaacaggttttatctgacatcggcgaggcgctggaagcggcatttgtgctggaagataagctgattctgctggtgcttgacgccgcccgcgtcaaacatcctgcttga

SEQ ID NO: 17658 - DNA, 639 bp, Homo sapiens
  SIMILAR (241)..(149): 621254mologous to Escherichia coli hypothetical protein,accession number U73857,Smith-Waterman Score=95.
ttaaccttcagtgccagtttttttatcgtggcgtttgtacctgttgtcggatgcggcgtgaacgcgatatccgcgctggggttctgtacactgtaggcggttctgttcactgtaggcctgataagacgcattacgcgtcgcatcaggcaacggctgtcggatgcggcgtgaacgccttatccgacctacggttctgttcactgtaggcctgataagacgcattacgcgtcgcatcaggcaacggctgttattcggccttgttacctttattctgcaggctgctgtaagccgaaagtgcttaagttcctgtccaacgtccgtgtggggagactctgatgaggtcctccgtggtatgcctcgggggtacggcgccagagtgctcatcacttgggtgcgcggagaaatcgggacgttcttggccgcgtaaggtggcccacactttagggagctggacagtgccccgcgagagttaagagtgtccacaggagtggcgagtctccttggtgtttgtggttgttgctgtgttgccttgtacttgtgtttggtttttggacgaccacggccttcctttaccttctggcttgccaccagggcctgggacgtcgaacgtgggccagggactccttgggcgtgcaccat

SEQ ID NO: 17659 - DNA, 1580 bp, Homo sapiens
  SIMILAR (1)..(426): 961254mologous to Escherichia coli matches PS00041: Bacterial regulatory proteins, araC family signature,accession number U00006,Smith-Waterman Score=707.
atgcgaatgcagccgcaggagcagcaaacggcaaggcttatcgtcgccagcctgcttagccactgccgcgatttgcttggcagccaaatccagaccgcctcacgcagccaggcactatttgaagctattcgcgattatatcgacgaacgctatgcctccgcgcttacccgcgaatctgttgcacaggcgttttatatttcgccaaattacctctcgcacctgtttcaaaaaacgggggccattggttttaacgaatacctgaatcacacgcgactggagcacgctaagacgttattgaaaggctatgacctgaaggtaaaagaagtggcgcacgcctgcggctttgtcgacagcaactacttctgccgtctgtttcgtaaaaacaccgaacgctcgccgtcggaatatcgccggcacaggcggttacatgacaacaggatatgccaatttaaaactcccacggataaccctgaaaatccggaccgatatctgacatttcgccgcatcgataaagagacatccagtctccctaaaaaagtggctccatcatgcaaacgattatccgtgtcgagaagctcgccaaaaccttcaatcagcatcaggcgctgcatgcggttgatgctgattgaagggcgacgttcatctttcattcatccggacaaagacgtggacggtttccatccttacaacgtcggtcgtctgtgccagcgcgcgccgcgtctgcgtccctgcaccccgcgcggtatcgtcacgctgcttgagcgttacaacattgataccttcggcctcaacgccgtggtgattggcgcatcgaatatcgttggccgcccgatgagcatggaactgctgctggcaggttgcaccactacagtgactcaccgcttcactaaaaatctgcgtcatcacgtagaaaatgccgatctattgatcgttgccgttggcaagccaggctttattcccggtgactggatcaaagaaggcgcaattgtgatgatgtcaggcatcaaccgcggtgtggcaaccgatgcctcatgttttccgctggtgccatttgcaaaccgggtgagcggcaatcgttttgtctggcaggggcgtgagtatcaactgcaaccgaatgttgagtgggatgcgcactatctacacggcgatggctggctgggcgagtggcaatgtgtctcgcacagcgatgatagtttgtgtctggtgtatgaacatcgcagcggtgtctatcactatcgggtaagtcagggcgtttcatttaacggcggatacgctgacggtgacgctctctgtcaccaatcaaggggcagagacgctgccatttggtaccggctggcatccttattttccgttgtcgccgcaaacgcggattcaggcacaggcgagcggttactggctggagcgggagcagtggctggcgggtgagttttgcgagcagctaccgcaggaactggattttaaccagcccgcgccgttgccgcgccagtgggtgaacaatggttttgccggatggaatggtcaggcccgcatcgagcagccgcaggaaggttatgccatcacactggactagggatctcgat

SEQ ID NO: 17660 - DNA, 1765 bp, Homo sapiens
  SIMILAR (1)..(795): 1001254mologous to Escherichia coli ORF 2 (AA 1- 301),accession number V00279,Smith-Waterman Score=1428.
ttgcacgtcattctcagacgaaccgatgactggatggatggccgccgcagtcgtcacactgatgatacggatgtgcttctccgtatacaccatgttatcggagagctgccaacgtatggttatcgtcgggtatgggcgctgcttcgcagacaggcagaacttgatggtatgcctgcgatcaatgccaaacgtgtttaccggatcatgcgccagaatgcgctgttgcttgagcgaaaacctgctgtaccgccatcgaaacgggcacatacaggcagagtggccgtgaaagaaagcaatcagcgatggtgctctgacgggttcgagttctgctgtgataacggagagagactgcgtgtcacgttcgcgctggactgctgtgatcgtgaggcactgcactgggcggtcactaccggcggcttcaacagtgaaacagtacaggacgtcatgctgggagcggtggaacgccgcttcggcaacgatcttccgtcgtctccagtggagtggctgacggataatggttcatgctaccgggctaatgaaacacgccagttcgcccggatgttgggacttgaaccgaagaacacggcggtgcggagtccggagagtaacggaatagcagagagcttcgtgaaaacgataaagcgtgactacatcagtatcatgcccaaaccagacgggttaacggcagcaaagaaccttgcagaggcgttcgagcattataacgaatggcatccgcatagtgcgctgggttatcgctcgccacgggaatatctgcggcagcgggcttgtaatgggggcaaatccagttgtgcaccacgcgatgaccgtaaagttcgcgtgatggcagccgattatgaaaatcagctcgacgagttttccctcgatgcgcccattgtcgcacatgaaaactatcaatgggctaactacgttcgtggcgtggtgaaacatctgcaactgcgtaacaacagcttcggcggcgtggacatggtgatcagcggcaatgtgccgcagggtgccgggttaagttcttccgcttcactggaagtcgcggtcggaaccgtattgcagcagctttatcatctgccgctggacggcgcacaaatcgcgcttaacggtcaggaagcagaaaaccagtttgtaggctgtaactgcgggatcatggatcagctaatttccgcgctcggcaagaaagatcatgccttgctgatcgattgccgctcactggggaccaaagcagtttccatgcccaaaggtgtggctgtcgtcatcatcaacagtaacttcaaacgtaccctggttggcagcgaatacaacacccgtcgtgaacaatgcgaaaaccaggtatccccccaacgtatcacgacggctaaactggccgcctctgtcggcgtttccgaagcggcactgtttcgccacttccccagtaagacccgcatgttcgatagcctgattgagtttatcgaagatagcctgattactcgcatcaacctgattctgaaagatgagaaagacaccacagcgcgcctgcgtctgattgagttgctgcttctcggttttggtgagcgtaatcctggcctgacccgcatcctcactggtcatgcgctaatgtttgaacaggatcgcctgcaagggcgcatcaaccagctgttcgagcgtattgaagcgcatctgcgccaggtattgcgtgaaaagagaatgcgtgagggtgaaggttacaccaccgatgaaaccctgctggcaagccagatcctggccttctgtgaag

SEQ ID NO: 17661 - DNA, 1830 bp, Homo sapiens
  SIMILAR (784)..(1308): 1001254mologous to Escherichia coli GAD alpha protein,accession number M84024,Smith-Waterman Score=949.
atgagttctttaagtcaggctgcgagcagtgtggaaaaacgcacaaatgctcgttactggatagtggtgatgttgtttatcgtcacatccttcaactacggcgaccgcgctacgctctctatcgccggttcggaaatggccaaacatatcggccttgatcccgtgggaatgggctatgtgttctctgctttctcatgggcttatgttatcgggcagatccctggcttcgtcgatatctttagtggattcggcattatcgttgccctgtttacgctgcgcttcctggtcgggcttgctgaagcgccatctttccccggacaaagtcgcatagttggggactggtttccggcgcaggacaggggaacgggagtgtcgatttttactccgttcatacttcgcaagggtgatcttcggccgatttgggtggttatcttgatggcaggtcagctgcatgcgctaatgtcgactctagaggataccccattctctaacaaagcgggaatgcgcttgcgcagatggattaacgcggcggtaatgcggttaaacccactggcttgcctagcgaccagatccaaccaggttaattggttactcctgacaggtaacatcagtgtgtacccagtgggcagcagcgaaccaacacgccggcggtcaacacccatcaacagcactccacactttaataaaacaatcctgcccatcaatgcacgatattctcccaccctaccgtccagtgacgggacccggtggacaacacgtatagacgataaacccacagttggccataaattcgcccgctactgggatgtggagctgcgtgagatccctatgcgccccggtcagttgtttatggacccgaaacgcatgattgaagcctgtgacgaaaacaccatcggcgtggtgccgactttcggcgtgacctacaccggtaactatgagttcccacaaccgctgcacgatgcgctggataaattccaggccgacaccggtatcgacatcgacatgcacatcgacgctgccagcggtggcttcctggcaccgttcgtcgccccggatatcgtctgggacttccgcctgccgcgtgtgaaatcgatcagtgcttcaggccataaattcggtctggctccgctgggctgcggctgggttatctggcgtgacgaagaagcgctgccgcaggaactggtgttcaacgttgactacctgggtggtcaaattggtacttttgccatcaacttctcccgcccggcgggtcaggtaattgcacagtactatgaattcctgcgcctcggtcgtgaaggctataccaaatcaacccaacctgccagaggatctccacccgcaaataattgccaagcccagccagaaacgcctgatcgagcagtaatccatccaactgacgggtacgaaagcgcggcgacaataatcgttctttcaccacctacggcgtcagattcggatccagcacatcgggaccaacgcgttgtaaaaacggatgcgtggtcagttgttccggggtcaacatctgaatatccgaggcgctataaagcagaatggttttgtcagccgtttgcagttttacccgcaatactcgcgtggtctgcggctctttggcggtatcaaccacgcgccagacgccgtaaagctgattatggctgtagagcgttaaattctttgaaaaatgagttaacaacgccttaccacgcgtttcacatgggtaacgtgttgaccattagtggtgaatggttaagggtccacatgaaaggacattccgtatcagtcttgatgtcaccagtattcgttttcttgatgaagacgaaatgcaacgtctga

SEQ ID NO: 17662 - DNA, 1281 bp, Homo sapiens
  SIMILAR (922)..(1275): 941254mologous to Escherichia coli similar to,accession number D90883,Smith-Waterman Score=565.
atggtgccgctgctgctcactcaaggcatcgtactgttccaggatacctcactggtgtatgtgttatccctggccgatttcttccgtaccgcctcaaccattggtgagcgtgatggtacgcacgttgagatgatcctgtttgccggatttgtttatttcggtattagtcttagcgcgtcgttgttggtgctgaccgactgctcaaccgaagtgaaaaaaggcgaagtggtggtggtttgcgggccgtctggttccggcaaatcaacgctgattaaaaccgtcaacggcctcaaaccggtgcagcaaggtgaaatcaccgtcgatggtatcgtggttaacgacaagaaaaccgatctggcaaagctgcgttcccgcgtcgggatgatacccttgaagtcaaagctatcattaaaaggtgtccgatttacttacttgggggggaaacctgggaaacttgcggtgccggtaccactcggttatgtagtgatggcgcaggatctacagcttgcggggtgtgaatacagcttttccgcgataaaaattgcagcaggcggtcagtttcttcccgtgattggcgccattctgaacataaccgataatgtcatatatgaccaggagattgagttcacattcggtcgcctatccttttgcggattgcctcgttggcccaaaggggaagtagagcgaatctgggcctgcggttatcgcgaggaagtccctgttattgcggtaaacaaccgttgcctgatgcgacgcgtaatgcgtcttatcaggcctacagtgaacagaaccgtaggtcggataaggcgttcacgccgcatccgacagccgttgcctgatgcgacgcgtaatgcgtcttatcaggcctacagtgtacagaaccccagggcggatatggcgttcacgccgcatccgacaacagggcgctatgccgtgaccgcaatgcttgacgttgcgctcaactctgaagcgggcccggtaccgttggctgatatttccgaacgtcagggaatttccctttcttatctggaacaactgttttcccgtctgcgtaaaaatggtctggtttccagcgtacgtggaccaggcggtggttatctgttaggcaaagatgccagcagcatcgccgttggcgaagtaattagcgccgttgacgaatctgtagatgccacccgttgtcaggctaaaggcggctggcagggcggcgataaatgcctggaccacgcgctgtggcgtgatctgagcgaccgtctcaccgggtttctcaccacattactttag

SEQ ID NO: 17663 - DNA, 1169 bp, Homo sapiens
  SIMILAR (398)..(796): 991254mologous to Escherichia coli glutamate decarboxylase- beta,accession number M84025,Smith-Waterman Score=694.
  misc_feature (1)...(1169): n = a,t,c or g
gttgaataaagagaaactggatcggtggttgaaagatggcatcaccacgccgggtggaaaactcccttcagaaagagagctgggagaactgctgggcattaaacgtatgacgctgcgccaggcgttgttgaacctcgaggcagaatccaaaatcttccgtaaggatcgtaaggggtggttcgtgacccagccgcgatttaattacagtccggagctgtcggcgagctttcagcgggccgcaattgagcaagggcgagagccttcctgggggtttaccgagaaaaaccgtaccagcgatattcccgagacgctcgcgccactgattgcagtgacgccatcaactgaactctatcgcatcaccggctggggggcgctggaaggacataaagagtttaaaatggataagaagcaagtaacggatttaaggtcggaactactcgattcacgttttggtgcgaagtctatttccactatcgcagaatcaaaacgttttccgctgcacgaaatgcgcgacgatgtcgcattccagattatcaatgacgaattatatcttgatggcaacgctcgtcagaacctggccactttctgccagacctgggacgacgaaaatgtccacaaattgatggatttatccattaacaaaaactggatcgacaaagaagaatatccgctatccgcagccatcgacctgcgttgcgtaaatatggttgccgatctgtggcatgcgcctgcgccgaaaaatggtcaggccgttggcaccaacaccattggttcttccgaggcctgtatgctcggcgcggatggcgatgaaatggcgttggcgcaagcgtatggaagctgcaggcaaaccaacggataaaccaaanctggtgtgcggtccggtacaaatctgcttcgtacctgaagtgggctttgcggtagataaagacggtatcaccattacggtggacgacgatggtcctggcgttagcccggaagatcgcgaacagattttccgtccgttctatcgtaccgatgaagcacgcgatcgtgaatctggcggtacaggtttggggctggcgattgttgaaaccgccattcagcagcatcgtggctgggtgaaggcagaagacagcccgctgggcggtttacggctggtgatttggttgccgctgtataagcggagttaa

SEQ ID NO: 17664 - DNA, 976 bp, Homo sapiens
  SIMILAR (3)..(548): 991254mologous to Escherichia coli ORF_f239; alternate name yggH; orf of M59471,accession number U28377,Smith-Waterman Score= 961.
ccgcgctttttgcccgtgaagcgccggtgacgcttgagattggttttggcatgggggcgtcgctggtggcaatggctaaagatcgccctgagcaggacttcctcggcattgaagtgcattcaccgggcgttggtgcgtgcctggcttctgcgcatgaagaaggtttaagcaacctgcgcgtgatgtgtcacgatgcggttgaagtgctgcataaaatgattcctgacaattcattgcgcatggtgcagctctttttccctgacccgtggcacaaagcgcgccataataaacgccgtatcgttcaggtgccgtttgccgaactggtaaaaagcaaactgcagctggggggcgtattccatatggcgaccgactgggaaccttatgcggaacatatgcttgaagtgatgtcttctattgacggttataaaaacctgtcagagagcaatgattacgtaccgcgtccggcatcacgtccggtgacgaaatttgaacaacgtggtcatcgtcttggtcacggagtatgggacttaatgttcgagagggtgaaataatggcaaagaaccgtagccgtcgtctgcgtaaaaaaatgcacatcgacgaattccaggaattaggattttcggtggcatggcgattcccggaaggtacatcggaagaacagattgataaacccgttgatgattttattaacgaggttatcgacccgaacaaactggcctttgacggcagcggttatctggcctgggaaggtctgatctgcatgcaggaaatcggcaaatgcaccgaagaacatcaggcgattgtgcgtaagtggctggaagagcgcaaactggatgagtttccggttgggccctttcccggggaaaaaaccaaccgggggttggttgcgaagcaggcgcccgtcgacacgcccgagaagcgcgcatcggtgatgagcgacaccgtcttgccccacgagatatgctttagcgcggag

SEQ ID NO: 17665 - DNA, 4332 bp, Homo sapiens; identical to SEQ ID NO: 5034
  SIMILAR (454)..(1386): 991254mologous to Escherichia coli formylglycineamide ribonucleotide synthetase (EC 6.3.5.3),accession number M19501,Smith-Waterman Score=1557.

SEQ ID NO: 17666 - DNA, 3129 bp, Homo sapiens
  SIMILAR (1)..(882): 1001254mologous to Escherichia coli K12 putative transport protein,accession number AE000114,Smith-Waterman Score=1550.
atgtggtatgtcggcgcgacctgtgccgatctggtcggctactggctttatgatgtggaaggcggctggcgctggatgctgggtagcgcggcgatcccctgtttgttgattttgattggtcgattcgaactgcctgaatctccccgctggttattacgcaaagggcgagtaaaagagtgcgaagagatgatgatcaaactgtttggcgaaccggtggctttcgatgaagagcagccgcagcaaacccgttttcgcgatctgtttaatcgccgccattttccttttgttctgtttgttgccgccatctggacctgccaggtgatcccaatgttcgccatttacacctttggcccgcaaatcgttggtttgttgggattgggggttggcaaaaacgcggcactagggaatgtggtgattagcctgttctttatgctcggctgtattccgccgatgctgtggttaaacactgccggacggcgtccattgttgattggcagctttgccatgatgacgctggcgctggcggttttggggctaatcccggatatggggatctggctggtagtgatggcctttgcggtgtatgcctttttctctggcgggccgggtaatttgcagtggctctatcctaatgaactcttcccgacagatatccgcgcctctgccgtgggcgtgattatgtccttaagtcgtattggcaccattgtttcgacctgggcactaccgatctttatcaataattacggtatcagtaacacgatgctaatgggggcgggtatctcgctgtttggcttgttgatttccgtagcgtttgccccggagactcgagggatgtcactggcgcagaccagcaatatgacgatccgcgggcagagaatggggacgctggaaggcgtcgaaattcgctctctttatcaactctatcctgacttcaatatcgatattgccgccgagcaggaggcgctgtctcgcgccgatctgatcgtctggcagcatccgatgcagtggtacagcattcctccgctcctcaaactttggatcgataaagttttctcccacggctgggcttacggtcatggcggcacggcgctgcatggcaaacatttgctgtgggcggtgacgaccggcggcggggaaagccattttgaaattggtgcgcatccgggctttgatgtgctgtcgcagccgctgagttattggcctttccacttatgtaaaaactggatcgacaaagaagaatatccgcaatccgcagccatcgacctgcgttgcgtaaatatggttgccgatctgtggcatgcgcctgcgccgaaaaatggtcaggccgttggcaccaacaccattggttcttccgaggcctgtatgctcggcgggatggcgatgaaatggcgttggcgcaagcgtatggaagctgcaggcaaaccaacggataaaccaaacctggtgtgcggtccggtacaaatctgctggcataaattcgcccgctactgggatgtggagctgcgtgagatccctatgcgccccggtcagttgtttatggacccgaaacgcatgattgaagcctgtgacgaaaacaccatcggcgtggtgccgactttcggcgtgacctacactggtaactatgagttcccacaaccgctgcacgatgcgctggataaattccaggccgataccggtatcgacatcgacatgcacatcgacgctgccagcggtggcttcctggcaccgttcgtcgccccggatatcgtctgggacttccgcctgccgcgtgtgaaatcgatcagtgcttcaggccataaattcggtctggctccgctgggctgcggctgggttatctggcgtgacgaagaagcgctgccgcaggaactggtgttcaacgttgactacctgggtggtcaaattggtacttttgccatcaacttctcccggccggggggtatcgatattggcgcgaaatacgagatctacaaattaattaaccaactcgtccagcagggtattgccgttattgtcatctcttccgaattacctgaagtgctcggccttagcgatcgtgtactggtgatgcatgaagggaaactaaaagccaacctgataaatcataacctgactcaggagcaggtcttcgtgatgattgcagctatcatcgcaatcatgctgttctttacctggaccaccgatggtgcctacttaagcgcccgtaacgtctccaacctgttacgccagaccgcgattaccggcatcctcgcgccctgcgtgatgtacccgggccccctctgtggcatgttatccgatattgaccggtttagcattctcggacagtgtggctgtcagcggtatttattccgatggcattcttcggcggttctactgggggcaatttatcgccagttctctatcaccatcgtttcggcaatggcgctttctgttctggtggcattgattcttacccctgcgttatgtgcaacgctgcttaaacccgtctctgctgagcatcacgaaaataagggcggtttcttcgcgttaaccactacaccaacagcgtcggcgaaaatcctcggatccacaggacgatatttactgatctatgcgctgattgttgcaggaatggtggtgttgtttttacgtcttccgtcttccttcttacctgaagaggatcagggtgtctttctgaccatgattcagttacccgctggcgcgacgcaagagcggacgcaaaaagtgttggatcaagttacggattactatctgaagaacgagaaagcgaacgttgaaagtgtctttacggttaacggctttagcttcagcggccaggcacaaaacgccggtatggccttcgtcagtctgaaaccgtgggaagagcgtaatggtgacgaaaacagtgcggaagcggtaatccatcgtgccaaaatggaattgggcaagatccgcgacggtttcgtcattccattcaatatgccagccattgttgaactgggcacggcaacgggtttcgactttgaggtaaatgatccggctgggctgggtcccgatgccctaaacaaggcccgtaaccagttgcttggtatggcgggcaagatctggcagttaagtagcgtgtgcctaattgctggaagaaccgggcgttaa

SEQ ID NO: 17667 - DNA, 3944 bp, Homo sapiens
  SIMILAR (3093)..(3686): 961254mologous to Escherichia coli GAD alpha protein,accession number M84024,Smith-Waterman Score=1061.
  misc_feature (1)...(3944): n = a,t,c or g
tgcttatcccggtcgtttatttcgagaataacccgacaaggaacgccagccgccacgacgtttggtggaatgtcttttgtgacgatactacccgcgccaataacagaattatccccgatggtgacgcctggattaataaccacatgactttcgatccagacgttattgccaatcgttatcggaaaagagtacatgtcgccgttttttctcaatatatggtgtacagggttgtgccgtacagaaagancataaacggcggaacgctgacggtgacgctatctgtcaccaatcaaggggcagagacgctgccatttggtaccggctggcatccttattttccgttgtcgccgcaaacgcggattcaggcacaggcgagcggttactggctggagcgggagcagtggctggcgggtgagttttgcgagcagctaccgcaggaactggattttaaccagcccgcgccgttgccgcgccagtgggtgaacaatggttttgccggatggaatggtcaggcccgcatcgagcagccgcaggaaggttatgccatcatcatggaaacgacgccacctgcaccgtgttatttcatctttgtttccgaccctgcgtttgataaaggatatgcgtttgatttcttctgtctggaaccgatgagccatgcgccggatgatcatcatcgcccggaagggggtgatctcattgcgctagcaccaggggaatcaacaacttcagagatgtcgttgcgggcctacaacgatacaaaccgtaggtcagataaggcgtttacgccgcatccgacatgttttccctcaaatcagaacaacagcgccagcccgccgacaatcacaccagacactgccaccatcgcccctgtcagccataaagctttcgccgggaacgctttgcgcagcataatcagtgacggcaaactcactgccgggagcgtcatcaacaatgccagcgccggagcggttcccatacctgccagcatcatcgtttgtacaatcggaatttctgctgccgtgggaatgacaaacaagcatcctgctaccgccatcgacaccacccacatcatgctgttatcgacagcaccatcggcatgggggaataaccagacgcgagcggcacccaacaccagcttgttagcggcatatcgtttcctgattgatagccgtgataccgagactgacagccgcctcgacggtttgagtgatgcattcagcgtattccgctgtcacagcatcatgaactgcgtcagtgtatgtccgaaggggctgaacccgacgcgcgccatcggccatatcaagtcgatgttgttgcaactcccaccaaacgtcgaaaagttcgctggtgcgtacctcatccagtttgcgctcttccagccacttacgcacaatcgcctgatgttcttcggtgcatttgccgatttcctgcatgcagatcagaccttcccaggccagataaccgctgccgtcaaaggccagtttgttcgacgacggctacggttctttgccattatttcaccctctcgaacattaagttccatactccgtgaccaagacgatgaccacgttgatcaaatttcgtcaccggacgtgatgccggacgcggtttgtataatcgccaatagaagacatcacttcaagcatatgttccgcataaggggcaaatccagttgtgcaccacgcgatgaccgtaaagttcgcgtgatggcagccgattatgaaaatcagctcgacgagttttccctcgatgcgcccattgtcgcacatgaaaactatcaatgggctaactacgttcgtggcgtggtgaaacatctgcaactgcgtaacaacagcttcggcggcgtggacatggtgatcagcggcaatgtgccgcagggtgccgggcctacagtgaacagaaccgtaggtcggataaggcgttcacgccgcatccgacagccgttgcctgatgcgacgcgtaatgcgtcttatcaggcctacagtgaacagaaccgcctacagtgtacagaaccccagggcggatatggcgttcacgccgcatccgacaacagggacaaacgccacgataaaaaaatggcactgaaggttaaatacccgactaaatcagtcaagggcgagtttgaggtgaaggaagacatgaaactgacatctaaagggcgctatgccgtgaccgcaatgcttgacggtgcgctcaactctgaagcgggcccgcatttcgagctgttccctcatctgtcgattatcgaaaacctgaccctggcgcaggtgaaagtgcttaaacgcgataaagcgccggctcgtgaaaaagccctgaaactgctggagcgtgtcgggctttctgctcacgccaataagtttccggcgcagctttccggcggtcagcagcagcgtgtggcaatcgctcgcgcgttgtgtatggatcctattgcgatgctgtttgacgaaccgacatcggcgctggatccggagatgatcaacgaagtactggacgtgatggtggaactggcgaacgaaggaatgaccatgatggtggtgacccacgaaatgggctttgcccgtaaagtggcgaatcgggtgatctttatggacgaggaacaccaacaggagcacaatgcacggcaatctgtagatgcgaccaggcatgagacgcttcgcagtgagtatatcgccctgtgctctaaagacttcctcgaaaaaccgagtgaagggtcgatcgtggtcaatggccagacgatcaatctggtgcgcgacaaagacggtcaactcaaagtcgccgataaaaatcaactgcgcttactgcgcacacgcctgacgatggtattccagcacttcaatctctggagccatatgacggtgctggaaaacgtcatggaagcgccgattcaggtgttgggcctgagcaagcaggaagcgcgcgagcgggcggtgaagtatctggcaaaagtcgggatagacgaacgtgcgcaggggaaatatccggtgcatctttccggcggtcagcaacagcgtgtttctatcgcgcgggcgctggcgatggaaccggaagttttactgtttgatgaacctacctcggcgctcgatcctgaactgacctgggacgacgaaaatgtccacaaattgatggatttatccattaacaaaaactggatcgacaaagaagaatatccgcaatccgcagccatcgacctgcgttgcgtaaatatggttgccgatctgtggcatgcgcctgcgccgaaaaatggtcaggccgttggcaccaacaccattggttcttccgaggcctgtatgctcggcgggatggcgatgaaatggcgttggcgcaagcgtatggaagctgcaggcaaaccaacggataaaccaaacctggtgtgcggtccggtacaaatctgctggcataaattcgcccgctactgggatgtggagctgcgtgagatccctatgcgccccggtcagttgtttatggacccgaaacgcatgattgaagcctgtgacgaaaacaccatcggcgtggtgccgactttcggcgtgacctacactggtaactatgagttcccacaaccgctgcacgatgcgctggataaattccaggccgataccggtatcgacatcgacatgcacatcgacgctgccagcggtggcttcctggcaccgtcgtcgcccggatatcgctgggactttcgcttgcgcttgtgtggggatcgtccggcaacgctgctgctggaatccgcagatatcgacagcaaagatgatttaaaaagcctgctgctggtagacagtgcgctgcgcattacagctttaggtgacactgtcacaatccaggcactttccggcaacggcgaagccctcctggcactactggataacgccctgcctgcgggtgtggaaagtgaacaatcaccaaactgccgtgtgctgcgcttccccccttccactgctggatga

SEQ ID NO: 17668 - DNA, 2178 bp, Homo sapiens
  SIMILAR (1)..(744): 921254mologous to Escherichia coli CG Site No. 231; alternate gene name alt,accession number U28379,Smith-Waterman Score=1162.
atggacgaagcaccggatgccgatgatctgatgctggctgaaacaccgcggacgaagatgctgccgaagccgccgcgcagcgtggaatctgaaatcgggcgcacgactgacccggtacgcatgtacatgcgtgaaatgggcaccgttgaactgttgacgcgcgaaggcgaaattgacatcgctaagcgtattgaagacgggatcaaccaggttcaatgctccgttgctgaatatccggaagcgatcacctatctgctggaacagtacgatcgtgttgaagcagaagaagcgcgtctgtccgatctgatcaccggctttgttgacccgaacgcagaagaagatctggcacctaccgccactcacgtcggttctgagctttcccaggaagatctggacgatgacgaagatgaagacgaagaagatggcgatgacgacagcgccgatgatgacaacagcatcgacccggaactggctcgcgaaaaatttgcggaactacgcgctcagtacgttgtaacgcgtgacaccatcaaagcgaaaggtcgcagtcacgctaccgctcaggaagagatcctgaaactgtctgaagtattcaaacagttccgcctggtgccgaagcagtttgactacctggtcaacagcatgcgcgtcatgatggaccgcgttcgtacgcaagaacgtctgatcatgaagctctgcgttgagcagtgcaaaatgccccgagaaaacttcattaccctgtttacggcaacgaaccagcgatacctggttctacgcggcaatgcgatgaccagccgtggcaatcgtggcgacagcgccatcctgcgcggcttacttgatgccatcaacattctcaatccacacgccgaagtggatgtgatgagccgctatccggtcagttcttcctggctgctcaaccgcccggtaatgggcgatccgctgttcctgcaaatgaaacaacacaacagcgcggcgggcgttgtcgggcgcgttaaaaaagtcctccgtcgccgctaccagcatcaggtattgctctcacgcgtcaccgacactggcaagctgcgcaatatcgccatcgcccagggattcaccgacttcgtgcgcctgctgtcaggttacgacgccattatccaggtcggcggatcgttttttgtcgatctctatggcgtgccgcagtttgaacatgcactttgcacgtttatggcgaaaaagccgctgtttatgattggtcacagtgttggcccgttccaggatgagcaatttaaccaactggcgaactacgtttttggtcactgcgacgcgctgatcctgcgcgaatcggtcagctttgatctgatgaaacgcagcaatatcaccaccgcaaaagtggaacatggcgtcgataccgcgtggctgaggatccccaagcatggcgacatgacgcatatggcggtagcattgttcagggttcagccggggctgcgcattgcgtgcccccaccggcgtggctgttcggtgtgccccggcggagtgacgtccggccatccggtcaatcccctgctcggtgcaaaggtccttcccggtgaaaccgacatcgccctgcccggcccgctgccgttcatcctctcccgcacctacagcagttaccggacaaaaacgctcgcgccggtggggagcctcggccccggctggaaaatgcctgcggatatccgcttacagctgcgcgataacacactgatactcagtgataacggcggcagaagcctgtattttgagcacctgtttcccggtgaggacggttacagccgcagcgagtcactgtggctggtgcgcggcggcgtggcgaaactggatgaaggtcaccggctggccgcactctggcatgcgctgccggaagaactccgcttaagtccgcatcgttatctggcgacaaacagtccgcatgggccgtggtggctgctcggttggtgtgagcgggtgccggaagcggatgaggtgctgcctgcgccgctgccgccgtaccgggtactgaccgggctggtggaccccttcgggcgacacagacgtttcaacgcgaacgccggtgaattcacggcgaatcacggcgtgacgatgtgctggcgtacttcggctgtactacaccagccagggcagagacccgcacagcattccgcggacgacgtcgcttctatactccggtaa

SEQ ID NO: 17669 - DNA, 811 bp, Homo sapiens
  SIMILAR (421)..(810): 951254mologous to Escherichia coli unidentified reading frame II,accession number M10123,Smith-Waterman Score=649.
atgcaagttgatggcggcgaaggtgtactgttgattatcaaaaattacaccggcgatattcttaactttgaaacagcgaccgagttactgcacgatagcggcgtaaaagggaattctacccccctctacgagactcaagcttgccagtatcagatgcagttcccagtcagagggatctttctaaagcacaaatccaattatgggtacgagacaggattgtctaaatcgcacaacctaaatattcaaaaaaatgaatatttaattcaaggaacagaaacgaggcaacaagatgtttgtagaagcattgaaacgccagaacccggcgctgatttccgccgcactaagcctgtggcagcagggcaagatcgccccggacagctgggtgatcgacgtggatcagatactggaaaacgtaacgcccccagcaagtatttaaatgcggtgtgtcatatgcgcaccaccaaactccctgatccaaaagtgaatgccaatgccggtagtttcttcaaaaaccctgttgtatctgccgaaacggttaaagcattactgtcacaatttccaacagcaccaaattacccccaggcggatggttcagtaaaactggcagcaggttggcttatcgatcagtgccagctaaaagggatgcaaataggtggggctgcggtgcaccgtcaacaggcgttagttctcattaatgaagacaatgcaaaaagcgaagatgttgtacagctggcgcatcatgtaagacagaaagttggtgaaaaatttaatgtctggcttgagcctgaagtccgctttattggtgcatcag

SEQ ID NO: 17670 - DNA, 1219 bp, Homo sapiens
  SIMILAR (594)..(7): 1001254mologous to Escherichia coli deaD,accession number M63288,Smith-Waterman Score=975.
tcagacagtcggctgaattttgctcagcagtgcgcggtattgatccagatcgctgctttccagctgctgctgtactttagcggcgaatttttccagacggcgtttgcctagcagttctgcgttcggcagttctacttccggaatagtcagcttcatagtacgttcaatgttgcgcagcagacgacgctcgcggttctcaacgaacagcagcgcgcggccagcacgacccgcacgaccggtacgaccgatacggtgaacgtaagactcagaatccatcgggatatcgtagttaactaccaggctgatacgctcaacgtccaggccacgggctgcaacgtcggtcgcaatcaggatgtccagacgaccatctttcaggcgttccagtgtctgttcacgcagcgcctggttcatgtcaccgttcagcgcggcgctgttgtagccgttacgctcaagagcttcagccacttccagagtcgcgtttttggtacgaacgaagataatcgccgcatcaaaatcttccgcttccaggaaacgtaccagtgcttcgtttttgcgcataccccagacagtccagtagctctggctgatgtcagggaccgggtagtcacgctggactgaatgcgcacttcctgcggctctttcataaagcggcgggtaatgcgacgaatcgcttccggcatggttgcagagaacagagcggtctgatgaccttccgggatctgcgccataatggtttcaacgtcttcgatgaagcccatgcgcagcatttcgtcagcttcatccagaaccagaccgctcagtttagagaggtccagagtgccacgtttcaggtggtccagcagacggcccggagtaccgacaacgatctgcggcccctgacgcagggcgcgtaattgcacgtcataacgctggccgccgtacagagcaaccacatttacgccgcgcatgtgtttagagaaatccgtcattgcttcagcaacctgtaccgccagttcgcgggtcggtgccagcaccagaatctgtggtgctttcagctcaggatcaagattctgcaacagaggtaaagagaatgctgcagtttttccgctccccgtctgggccatacccagaacgtcgcggccattcagcagatgtggaatacactctgcctgaattggagatggtttttcgtaacccagatcgttaagggcttcaaggataggagccttcaggcccagat

SEQ ID NO: 17671 - DNA, 1488 bp, Homo sapiens
  SIMILAR (600)..(205): 791254mologous to Escherichia coli O157:H7 proline dipeptidase,accession number AE005615,Smith-Waterman Score=539.
atgcgcctgatgccacaggtgagcgcgtggagtaaaggaagcgctgtgggctttgaccacggctcgtggggcgtgctgattaagatgtatcctgacgctgatatcccgatggtgcagttgagtatcgacagtagcaaacctgccgcctggcatttcgaaatggggcgcaaactggcagcgctgcgagatagcttacagatcccgttgcagcgcacgtccggcacggaccgatataacgatattgccgcgcgcagcaggcagcaggctaccaatgccatcggctttcggcagcgcgatcacttccacatcttcagtccagaaagaggtcggcagcggttcgacgttgtgccagtaatcaaccggcagatagaaccacagtttcggcttgttcacgccatccaccagcaaccagcagtttggcacctgagttaccggcacccacgctttgaattgcgggttcactttaaacggatagggatgatcgtcgagaaaaacattgaacagctcgccggagtgaataacacatcgttcatccagagcgtgatttctgccgagcgtgatcagatcggcatttctttaatcttttgtttgcatatttttaacacaaaatacacacttcgactcatctggtacgaccagatcaccttgcggattcaggagactgacatgctttacaaaggcgacaccctgtaccttgactggctgcggcagctgcatgctagaaacagaagagtacaaaaaggaaagaaacgaaaaataaactacaccaaatcagtgactgaaggcgggcgaatccagtctgtgctgcttaaagtttatagcgacgatgattttctttatccgggccaggagagcggttttgccctcaatgtgttgccggagattgtcgccgaaatccagaatctgccagtgctgcatttagccggacttacccatttcccttgcctgctttgggatgaggctgtcggaaaagttttgccgacaccgaatcttcacacgctgatacaggcacgggatcaactggcgaaatctggtattgcacttgagcaactgaacgcgccttcagcgaccagctgcacttcgctgccattactggcgcaatacggtgtgactcatgccgaacccggtcatgcgctgacgggcactattccggcaaaccagcagggcgatcagcctgaacgtatcgcgatgctctggttaagtgaaatctcccatcatttccgtggcgacagctactgctacggcggcggttactatcgtcgtggtcatgcgcaacatgcgttggtgtttacgccagaaaatcaaaagattactgaaaccaatctcaaaactgtggatgacagcagtatcgactacaccctgccgctggcaggcgagtttccgatttttgtcacccgtagcgatgtggtgctggtgtccggtattcatcgtggcgaaccggaaatcgtcggtcgttatgacagtcttggaaactctctgggggcgtaa

SEQ ID NO: 17672 - DNA, 1840 bp, Homo sapiens
  SIMILAR (1700)..(1810): 291254mologous to Escherichia coli core protein,accession number AF044502,Smith-Waterman Score=41.
atgacgcagtatggcggtagcattgttcagggttcagccggggtacgtattggtgcccccaccggcgtggcctgttcggtgtgccccggcggagtgacgtccggccatccggtcaatcccctgctcggtgcaaaggtccttcccggtgaaaccgacatcgccctgcccggcccgctgccgttcatcctctcccgcacctacagcagttaccggacaaaaacgcccgcgccggtggggagcctcggccccggctggaaaatgcctgcggatatccgcttacagctgcgcgataacacactgatactcagtgataacggcggcagaagcctgtattttgagcacctgtttcccggtgaggacggttacagccgcagcgagtcactgtggctggtgcgcggcggcgtggcgaaactggatgaaggtttgcgtaccgtctaccccgacacaggtcgactgaccgaaaccgtaatccgtggtctgtttaaccgcttcatagaaagcggacccacgggctaaactcggcaagcagatgcacattatcgccgctgtcttttcgccagatgcgtaccgcgccctggtcttcagcaaatccactggcggcctagtccgtaggcagacaattcagtctggtaacattgaacgtactatgaagctgactattccggaagtagaactgccgaacgcagaactgctaggcaaacgccgtctggaaaaattcgccgctaaagtacagcagcagctggaaagcagcgatctggatcaataccgcgcactgctgagcaaaattcacggcttcacagacgatccgcgatttttacaggccaccgaagccgtggtcctgacgcgagtcgatgattacccaatgcaacaactgctgcgtgccgttgtagataaacacgccctgctcgcccatcaacaacgggtagaacagaaacgaggcaacaagatgtttgtagaagcattgaaacgccagaacccggcgctgatttccgccgcactaagcctgtggcagcagggcaagatcgccccggacagctgggtgatcgacgtggatcagatactggaaaacggtaagcggctgattgagacggcgcggctttacggcattgaactgtatctgatgaccaagcagtttggtcgtaatccgtggctggcggaaaaattgctggcattaggctacagcggcattgtggcggtggattacaaagaggcgcgagtcatgcgccgcgctggtttgcctgtggcgcatcaggggcatctggtacaaatcccttgtcatcaggttgctgacgccgttgaacagggcaccgacgtcatcaccgtgtttactctcgacaaagcgcgggaagtttctgcggcggcggtgaaggccgggcgaatccagtctgtgctgcttaaagtttatagcgacgatgattttctttatccgggccaggagagcggttttgccctcaaggtgttgccggagattgtcgccgaaatccagaatctgccagggctgcatttagccggacttacccatttcccttgcctgctttgggatgaggctgtcggaaaagttttgccgacaccgaatcttcacacgctgatacaggcacgggatcaactggcgaaatctggtattgcacttgagcaactgaacgcgccttcagcgaccagctgcacttcgctgccattactggcgcaatacggtgtgactcatgccgaacccggtcatgcgctgacgggcactattccggcaaaccagcagggcgatcagcctgaacgtatcgcgatgctctggttaagtgaaatctcccatcattcagaggatccccctgattgcagtgttggatcctga

SEQ ID NO: 17673 - DNA, 922 bp, Homo sapiens
  SIMILAR (546)..(920): 981254mologous to Escherichia coli K12 putative regulator,accession number AE000467,Smith-Waterman Score=645.
cgagtaaacatgcaggtaggcgaatagggcacgtcgcacgtctcggtgcagagagcaatcggggcagagcaggagcgtagcgcgccgcaggcgcaagagggcgcgttgtcacgtcggagagcagaaggtggcgtgtactaccgggtggagggcgaatgtcctcagataagtgtagggggcacaagacgagcaatgtatccgcaggcggcaggtcgtgaagcgccgcgtagacgaatggcaggacataacgcttgcgcgaggacacatccgtggggctgagggaagaggcgaccggtgaccagtaagttttcgcgctgtttgccggccgcaaagaaccaaagtcttttaggcccaaactgaaagaggttgccgccgtacaatcctctgcagatgaaggggccagcgtggcctataagattaaggatgtggaggggcaagttgagcttgatgcggccttcactttctcatgccaggccgagatgattatttttgaggttatccctgcgttcgttagcttgatggagttgctttagaaggagttaaacatggcttataaacacattggcgtggcaatttccgggaatgaagaagatgccttactggtgaataaagccctggagctcgccagacataatgacgctcaccggacgttaattcatattgatgatggcttaagcgagttgtatccgggtatctacttccctgcaacagaagatattcttcaattgttgaagaataagtcggataacaagctgtataaactgacgaaaaatattcaatggccgaagacaaaactgcgtattgaacgcggagaaatgccggaaacactgctggaaattatgcaaaaagagcagtgcgacctccttgtctgtggtcatcatcaatcatttatcaaccgtttgatgccggcatatcgcgggat

SEQ ID NO: 17674 - DNA, 1656 bp, Homo sapiens; identical to SEQ ID NO: 4648
  SIMILAR (1)..(729): 971254mologous to Escherichia coli FdrA protein,accession number D42020,Smith-Waterman Score=1171.

SEQ ID NO: 17675 - DNA, 728 bp, Homo sapiens
  SIMILAR (150)..(602): 941254mologous to Escherichia coli UDP-MurNac-tripeptide synthetase (MurE),accession number D10483,Smith-Waterman Score=711.
gcaggcgggtaaatactacggcggcgccgttttcgcgccggtctttggtgccatcatgggcggggtattgcgtaccatgaacatcgagccggatgctctgacatcggtcgataaaaatgaatttgtgattaatcacggcgaggggacaggtggcagatcgtaatttgcgcgaccttcttgctccgtgggtgccagacgcaccttcgcgagcactgccagagatgacactcgacagccgtgtggctgcggcggtcgatctctttgtagctagaataggtcatcaggcggacgggcgtcgatatatcccgcaggcgatagcgcaaggtgtggctgccattattgcagaggcgaaagatgaggcgaccgatggtgaaatccgtgaaatgcacggtgtaccggacatctatctcagccagcttaacgagctgttatctgcactggcgggccgctgttaccatgaaccctctgacaatttacgtctcgtgggcgtaacgggcaccaacggcaaaaccacgactacccagctgttggcgcagtggagccaactgcttggcgaaatcagcgcggtaatgggcaccgttggtaacggcctgctggggaaaaagaaagaaaaagcagcaatccagtacaatacgctttgtaaaagctgcacactcactcacccgaaaccccacaatgagagtgatcatacagatgtcgttgttgaagggcagacttttcgtgaataa

SEQ ID NO: 17676 - DNA, 1440 bp, Homo sapiens
  SIMILAR (1440)..(1102): 981254mologous to Escherichia coli penicillin-binding protein 3,accession number K00137,Smith-Waterman Score=571.
atgttgtggcacaaacttccgaaatctatctacttccgccgtggctccctgccaatcgcgctggatgaagtgattactgatggccacaaacgtgcgctcatcgtgactgaccggttccttgtcaacaatggttatgctgatcagatcaactccgtactgaaagcagcaggcggtgaaactgaaatcttcttccaaagaaaaaccgaccccacccttgacatcggtcgtaaggtgcagaactggcaaactccttcaaccagacgtgattatcgcgctgggttggagagaggagaaaggagagcagaggctcaaaactgggatgaatgcctgatgaagggagagttgctctcccagccagatcctttgatttgccagctgctgaggcaccaatcagagctcttagctgaagctcacagcgagatctgtcgacttacagacctggaccaggaacagtgcattacgtttcatatggcggccactaagaagaagccgtgtagttctgatatatccatggcttcaaaatatctggcccagtacgagatcagggtcaaccagccgagcttagattcacgcaaggtccccattgaaagttgctacctgcggaaaagcgctaccaaagtgaagtatcaccccttgtttgaaatacgaaaggttaacacagatgcatttcctaaaattatcaggaatgcaatttatgaagtggaacagcatacgcaggcccctcaaggtttgattgctgcttctgctcttggggtaatttctcttgcctgtcagaaccggattgatgtttgccgattgaataatctacgtggcccggtatcacttttcttaatgactctggctgaatcaggtgaacgtaagagtacggttgataaactgctgatgaagccattatatcaactggaagaggatttatttgaaaaatacacccacgatcttaccgcatggaaaaatgatgaaacaatttttaatattgaaaaaaaagcactgatgtcaaaacttaaatcaaatattcgacccacacggctgtcgagtgtcatctctcgcagtgctcgcgaaggtgcgtctggcacccacggagcaagaaggtcgcgcaaattacgatctgccacctgtcccctcgccttgattaatcacaaattcatttttatcgcccgttgtcagcgcatccggctcgatgttcatggtacgcaatacgccgcccatgatggcaccaaagaccggcgcggaaacggcgccgccgtagtatttacccgcctgcggatcgttgataacaacaaccagcgcgaagcgcggctgactcgcaggcgcaacgcctgcggtataagcaatatatttattgatgtagcgaccgtccggcccgacctttttcgcggtaccggttttaatggcgatacgatagcctttaatcgccgacttcacgccgccgccgaccggtag

SEQ ID NO: 17677 - DNA, 201 bp, Homo sapiens
  SIMILAR (201)..(88): 1001254mologous to Escherichia coli baiF homolog(PIR:F37844),accession number D10483,Smith-Waterman Score= 199.
  misc_feature (1)...(201): n = a,t,c or g
catcacttcatacatggcgatgtcgatactttcgcctttacggtttcacgcactttatgcagtgctgccagcgccgccgtggtgncggtgagcgataaccagtttcgggttgtgctgccacagtacttcatcggtaatgccacgacgggcaaaggccggacctttactggcttcgatgaagatatcggtggtttccattaa

SEQ ID NO: 17678 - DNA, 1263 bp, Homo sapiens; identical to SEQ ID NO: 9089
  SIMILAR (1)..(708): 991254mologous to Escherichia coli K12 putative galactokinase (EC 2.7.1.6),accession number AE000295,Smith-Waterman Score=1191.

SEQ ID NO: 17679 - DNA, 933 bp, Homo sapiens
  SIMILAR (1)..(384): 1001254mologous to Escherichia coli asparaginase (ansA),accession number M26934,Smith-Waterman Score=683.
atgccggaattccatcgcccggagatgccagatttcaccattcatgaatatacgccgctgatggattcttcagatatgacgccggaagactggcagcatattgctgaagatattaaagcgcactatgacgactatgatggttttgtcattctgcacggcaccgacacgatggcgtataccgcctctgcgctgtcgttcatgctcgagaatctcggtaaaccggtcattgtgacagggtcacaaatcccgctggctgagttacgctctgacggacaaattaatctgctgaatgcgttgtacgttgcggcgaattatccgatcaacgaagtaacgctctttttcaataaccgattgtatcgcggcaaccgcactaccaaagcccatcaacgctgccagcgcgtcggcattcgccggatcaaagcccatatgcacgttatagatgccaaaaccgagcttatcgcgcagtacgcgggccgcacaaatgttagcggcaatcatcgcttcttcgacgatacggttggcaatgcgacgaggctcggcgacgatatccagcacttcacctttttcaccgagaataaagcggtaatccgggcgatctttaaacaccagctgccagtcaccggtattttccagccagtcagaaacctggtcatacaccagctttgctttggattcgatggtggcggcaaagaattcgatattatcttcaatggtgccatcagcggagagcgtcatgcggcatgccagtaccgggcggacttcattggcgcgcatgatgacgtcgaaacccgtatgatgagcaactatacgctgaagcgtgaactcgccgagtttgccgcgtcgctggttcaaccgggcgaaaccatctttatcgaaaatggcagcagcaatgccctactcgccttagagcacattgattctcgtggcctaaag

SEQ ID NO: 17680 - DNA, 1888 bp, Homo sapiens
  SIMILAR (881)..(1258): 851254mologous to Escherichia coli Exoribonuclease II (EC 3.1.13.1) (Ribonuclease II) (RNase II),accession number D90766,Smith-Waterman Score=542.
atggcggcaacgatgcgcttaagcgatcgcggacctgatgatgccgtcaaccgtcgcatcagcctgctggtactgaacaaacaagccgaacaggccattttgcatgaaaacgccgaaagccagaatgagccagtaagcgccctggaaaaacctgaggttgcaccacagccgaaccgaggtgacagcgtgagcatggatataagcgatttttatcagacattttttgatgaagcggacgaactgttggctgacatggagcagcatttgctggttttgcagccggaagtgccagatgccgaacaattgaatgccatctttcgggctgcccactcgatcaaaggaggggcaggaacttttggcttcagcgttttgcaggaaaccacgcatctgatggaaaacctgctcgatgaagccagagaggacatcatgcaagaacagctcgacgcttataaacagtcgcaagagccggatgccgccagcttttattatatctgccaggccttgcgtcaactggcattagaagcgaaaggcgaaacgccatccgcagtgacccgattaagtgtggttgccaaaagtgaaccgcaagatgagcagagtcgcaccgcgtggattgctgaaggcagcaagctggacaaagccgcgaaaattcgcgcattcaccaactatctgcctggcttcaacatccctatgctgcctcgcgagctttctgacgatctctgctcactgcgcgccaatgaagtccgcccggtactggcatgccgcatgacgctctccgctgatggcaccattgaagataatatcgaattctttgccgccaccatcgaatccaaagcaaagctggtgtatgaccaggtttctgactggctggaaaataccggtcgactggcagcctgaaagtgaagcaattgccgaacaagtccgtttgctagcgcaaatttgccaacgccgcggcgagtggcgtcataaccacgcactggtgtttaaagatcgcccggattaccgctttattctcggtgaaaaaggtgaagtgctggataatcgtcgccgagcccttgtcgcattggccaaccgtatcgtcgaagaagcgatgattgccgctaacatttgtgcggcccgcgtactgcgcgataagctcggttttggcatctataacgtgcatatgggcttggatccggcgaatgccgacgcgcctgcagcgatgatgaaacacccagggctgcatgtcgatgccgaacaagtgctcacgctgggacggtttctgcacactgctaagcccgccaccgcctgccgtgaggaaagatgcatgagcgagccgttaattgtcggcatccggcatcatagtccggcctgcgcccggctggtgaaatcgttaatcgaaagccagcggccacgatacgtgttgattgaaggcccggctgattttaatgaccgggtagacgaactgtttttagcccaccagcttccggtagctatttacagttattgccagtatcaggacggtgcagcccccgggcgtggtgcctggacgccatttgctgaattttcgccggagtggcaggcgctacaagccgcacgtcgcattcaggcacaaacttacttcatcgatttgccttgctgggcgcagagtgaagaagaggacgattcgcctgatacgcaagatgaaagccaggccttactgctgcgtgccacccgcatggataacagcgataccctgtgggatcacttgttcgaagataaagccagcaaactgcattaccctctgcgctggcgcactattttgcccaactgcggggcgacgccttcggcgatgcgctcaatcgtcagcgcgaagcctttatggcccgctggattggatgggcgatgcagcaaaataatggcgacgtgttag

SEQ ID NO: 17681 - DNA, 2300 bp, Homo sapiens
  SIMILAR (1379)..(2008): 1001254mologous to Escherichia coli baiF homolog(PIR:F37844),accession number D10483,Smith-Waterman Score= 1121.
atgaacaaatttattaaagttgcactggtaggtgcagtactggctacgttaactgcatgtactggtcatattgaaaaccgtgataagaactgctcttacgactacctgctgcacccggcaatttctatttctaaaatcattggcggttgcggtcctactgcacacgcttccaccaaaccgcgcaagattgacggtctgggcatcaagcatgttcagttaagcggtgaaggctgggatgcggatcgctgctgggcattctggcaaggttacaaagccccgaaaggcacgcgtaaagtggtgtggccggatctggacgatgcccagcgccaggaactggataaccgcctgatgatcatcgactgggtgcgtgacaccatcaacgcaccggcagaagaattgggaccatcgcaactggcacagcgtgctgttgatctgatcagcaacgtcgcgggcgatcgtgtgacttatcggatcaccaaaggcgaagatctgcgtgacaaggttatatggggctgcacacagtcggacgcggttcagaacgttctccggtattgctggcgctggattacaacccaactggcgataaagaagcgccagtgtacgcgtgcctgcatcaaacagactgcgtttatggactcgatgaagtcggacatgggcggcgcggcaacggttaccggggcgctggcatttgccattacgcgcggactgaacaagcgcgtgaagctgttcctctgcttccgcccggtactggcatgccgcatgacgctctccgctgatggcaccattgaagataatatcgaattctttgccgccaccatcgaatccaaaagcaaaggtggggtaagaccaggtttctgacgggttggaaaattccggtgactggcagcctaaaagtaaagcaatttccgaacaagtccgtttgatagcgcaaatttgccaaccccgcgcagagtggcgtcatacccacgcactggtgtttaaagatcgcccggattcacgctttattttcggtgaaaaaggtgaagtgctggatatcgtcgccgagcctcgtcgcattgccaaccgtatcgtcgaagaagcgatgattgccgttaacatttgtgcggcccgcgtactgcgcgataagctcggtttgggcatctataacgagcatatgggctttgatccggcgaataccgacgcgctggcagcgttgctgaaaacgcacggtctgcatgtcgatgccgaagaagtgctcacgctggacggtttctgcaaactgcgtcgtgaactggacgcgcaaccaactggtttcctcgacagcagcattcgtcgcttccagtcatttgctgaaattagcactgaacccggtcctcactttggcctcgcctcgtaccctatctggatcgagaacgtcgcctgggccgacaccattcgcgttcaaccgaactacccgcaactctcccgccgcaatttgcacgcgctgtcgttaaatattttcaaagatgaaggccgcgaagcgtttctgaaattaatggaaaccaccgatatcttcatcgaagccagtaaaggtccggcctttgcccgtcgtggcattaccgatgaagtactgtggcagcacaacccgaaactggttatcgctcacctgtccggttttggtcagtacggcaccgaggagtacaccaatcttccggcctataacactatcgcccaggcctttagtggttacctgattcagaacggtgatgttgaccagccaatgcctgccttcccgtataccgccgattacttttctggcctgaccgccaccacggcggcgctggcagcactgcataaagtgcgtgaaaccggtaaaggcgaaagtatcgacatcgccatgtatgaagtgatgctgcgtatgggccagtacttcatgatggattacttcaacggcggcgaaatgtgcccgcgcatgagcaaaggtaaagatccctactacgccggttgcggtctgtataaatgtgccgacggctacatcgtgatggaactgcaaagggagcaagtaatgaacaactttaatctgcacaccccaacccgcattctgtttggtaaaggcgcaatcgctggtttacgcgaacaaattcctcacgatgctcgcgtattgattacctacggggggcggcagcgtgaaaaaaaccggcgttctcgatcaagttctggatgccctgaaaggcatggacgtgctggaatttggcggtattgagccaaacccggcttcagtaaatgttgtgaaaatagaagcaatgagggaagaaatgagggacactagttctattgggtaa

SEQ ID NO: 17682 - DNA, 583 bp, Homo sapiens
  SIMILAR (227)..(580): 941254mologous to Escherichia coli O157:H7 putative exonuclease VIII, ds DNA exonuclease, 5' -- 3' specific encoded by prophage CP-933O,accession number AE005343,Smith-Waterman Score= 596.
cctgattacgaattcaatgtccgtacccggaggagggtatgactggaacaaccctgcagataacccccggaatctgcttcccggacaataaagttattcaccaggataatatcgaaatcccggcaggtctttaaaacagttccgtaataaatatccggtttcattcttatatgccagcaatggcagggatttgttcatccttaaatctgtcatgaggttaaaacaaatgagtaaagtctttatttgcgccgctattcctgacgaactggcaacaagggaagaaggcgctgtggctgtagccacagccattgaagctggcgacgaacgccgtgctcgagcaaaatttcactggcaattcctggaacattatccggctgctcaggactgcgcttataaatttattgtctgcgaggataaacctggcataccccgccctgccctcgattcatgggatgctgaatatatgcaggaaaaccgctgggatgaggagtctgcttcttttgtcccggttgagactgaatccgatccgatgaacgtcacttttgacaagctggcacctgaagtacagaacgctgtcatgtaa

SEQ ID NO: 17683 - DNA, 1164 bp, Homo sapiens
  SIMILAR (266)..(210): 1001254mologous to Escherichia coli Tail fiber protein GP37,accession number D90798,Smith-Waterman Score=95.
ttcaacgagatgccacgatgactcatcactgttgaaaacagccacgaagccagccggaatatctggcggtgcaatatcgggactgtttgctggcagacctgtatgaggcggaatatatgcatcaccttcaccaataaattcattagttccggccagcagattataaatttttatggtccgtggttgttcactcattctgaatgccattatgcaagcctcacaatatagttaaatgcgatgtttttgacggtgttttccgcgttaccatgcagcattaacgctgatagccggtccatgtcaaccaatcgcatcggagtgcgcatgatcaccaataccggcagtatgtccatgcgcgcctgcgcttgcagcagtgccggacagcgagtgggtatgagcaccatctgatgatgtcttccctgcattacgagtctggccactaccgcttgttgtgctcataatccccgcgcttagatttgaaatcgcggtataaccattagggaaaatgctcgtgttcgtgccaccaaatgcaccggaactcttgtgttggtgcgcaccggcactatttgcggtcccgctaatactatgggtatgcgccccggtgttattcgtggatttggttccgtaatcaaacgacgatgtggtttccgtccccaaatcccgactggatgcgctggggctttgggtgtgcgatttaatgcccgcctgttcctgagaaaaaacggggccgaccactgggcgggcttgcccttaatcgtccagccacgccatatcagggatcacgcctgacggataagcaactgcaagtttcgggtatgcagatttgtcaaaagtctgcccctgcatcagggcataaccagacggaacggtatctgatggccacgggattggtgcaccgactggataaatctctgcaggaggatgagccgaggtgtaaagctgcgcccacggcgaccagtttgcgtcggtcgtatcccgtcgtcaaggaataaatgccggagcatgagctccgcttgaaccactccagccgatgagtaactcgctttcgccaacgactgtcatccctttcaggtgaatgatatttccatacgctgttggatatccgttgttatacacctcgtataactcaagacctgctgccccctgcgtattgtctgtcagcgcggt

SEQ ID NO: 17684 - DNA, 576 bp, Homo sapiens
  SIMILAR (229)..(402): 1001254mologous to Salmonella typhimurium DNA polymerase III gamma subunit,accession number U66040,Smith-Waterman Score=296.
tacgaattcgagcgtccgacccggagatctcggcggctgacagagccttgaagaacccggcattaccagcttcggccttgacccgttcccgggccattaattatcgccagtcttgtgctgcccacgctacggacagcacaagatgtgcattcagcctcgccgttctgacggggctgtgttagcattaccccttcgtgaatccaccttccagcgtttcagagcctgccaatgagttatcaggtcttagcccgaaaatggcgcccacaaacctttgctgacgtcgtcggccaggaacatgtgctgaccgcactggcgaacggcttgtcgttagggcgtattcatcatgcttatcttttttccggcacccgtggcgtcggaaaaacctctatcgcccgactgctggaccacgacccatactttgaggatgattgtagttcatcaatgggtatgcgccccggtgttattcgtggatttggttccgtaatcaaacgacgatgtggtttccgttcccaaatccgtactggatgcgctggcgctgtgggtgtgcgatttaatgccgtcctgttcctgagataa

SEQ ID NO: 17685 - DNA, 3273 bp, Homo sapiens; identical to SEQ ID NO: 10827
  SIMILAR (1318)..(1974): 981254mologous to Escherichia coli FimD protein,accession number D90732,Smith-Waterman Score=1115.

SEQ ID NO: 17686 - DNA, 3021 bp, Homo sapiens
  SIMILAR (2263)..(2994): 1001254mologous to Escherichia coli K12 putative lyase/synthase,accession number AE000500,Smith-Waterman Score=1257.
atgagtgaactcccattcacaattgcttcaaagagaataaaatacctaggaatccaacttacaagggatgtgaaggacctcttcaaggagaactacaaaccactgctcaaggaaataaaagaggatacaaacaaatggaagtacattccatgctcatggttaggaagaatcaatatcgtgaaaatggccatactggccaaggtaatttatagattcaatgccatccccatcaagctaccaatgactttcttcaaagaattggaaaaaactactttaaagttcatatggaaccaaaaaggagccgcatcgcgaagtaatcctgagccaaagaacaagctggaggatcacattactaattcaactatatacaggctcagtaccaaaagctgctcggtgtctgggctgaagcagacactgctggcggagtccgaggctctgaccagctacagccaccgggtgttctcggcctgggacttcggtctctgcggggacgtccacgtgcggctgcgccagcgcatcatcttgtacgaattaaaggggcaggtgcctgcattgctgctggatgacggtactttgctgacggaaggcgtagcgattatgcagtatcttgccgacagcgtccccgaccgccagttgctggcaccggtaaacagtatttcccgctataaaaccatcgaatggctgaattacatcgccaccgagctgcataaagagttaaagttttcttttcattggagcacgacctcgcacaaaggactcggcatgaaactcgtcggtagctacaccagcccgtttgtacgcaaactttctattctgttgttagaaaagggcataactttcgaatttattaatgaactgccctataacgcggacaacggcgtggcgcaatttaacccgttaggaaaagtgccggtgctggtgaccgaagagggcgaatgctggtttgattcgccgatcatcgctgaatatattgaattaatgaatgtcgctccggcgatgttgccgcgcgatccgctggagtcgttgcgggtgcgcaaaattgaggcactggcggatggcattatggatgccgggctggtatcggtgcgtgaacaggcgcgtccagcggcgcagcagtctgaagatgaattgttacgccagcgggagaaaatcaaccgcagtctggatgtgctggaaggatcgggcggttgcccggcatccaacgccattcatggccatatcaatgattttctggtgcgtaccgggttgagaagcggtattctacaaataagactttccaaactgctcaatgacatgaatgtttcaaccctagtagagatgaaacgcacgacatctgacaaaggaatgtttctacacgaagagatattactggtcttagctattgactctgtagcacagcatagtattccccatattttccacccggaaatatactcagagcaaacgagaaatggtaccgagctgaccgagaaactgcgccatgcctgcggagctgccgtcgagtgtgtcatttccgatacctgtatcgcgggtatggctgaagccgctgcttgcgaagaaaaattcagcagtggggatgttgcccgccgcgtcactgacaaaacccatgaccggagtgacaataccgccgccaataatggtcataacgatgaaggacgaaccatatttggtgtcctggccgagattcttaatgcccagcgagaagattgttgggaaattttcatgagcaccatgcaatccggcatcgtcaagtggtttgacgacggcaagggcttcggcttcatcacccccgccgacggcggcaaggacctgttcgcccatcacagcgaaatcaagaacaacggcggcttccgcactctggccgaaggcgcccagcccgcgccctgcgcgggctttgtgctttctgggcctgccgtcgacaatccacctcttatgtccgcactgcccgttgccgccccgaaggccctgaccgcttaccgccccttctgggccaagcgtttcggccccgcacccttcctgcccatgagccgggcggagatggagcagctcggctgggacagctgcgacgtcatcatcgtcacgggcgacgcctacgtcgaccatcccagcttcgggggatcctctagagtgaccacagcagcaagctgcaccgcccctaaggcaaaaaccggccgggcccctgttgaccctaatatcgacgaactgaaacagtaccataatccgcgctacggtcgtgttccggttggcggcaactattacgcggaaacgaaaatgagcacttacgaaaaggaaactgaggtaatgaaaaaattcagcggcattattccaccggtatccagcacgtttcatcgtgacggaacccttgataaaaaggcaatgcgcgaagttgccgacttcctgattaataaaggggtcgacgggctgttttatctgggtaccggtggtgaatttagccaaatgaatacagcccagcgcatggcactcgccgaagaagctgtaaccattgtcgacgggcgagtgccggtattgattggcgtcggttccccttccactgacgaagcggtcaaactggcgcagcatgcgcaagcctacggcgctgatggtatcgtcgccatcaacccctactactggaaagtcgcaccacgaaatcttgacgactattaccagcagatcgcccgtagcgtcaccctaccggtgatcctgtacaactttccggatctgacgggtcaggacttaaccccggaaaccgtgacgcgtctggctctgcaaaacgagaatatcgttggcatcaaagacaccatcgacagcgttggtcacttgcgtacgatgatcaacacagttaagtcggtacgcccgtcgttttcggtattctgcggttacgatgatcatttgctgaatacgatgctgctgggcggcgacggtgcgataaccgccagcgctaactttgctccggaactctccgtcggcatctaccgcgcctggcgtgaaggcgattctggcgaccgctgcgacgctgaataa

SEQ ID NO: 17687 - DNA, 708 bp, Homo sapiens
  SIMILAR (196)..(450): 971254mologous to Escherichia coli glutathione transferase,accession number D38497,Smith-Waterman Score=426.
atggctgtgccggataacgttaccgatccgctgatgtcactggaagtctatggtcgcgtattcttgcagattggtgtcgctactgccgttattgcagtactgatgctgctgaccgcgccgaaactgcaccgcatgacgcaggatgacgctgcagacaaagcggcgaaagcagccgtagcacaaaaggagttaccgatgaaattgttctacaaaccgggtgcctgctctctcgcttcccatatcaccctgcgtgagagcggaaaggattttaccctcgtcagtgtggatttaatgaaaaaacgtctcgaaaacggtgacgattacttttccgttaaccctaaggggcaggtgcctgcattgctgctggatgacggtactttgctgacggaaggcgtagcgattatgcagtatctttgcgacagcgtccccgaccgccagttgctggcaccgggaagcaagcagaagccgggaagccgcgaaagatgcgagaaagtgcgaccccctccccagatccccggtcccccgtcgaaatccctgtcggccggtcaaaccctagacaatggaagctccacgttttcatcctcattctcccccacaagtccggtcgcgggttcccctcggcccgggaccccggcgccagccccggagtcggagcctgcacgatacgccccctcccgccggggcaggatgacaaacggatatcggtga

SEQ ID NO: 17688 - DNA, 1149 bp, Homo sapiens
  SIMILAR (582)..(4): 991254mologous to Escherichia coli D-alanine:D-alanine ligase A,accession number M58467,Smith-Waterman Score=973.
  misc_feature (1)...(1149): n = a,t,c or g
ttacattgtggttttcaatgcgttatccgcagcgtgacgctccagcgccagttcaatcaaacgtgtgatcagatcggtgtaacccagaccgctggcttgccacagcttcggatacatactgatattagtgaagccaggcagggtgttgatctcgttgatcancacttcgttctctggggttaaaaacacgtctacacgcgccatgcctgcgcatcccaacgtttgataagcctgaacggcaatcgcccggatcttatcgttgatttctggcgcaatggctgccggaactaccactttcgcgccatcttcgtcaatgtacttggtgtcgtaggcatagaaatcgctggtgagtacgatctctccacaggtgctggcttgcggattgtcgttgcccagaactgcgcattcgatctcacgacctttgatcccttgctcaacgatcactttatgatcgaactcgaacgccagatcgacggcaattgcgtactgttcttcactggttactttgctgacaccaacagaagagccctgattagccggttttacaaacagtggtaaccccagtttagactccacttcggctatgaaattgctgaaggaaatcgtcctgaaatggttatccccctcttcacgacgctgcatctgctgctggatgtccggatgattttcctgttgccatgcctcataagcggccatatccaccacttcaccggattcacgttgatgcgctcggtaatgtccattacgacgataccagggtgatctcaaaggggccgaaaggctgggcgaatctgaacaccaaagataccaacgtctgggaaggtgattaccagatggtgggtcgccagggtcgcggtaaagcggacctcctgtctgccgggttctgacacctggagcgtggtaggtagcgaaattattcatgaccgcgaagaacaagttgcggagatctggaacgcccgctttaaggtgggtccggtaccgatcttttatagcccctatttgcagttgccggtgggtgacaaacgtcgctctggtttcttgatcccgaacgccaagtacaccaccaccaactactttgagttctacctgccatattactggaacatcgcgccaaatatggatgccaccatcacgccgcattatatgcat

SEQ ID NO: 17689 - DNA, 2112 bp, Homo sapiens; identical to SEQ ID NO: 15723
  SIMILAR (763)..(1257): 961254mologous to Escherichia coli O157:H7 rhsA protein in rhs element,accession number AE005586,Smith-Waterman Score=855.

SEQ ID NO: 17690 - DNA, 1857 bp, Homo sapiens
  SIMILAR (525)..(7565): 1001254mologous to Homo sapiens microtubule-associated protein 1B,accession number L06237,Smith-Waterman Score=12052.
atgttgttgtcagctatttcaagtacagccaaaaactggaccacagtgcagatgtcccatcaacagcatagtcttctccggttgatcagcattttccgaaaggccacggtcgctgaccggggttggcaccagccactcgaaggtctacgcctgggcggttcaatgctgatgcaggggctgattagcgccgagcagctggcacaggcgctggcagagcaaaacggcgtggcgtgggaatccatcgatgcctggcagatcccttcctcgctgattgccgaaatgccggcctccgtggcgctgcattatgcggtactgccgctgcgtctggaaaatgacgagttaattgtcggcagtgaagatggtattgacccggtttcgctggcggccctgacgcgtaaagtcggacgcaaagtgcgttacgtcattgttctgcggggacaaattgtcacagggttacgtcactgctcactttttgctaaccatcgaaatcgaacgcagccacgaacggtgcgaattcctctcaccgacgattatcgtcgcctggttctcagggaaagcaggtccactgtggcctgtgaggacgagagctctgggcaggctcggacactggcagaccctggtcctggctggccaaggcagcaggaggctgacccgcggctgattgagtccctctcccagatgctgtccatgggcttctctgatgaaggcggctggctcaccaggctcctgcagaccaagaactatgacatcggagcggctctggaaaccatccagttattcaaagcatcccccgccgttgtgaccacttttgcccacctcttctgcgtgcccctcttctgtctcatagttgtgttaagcttgcgtagaattgcaggtctctgtacaggccagtttctctgccttcttccaggatcaggggttagggagcgacttatcgacaacacagaagttatcctggtactcgactgtggcgcgaccaatgtcagggccatcgcggttaatcggcagggcaaaattgttgcccgcgcctcaacgcctaatgccagcgatatcgcgatggaaaacaacacctggcaccagtgtgccaccatccgcggtatcgccgtcaccacctttggtgtggatggcgctctggtgtggttgaaagaaaatcatccagaactgctggaacgcgcgcacgcctggctctttatatcgtcgctgattaaccaccgtttaaccggcgaattcactactgatatcacgatgaccggaaccagccagatgctggaaatccaagcaacgcggattcaggtccgcaaatttgacaagccaccggtagtccacgccgactcgtccgtcgtctggtggaagcgggtgaacagattgcttgctggcaaacttgccatcgtcattgatgattttgggtatcgcccgcacaacgaaaaccaggtgctggcgatgccttccgctatctccgtcgctgtattacccgattcaccgcacgccagagagatggcgaccaaagcgcataacagcgggcacgaagtgttgattcatctcccgatggcaccgttgagtaaacagccgctggagaaaaatacgctacgcccggagatgagcagcgacgaaattgagcgcattattcgtagtgcggtcaataacgtgccctatgccgtggggatcaacaaccacatgggcagcaagatgacctctaacctgtttggtatgcagaaagtgatgcaggcgctggagcgttacaatctttacttcctcgacagcgtaaccatcggtaatacccaggcgatgcgcgccgcgcaaggcactggcgtgaaggtgatcacacggaaggtattcctcgacggattcgcaaaatga

SEQ ID NO: 17691 - DNA, 2243 bp, Homo sapiens
  SIMILAR (607)..(933): 411254mologous to Mus musculus StAR-related protein 1- 4E,accession number AY007808,Smith-Waterman Score=233.
atgatacgccacatccggcatggtatgcggatgtggcgtatgctgataagacgcgccagcgtcgcatcaggcaaccgctcgggcgttagatgttggatgcggcgtaaccgccttatccaacctacgggtggagcacttcacagcggtgtaggcctgataagacgcgccagcgtcgatcaggcaaccggcttgggcgttagatgtcggatgcggcgtaaccgcctatccgacctacggggtggagcacttcacagcggtgtaggcctgataagagcgccagcgtcgcatcaggcaaccggctcggacgttggatgtcggatgcgcgtaaccgccttatccaacctacggggtggagcacttcacagcgacgcgccagcgtcgcatcaggcaaccggcttgggcgttgatgtcggatgcggcgtaaccgccttatccgacctacggggtggagcactcacagcggtgggtgccgcacttcacagcggtgtaggcctgataagacgcgccagcgtgcatcaggcaaccggctcgggcgttggatgtcggatgcggcgtgaccgcttgtctgacctacggggtgccgcacttcacggcagtttagcgaactacccgttgtcaattttctcttccgccttccagacgcggtacttcacatctacttgtctggcgtatacaccacgatcggcagcttgctgttgtaacgcagcatccagcatcgcccagatacgcggtcaatgcgggtgtgaaccaaaaaatggtagcgcgtgcgttgaatggctggatgtgcaacctgaagatcgcgtactggatctgttctgcggtatgggcaactttacactgccattggcgacacaagctgccagtgtggtcggtgtagaaggtgttccggcgctggtggaaaaaggccagcagaatgcgcgtcttaatggcttacagaatgtgacgttttatcacgaaaatcttgaagaagatgtcacaaagcagccgtgggcgaaaaacggcttcgataaagtgttgctggacccggcgcgagcaggtgccgcaggtgttatgcagcaaattataaaactggaacctattcgtatagtttatgtatcctgtaaccctgcaacgctggctcgggatagcgaagcgttattaaaagcaggatataccattgcgcgactggcgatgctgggtattgttccccacacggggcctctggggtcgcgggggccttttcgacgcttaatagtgtcgcagtgcccattcggggggtcggggctcaaggagaggccgcacgggatattacggtcagcgtaccggtcaccggagaactggacgacggcactgcgaagcagtcattcagcactgcagcccgtcgggggattatttctgacagatttgtagaagaattttgcagttttggcgcgaaagatggctgtagtacaccgggatctgcccgacgaacgcgggaaggacattggcagcttgccggacgggttgtaatcgccaacaatacatcggcaattgcattaccgccttcagtccccgcaaaccaggttccagaatcgcatcagcctgctgatcttctttcaccagcgccagcggacgccgttcatcagcaccagcaccagcggtttaccggtggctttcagcgccgaatcaagtcacgttggctttgcggaatagtgatatcggtccggctggagcttcccaccaccacatcgattgtttcgccgtctgcaccgcttcatcaatcatctcttgcggcgaaccggatcgactttgaccgcttcttcatactgattcaggaaatcgataatgctttgtcactggtaacgttcgcccctttggcatacagcactttaccgtttcaccgacggcaatttttaatcccgtggcccaaccaccgcaatggtggccgattttttccagcggtaacgttcgagaccggtttttcagcaacaccaagctttcgcgccccttcagcgctcttacggtgcagcgctttcgcatggtatcaccggtcaatctttcggcccaaatggctgtatgggtcgttaaacaacccccatatcatatttaaccgtcagtacatggcgggcagcatcgtccagctctgccatcgtcactttgccgatttaatcaacccaggcagattaggctcggacctgctaatcttgactcgaaaaagaaacaaggatccgttaaaaatccttaatgctgagaatgttctcacgcaaacaacatcatggacataa

SEQ ID NO: 17692 - DNA, 1347 bp, Homo sapiens
  SIMILAR (675)..(4): 991254mologous to Escherichia coli No definition line found,accession number U00039,Smith-Waterman Score=1152.
ttaatttgcgctagcgttaaacttcgccgcttcgggctgtttgccccagccttgccactgatgctggaagtaaacgatcagcgtgctctggctgatgctttcgcttaatacttcaaagaagcgattagcataaacaggttctatcggtttcttcggtttgcacagcttcacgccacggaacggattacgcggtgcatcaggcacagcgtttttcggcggtgtagaagtatcaacctgcggttcattcagcaagctgctggctttcaccagcgtaatgtctggcggcaggttataaaccatctgttgcaacacgcgtaccgttgcagggtgaggatgcccaatggcaatggtcgaaccgttgcgacgcgccaggtcaattgcgcgattaaattgcacacggatgtccgcttcattttgcgaatcgtcgaggaataccttccgtttgatcaccttcacgccagtgccttgcgcggcgcgcatcgcctgggtattaccgatggttacgctgtcgaggaagtaaagattgtaacgctccagcgcctgcatcactttctgcataccaaacaggttagaggtcatcttgctgcccatgtggttgttgatccccacggcatagggcacgttattgaccgcactacgaataatgcgctcaatttcgtcgctgctcatcttaggtgcagcatcggtcgacgagcggaaccttaaggggcacgggttcgcggctaacctgtcatagacctgcggaaacggagagcgtatctttgaaacagctattatcctggttcgccggccatttgctttcttcacggatattcgcccgttaaatggacctgtcgggattcggcttggatgcttaactctgttgctgttgatttttgtaatctccagctttattggtacgtcgctttcgtcgttcattcttaaacgttcggtaaaactggccttagcaggcgcgccgttaatactggctgtgagtgcgttggtactgacgttgtggggaagcgataaaatcgttgctaccggcgtggcgattatctgggggctaacttttgcattggttcccgtcggttcgccgttgatgttgtccggcacattgatgttgctgactgcattgttggttaccaacgcttcccaataattgctctgattattacgttccatcgccacgatggcctcgcgtatatgttgtttattgttttcatctgacaacattaacttttcccacgcttcatctgataatgacgcctgtggcgtgcaaattttacgtaaatcttgtaataccgtggttttctcttttgcggactgcagtgagctaaaaggcgactcggcgtatacgatgcctggcat

SEQ ID NO: 17693 - DNA, 1875 bp, Homo sapiens
  SIMILAR (739)..(1509): 951254mologous to Escherichia coli RstB,accession number U41101,Smith-Waterman Score=1235.
atgctacgcattcactgcatgcagcattggtacaacctgagcgatggcgcgatggaagatgctctgtacgaaatcgcctccatgcgtctgtttgcccggttatccctggatagcgccttgccggaccgcaccaccatcatgaatttccgccacctgctggagcagcatcaactggcccgccaattgttcaagaccatcaatcgctggctggccgaagcaggcgtcatgatgactcaaggcaccttggtcgatgccaccatcattgaggcacccagctcgaccaagaacaaagagcagcaacgcgatccggagatgcatcagaccaagaaaggcaatcagtggcactttggcatgaaggcccacattggtgtcgatgccaagagtggcctgacccacagcctggtcaccaccgcggccaacgagcatgacctcaatcagctgggtaatctgctgcatggagaggagcaatttgtctcagccgatgccggctaccaaggggcgccacagcgcgaggagctggccgaggtggatgtggactggctgatcgccgagcgccccggcaaggtaagaaccttgaaacagcatccacgcaagaacagaacgggcatcagcatcgcatacatgacaggcagcatacgggccagggtggagcacccatttcgcatcatcaagcgacagttcggcttcgtgacagcccgataccggggttgcttgaacacgatcacaaatggggatgttttcccgctggcaacctggttcgggggaccatactcagaaagaaaccactggcaggatatgttaaaactggaagcagcggcgcaacgatttggcgatgggcatctcaatgaacgtatccactttgatgagggttcgagctttgaacgacttggcgtcgcatttaaccagatggcggacaatatcaacgccttaattgccagcaaaaaacagcttattgacggtatcgctcacgaactgcgaacaccgttagtgcgcctgcgttatcgactggagatgagcgataacctgagcgccgccgaatcccaggcgttgaatcgtgatatcagtcaacttgaagctttaattgaagagctgctgacttatgcccgactcgatcgcccacaaaacgagcttcatcttagcgaaccagacctgccgttgtggctgtcaacgcatctggcagatattcaggcagtaacgcccgataaaacggtacggataaaaacgctcgtgcaaggccattatgcggcgttggatatgcgcttaatggagcgcgtgctggataatttgctcaataacgccctgcggtactgccattcaacggttgaaaccagcctgctactgtcggggaatagagcgacattaattgttgaggatgatggcccagggattgccccagaaaaccgggaacatatctttgaaccttttgttcgcctcgatcccagccgggatcgctcaaacggcggctgcgggctggggctggcaattgtccactctatagcactggcaatggaccacttcagcgcgcaatttgctgcgcacagccaacataactacacggccgggtacccagccatgtgccagcaacgttttcgtctttccagttatggtcattcaccgttggtgcatgtatacatcgttccatgtacatcatatcgagatcaaggtgcccgtttgatccgaaaacgaaaacagccaccatgttgggcattacgtcattcgtcatggagaggtgtcaattattcattctgtcaagggcatttaccagtggtcaacccacatgctattatccaacagcatcatccaacacatggttctcttcaactcgtcattgtcaagtcatcaatctccactcaaattcaatgcacatttccttaa

SEQ ID NO: 17694 - DNA, 1272 bp, Homo sapiens
  SIMILAR (1)..(1137): 1001254mologous to Escherichia coli narZ product,accession number X17110,Smith-Waterman Score=2089.
atgagtaaacttttggatcgctttcgctacttcaaacaaaagggcgaaacctttgccgatggtcacggacaggtgatgcatagcaaccgcgactgggaggacagctatcgccagcgttggcagttcgacaaaatcgtgcgttccacccacggtgttaactgtacaggctcctgtagctggaaaatctacgttaaaaatggtctggtgacctgggaaatccaacagaccgactacccgcgcactcgccctgacctgcccaatcatgaacctcgcggctgcccgcgtggcgcaagttactcctggtatctttacagcgctaaccgcctgaaatacccgctcattcgtaaacgactgattgaactgtggcgcgaagccctcaagcaacacagcgatccggtactggcgtgggcatcgattatgaacgatccgcaaaagtgcctgagctacaaacaagtgcgtgggcgcggcgggtttatccgctccaactggcaggaactaaaccagctgattgccgccgctaacgtctggaccatcaaaacctacggcccggatcgcgttgccggtttctcgccgatcccggcgatgtcgatggtttcttacgccgccggaacgcgttatctgtcgctgcttggcggcacctgtttaagtttctacgactggtattgcgacctgccgcccgcctcgccgatgacctggggcgagcaaaccgacgtaccggaatctgccgactggtataactccagctacatcatcgcctgggggtctaacgtaccgcagacacgtacgccggacgcccacttctttaccgaagtacgctacaaaggcactaaaaccatcgccattacccctgactactctgaagtggccaaattgtgcgaccagtggctggcaccgaaacaaggcactgatagcgccctggcgatggcaatgggccatgtgattttaaaagagtttcatctcgataatcccagcgactactttatcaactactgccgccgctacagcgacatgccgatgctggtaatgctggagcctcgcgacgatggtagctacgttcccgggcgcatgatccgcgcatctgacctggtggatggactgggcgaaagcaacaatccgcagtggaaaaccgtagcagttatacccgagttcagcgaagcggactttatagaactcatcaaggttattggaatagatccccaggaaacgcatcctttcaatcagcgggttagatttgtccgccgcttcctgaagcacgcgttcattgaacgataa

SEQ ID NO: 17695 - DNA, 1988 bp, Homo sapiens
  SIMILAR (478)..(1377): 1001254mologous to Escherichia coli Respiratory nitrate reductase 1 alpha chain (EC 1.7.99.4),accession number D90757,Smith -Waterman Score=1618.
  misc_feature (1)...(1988): n = a,t,c or g
atgaacgacagtgaatttcatcgcctggctgatcaactctggctgaccattgaagaacgcctggacgactgggatggcgacagcgatatcgactgcgaaatcaacggcggcgtactgaccattacctttgagaatggcagcaaaatcattatcaaccgccaggagccgctgcaccaggtatggctggcaaccaaacagggcggctaccattttgacctgaaaggcgatgagtggatttgtgatcgcagcggcgaaaccttctgggatttgctggaacaggcggcgacgcagcaggcgggtgaaacaatcaccgggtttcgggtctataccctgcaacttaacgcccagttaagactcggtttccttcggctcccctattcggttaaccttgctacagaatataagtcgctgacccattatacaaaagttcccgaagccaccaatccatctctggaaagttctgtggatgtcaagctcagtgccaaccgcctgaaatacccgatgatgcgcaaacgcctgatgaaaatgtggcgtgaagcgaaggcgctgcatagcgatccggttgaggcatgggcttctatcattgaagacgccgataaagcgaaaagctttaagcaggcgcgtggacgcggtggatttgttcgttcttcctggcaggaggtgaacgaactgatcgccgcatctaacgtttacaccatcaaaaactacggcccggaccgtgttgctggtttctcgccaattccggcaatgtcgatggtttcttacgcatcgggtgcacgctatctctcgctgattggcggtacttgcttaagcttctacgactggtactgcgacttgcctcctgcgtctccgcaaacctggggcgagcaaactgacgtaccggaatctgctgactggtacaactccagctacatcatcgcctgggggtcaaacgtgccgcagacgcgtaccccggatgctcacttctttactgaagtgcgttacaaagggaccaaaactgttgccgtcacaccagactacgctgaaatcgccaaactgtgcgatctgtggctggcaccgaaacagggcaccgatgcggcaatggcgctggcgatgggccacgtaatgctgcgtgaattccacctcgacaacccaagccagtatttcaccgactatgtgcgtcgctacaccgacatgccgatgctggtgatgctggaagaacgcgacggttactacgctgcaggtcgtatgctgcgcgctgctgatctggttgatgcgctgggccaggaaaacaatccggaatggaaaactgtcgcctttaataccaatggcgaaatggttgcgccgaacggttctattggcttccgctggggcgagaagggcaaatggaatctggaatccattgcgcngcattgaaaatccgcattttcgcagcgtaaaacacaatccggtgctggtgcgccaattgcccgttaaaaacctgacgttagtcgatggcaacacctgtccggtggtcagcgtttatgatttggtactggcgaattacggcctcgatcgcgggctggaagatgaaaacagtgcgaaagattacgctgaaatcaaaccgtacaccccagcctggggtgagcaaattaccagggtgccgcgccagtatattgaaaccatcgcccgtgaatttgccgataccgcccataaaacgcatgggcgctcgatgattatcctcggcgcaggtgttaaccactggtatcacatggacatgaactaccgcgggatgatcaatatgctgatcttctgcggttgtgtcgggcaaagcggtggcggctgggcacactatgtcggccaggaaaaactgcgcccacaaaccggctggttgccactggcctttgcgctcgactggaaccgaccaccgcgccaaatgaacagcacctcgtttttctacaatcattccagccaatggcgctatgaaaaagtctctgctcaggagttactttccccgctcgccgatgcca

SEQ ID NO: 17696 - DNA, 5728 bp, Homo sapiens
  SIMILAR (4223)..(4846): 821254mologous to Escherichia coli Respiratory nitrate reductase 1 alpha chain (EC 1.7.99.4),accession number D90757,Smith -Waterman Score=982.
  misc_feature (1)...(5728): n = a,t,c or g
atgtaccctctcccttttacggggaagggtgcaagcccccaatcaccaaattttatttcgcaactatatgtggtcgtagggcctctgttctgcataaccgtttcagtcaacgacctcgactcttttggtcagggcgtggcgcgacataacggcaaaacgctatttatccccggattattgccgcaggaaaacgcggaagttactgttactgaagataaaaaacagtatgcccgcgctaaagtcgtacgccggttaagcgatagcccggaacgcgaaacgccacgctgtcctcattttggcgtatgcggtggctgtcagcaacaacacgccagcgtggatttacagcagcgaagcaaaagtgcggcactcgcccgattaatgaaacacgatgtctctgaagtgatcgccgatgttccctggggctatcgccgtcgcgcgcgtttaagtctgaactacttaccgaaaacacagcaacttcagatggggtttcgcaaagcgggctccagtgacattgtcgacgtcaaacaatgccccattttagcgccccaacttgaagcattgctgcccaaagtcagggcatgtctgggcagcttacaagctatgcgccatcttggtcatgttgaactggtacaggcaaaccagcggcacgctgatgattttgcgccataccgcaccgctaagttcggcagatcgcgaaaaactggaacgcttttcgcattctgaaggcctggatctgtatctcgcccccgatagtgagatactcgaaaccgtctctggtgagatgccctggtatgactcaaacgggttgcgcttaacttttagcccgcgcgattttattcaggtcaatgcgggtgtgaaccaaaaaatggtagcgcgtgcgttggaatggctggatgtgcaacctgaagatcgcgtactggatctgttctgcggtatgggcaactttacactgccattggcgacacaagctgccagtgtggtcggtgtagaaggtgttccggcgctggtggaaaaaggccagcagaatgcgcgtcttaatggcttacagaatgtgacgttttatcacgaaaatcttgaagaagatgtcacaaagcagccgtgggcgaaaaacggcttcgataaagtgttgctggacccggcgcgggagcacgggatcaacgttctgaattctatggccatttcgggcaacgacaatccgcaagccagcacctgtggagagatcgtactcaccagcgatgtctatgcctacgacaccaagtacattgacgaagatggcgcgaaagtggtagttccggcagccattgcgccagaaatcaacgataagatccgggcgattgccgttcaggcttatcaaacgttgggatgcgcaggcatggcgcgtgtagacgtgtttttaaccccagagaacgaagtggtgatcaacgagatcaacaccctgcctggcttcactaatatcagtatgtatccgaagctgtggcaagccagcggtctgggttacaccgatctgatcacacgtttgattgaactggcgctggagcgtcacgctgcggataacgcattgaaaaccacaatcggaaaatatcgcaatgcctcttcaacgcctggcaacattgcctatgcgttgtttgtgctgttttgcttttgggctggggcgcaattgctgaacctgttagtgcatgcgcccggcgtctatgagcgtttaatgcaggtccaggaaacaggtcgcccacgggtggaaattggtttaggtgtcggcaccattttcgggctgatcccgtttttatggtggcgctatggctgcactggcgacatcgccgccactgatttcgaattattgtgggaattagctacccatgccgggcaaatcatggaccgcgatgcattgctgaaaaatttacgcggcgtcagttatgacggactggatcgtagcgtggacgtggctatttcgcggttaagaaaaaaactgctcgataacgccgcagaaccttatcgcattaaaactttttacctgttattgtttgtctgcttccttgtgatgtctctgctggttgggctggtgtacaaatttaccgccgaacgcgcgggcaaacagtcgctggatgatttgatgaacagttcgctgtatctgatgcgcagcgaattgcgtgagatccccccacacgactggggtaaaactctgaaagagatggatttaaatctctctttcgatctgcgtgtcgagccactgagtaaataccatcttgatgatatttccatgcaccgactgcgtggcggcgaaattgtcgccctggacgatcagtacacgttaatgcagcgtatcccgcgcagccactacgtgctggcagttggtcctgttccttatctttattatctccatcagatgcgattgctggatatcgccctgatcgcttatattgctatttccctcgccttaccggtgtatatctggatgcgtccgcactggcaggatatgttaaaactggaagcagcggcgcaacgatttggagaagggcctctcaatgaacgtatccactttgatgaggacgaaggacgaacaagggcagagggaccgcgggcgcggccagcggagccgcgggtaagaggaccggggcgcccaaaccaggccgaagacggacgcaggccgcggaccgagctaaagagacgctggcaggcctggagtctgccaacccaagccaagggccagcaacagttgagcgagctgcgcgccaacgaatcccgtctgcgtaacagcattgcccgtgcggaagccgcggcgaaagcgcgtgcagaacgagaagcacgtgaggcccaggcggttcgcgaccgccagaaagaagcgacgcgcaaaggcaccacctacaaaccgaccgaaagcgaaaaatcgctgatgtcccgtaccggtggtctgggcgcgccgcgtggtcaggcattctggccggttcgcgggccgacgctgcatcgctatggcgaacagctacagggtgaattacgctggaaaggtatggttatcggtgcttctgaaggtactgaagttaaagcgattgccgacggtcgggtgattctggctgactggctgcaaggctacggtctggtggtggtggttgagcatggtaaaggcgacatgagtctttacggctataatcagagcgcactggtgagcgttggttcgcaggttcgcgcgggccagccgattgcactggtgggcagcagtggcggtcagggtcggccttcactctatttcgaaattcgccgccaggttttgtttccatttcgtcgtaacgttcttgcatttgccgctctgttggcgctctcctcccccgtacttgctggcaaacttgccatcgtcattgatgattttgggtatcgcccgcacaacgaaaaccaggtgctggcgatgccttccgctatctccgtcgctgtattacccgattcaccgcacgccagagagatggcgaccaaagcgcataacagcgggcacgaagtgttgattcatctcccgatggcaccgttgagtaaacagccgctggagaaaaatacgctacgcccggagatgagcagcgacgaaattgagcgcattattcgtagtgcggtcaataacgtgccctatgccgtggggatcaacaaccacatgggcagcaagatgacctctaacctgtttggtatgcagaaagtgatgcaggcgctggagcgttacaatctttacttcctcgacagcgtaaccatcggtaatacccaggcgatgcgcgccgcgcaaggcactggcgtgaaggtgatcaaacggaaggtattcctcgacgattcgcaaaatgaagcggacatccgtgtgcaatttaatcgcgcaattgacctgncgcgtcgcaacggttcgaccattgctgttattgctgacggcgttgtgcataccctgcggtcggagatcggtcaaataccagggcaaaccatcaaaccactgttcgtcgccatctgcgcctgttaccagacaacttccctgcggccagcacaaccggatgtcggcgaatttatgcgcctttccggtatcgtccacccgccagacgggaatacgctcaattccgcgataaggacgcagcagtgcatatcgcgttgcccgtgctttaccaaagcgaatcacccgatcttctctggcaacaaggcgcagaaccggattccaagtgcgattttgatcatgtacgttgacagcgtagtactgacgacttcagcgggcaagggcgaaacctttgccgatggtcacggacaggtgatgcatagcaaccgcgactgggaggacagctatcgccagcgttggcagttcgacaaaatcgtgcgttccacccacggtgttaactgtacaggctcctgtagctggaaaatctacgttaaaaatggtctggtgacctgggaaatccaacagaccgactacccgcgcactcgccctgacctgcccaatcatgaacctcgcggctgcccgcgtggcgcaagttactcctggtatctttacagcgctaaccgcctgaaatacccgctcattcgtaaacgactgattgaactgtggcgcgaagccctcaagcaacacagcgatccggtactggcgtgggcatcgattatgaacgatccgcaaaagtgcctgagctacaaacaagtgcgtgggcgcggcgggtttatccgctccaactggcaggaactaaaccagctgattgccgccgctaacgtctggaccatcagaacctacggcccggatcgcgttgccggtttctcgccgatcccggcgatgtcgatggtttcttacgccgccggaacgcgttatctgtcgctgcttggcggcacctgtataagtttctacgactgctacatcatcgcctgggggtcaaacgtgccgcagacgcgtaccccggatgctcacttctttactgaagtgcgttacaaagggaccaaaactgttgccgtcacaccagactacgctgaaatcgccaaactgtgcgatctgtggctggcaccgaaacagggcaccgatgcggcaatggcgctggcgatgggccacgtaatgctgcgtgaattccacctcgacaacccaagccagtatttcaccgactatgtgcgtcgctacaccgacatgccgatgctggtgatgctggaagaacgcgacggttactacgctgcaggtcgtatgctgcgcgctgctgatctggttgatgcgctgggccaggaaaacaatccggaatggaaaactgtcgcctttaataccaatggcgaaatggttgcgccgaacggttctattggcttccgctggggcgagaagggcaaatggaatcttgagcagcgcgacggcaaaactggcgaagaaaccgagctgcaactgagcctgctggctgtgaagatacgcttcttcagtcatctctactatcagattggcctgacggtattccagcacacgctcgacattggggccatcgtttccttcgacgatgacgagtggtgcggtaacgtgcaacgcatcttcaacaggatcatgcttttgtcgatcgtactgcggccacgtacaatccccttccacgacctggcgcagattttccgtcagtttcgcaacgtcaaatgtctctggtgcgcctttgaaggggcgcaattgatgcgcatccagccagctattgtaatggtgaaaaccatccatcgggagcgtctgaatagcgggcagttccgggtcttgttgcgcgagatattcccagaaggtggttag

SEQ ID NO: 17697 - DNA, 1869 bp, Homo sapiens
  SIMILAR (614)..(691): 381254mologous to Escherichia coli NADH DEHYDROGENASE I CHAIN N (EC 1.6.5.3) (NADH-UBIQUINONE OXIDOREDUCTASE CHAIN 14) (NUO14),accession number D90858,Smith-Waterman Score=40.
atgggaaggacctgcttccacaattcaattaccacgatcctgaatggtcgaaatgatcgacgcataggtagacggacgaccgataccgcgtttttccagctctttaaccagcgatgcttcactgaaacgggctggcggcttggtaaagtgctgggctggtcgttcaatgttgccgatagttaccgcgccgtgctcatcgcgaatagtacaggcaccttcacacaaacggtcttgcggacaaacgcgtccggtaatttccggcagggtgttggtctggtgagaaagctcgacggcggcgtcgatgtttccggctttcaccagatgaatcccctaatgattttggtaaaaatcattaagttaagacaacaagatgtgcgaactcgatattttacacgactctctttaccaattctgccccgaattacacttaaaacgactcaacagcttaacgttggcttgcacgcattacttgactgtaaaactctcactcttaccgaacttggccgtaacctgccaaccaaagcgagaacaaaacataacatcaaacgaatcgaccgattgttaggtaatcgtcacctccacaaagagcgactcgctgtataccgttggcatgctagctttatctgttcgggcaatacgatgcccattgtacttgttgactggtctgatattcgtgagcaaaaacgacttatggtcgtggtgatgcgtctgttcctctacgcaccggtgggtgacagcgaagcgattcgcgtggtgctggcgattatcgcctttgcctccatcatcttcggtaacctgatggcgctgagccagaccaatatcaaacgtctgctcggttactcatctatctctcacctcggctatctgctggtagcgctgattgcctgcaaaccggcgagatgtcgatggaagcgcagcctcggcgcgttcggcgtggtcagcctgatgtccagcccgtatcgtggcccggatgctgattccctgttctcttaccgcggtctgttctggcatcgtccgatcctcgcggcagtgatgacggtgatgatgctgtctctggccggtatcccgatgacgctgggctttatcggtaagttctacgtgctggcggtcggtgtccaggcacacttgtggtggctggtgggtgccgtggttgtcggttcggcaatcggcctctactactacctgcgcgtggcgtgcgagcgcggtttgctggcgaaagatctctcttcatccattgtgattcgtaccagcgcggcatccgatgcgcgtatgggcggcgctacgcttccggctatgagtaactcgggctcggtaaccagggattacggaacaatgcctgtggtggtggtagcagaacacttcggagcggatgatgaacggctggcgcgtgcgctgatgctttcgcatttgagcgcaatttacatccatacccagttaccgcgtttgtctgcgctgtgtgccgcaacgaccgcagcaatgggggccgccgccgggatggcatggctggtggatgggcgttatgaaaccatctcgatggcgatcagcagtatgatcggcgatgtcagcggcatgatttgcgatggtgcgtcgaacagctgcgcgatgaaggtttcgaccagtgcttcggctgcgtggaaagcggtgttaatggcgctggatgataccgccgtgaccggcaatgaagggattgtggcgcatgatgttgagcagtcgattgccaacctgtgtgcgttagcaagccattcgatgcagcaaacggatcggcagattatcgagattttagaaaaacacggccagataagcgccaggttttggggatcgtgccggatgcgatgctggcgcatattgtccggcatacgggttgtttaa

SEQ ID NO: 17698 - DNA, 1246 bp, Homo sapiens
  SIMILAR (523)..(1215): 971254mologous to Escherichia coli Fe-S center and glutamate synthase (GltD) protein,accession number L34011,Smith-Waterman Score=1220.
ttaatcctgacgaaggactttgtgaccataatcgagtaacgcatcagtgactttacgcatcatgcggctttcaggagcaaagcggtgccagtagagcatccgtcgttgaaatagcccaggcgttaagtcaatcagttcaccgctggccagctctttctcgatttgcaggtgcgggatcatacagcaggtggtgccctggcgagcaagttgtacgaacgcttctgaagaattaacgatatggcagggcacgctgcctggaggcagatcgaagttttgctgcaaaaaggcctggtgcatatcgtcaagatggtcaaacgcgaccactggcgctttcagtaatgccgaacgcgttacgccgttagggaaatatttttcggcaaagggttttgagctgacgaacagatagtcgagcgcaccaagtttatcgacaagacaactcggcagcgcctgatgttgaatactcaccgcgccgaccacttcgccgcggcgcagacgttcctgagtgcgggtttcatcttctaccctaatggcgcaatcagccacgttgatgacagcattcaggtcaatcagcaaaagtgtattggctgtaaatcctgcgtggtggcctgtccttttggtacgatgcaaatcgtcctgacacccgtcgcggcaggaaaagtaaaagccacggcgcataaatgcgacctttgtgcggggcccgaaacgggtcctgcttgtgttgagaattgcccgccggacgcgctgcaattggtcactgacgtcgcactctccggcatggcgaaatcccgccgcttgcgcaccgcgcgtcaggaacatcaaccgtggcatgccagtaccgcggcgcaagaaatgccggtaatgagtaaagtcgaacaaatgcaggcaacgcccgcgcgtggcgagccggataaactggcgattgaagcgcgcaaaaccggttttgatgaaatttatctgccatttcgcgccgaccaggcacaacgggaagcctcgcgctgccttaagtgcggcgagcacagcgtttgtgaatggacctgcccgctgcataaccatataccgcagtggattgaactggtgaaagccggaaacatcgacgccgccgtcgagctttctcaccagaccaacaccctgccggaaattaccggacgcgtttgtccgcaagaccgtttgtgtgaaggtgcctgtactattcgcgatgagcacggcgcgctctcccggaggcgcagggctgacgagtgccgccaag

SEQ ID NO: 17699 - DNA, 2415 bp, Homo sapiens
  SIMILAR (481)..(1104): 971254mologous to Escherichia coli Initiation factor IF2- alpha,accession number AJ002540,Smith-Waterman Score=972.
ttactttttcaccacaattaacggttcaatatcactctcttttttgatgaccagtgattcatcaccgcgcaaacacgtcccaccgtagttgccgccaacggtgaaggtacatacctgaatgtatttaccgtccactttcacgcaaccgacaaggtgctgaaagatgacaacctgctggcgctgttcgacatcccgaaaatcctctggccacgtttgcgtctctcctggcagcgtcgccgtcaccatatgatcactggtcgtatggatttctgctataggttgtcgattatggttggcggtgatgaagcggtatttgaacgtgttaaaccgctgtttgaactgctcggtaaaaatatcaccctcgtgggcggtaacggcgatggtcaaacctgcaaagtggcaaatcagattatcgtggcgctcaatattgaagcggagcccacgtatctgcgaaagcgggtaccggtatcgatgaactgcttggacgctatcctgctgcaggcggaagttctggagctgaaagcggtacgtaaaggtatggcgagcggtgcggttatcgaatccttcctcgataaaggtcgtggtccggttgctaccgttctggtacgtgaaggtactctgcacaagggcgatatcgttctgtgtggcttcgaatacggtcgtgttcgtgcgatgcgtaacgaactgggtcaggaagtgctggaagcgggtccgtccattccggtggaaatcctcggcctgtccggcgtaccggctgcgggtgatgaagttaccgttgtacgtgacgagaagaaagcgcgtgaagttgcactctatcgtcagggtaaattccgcgaagttaaactggcgcgtcagcagaaatctaaactcgagaacatgttcgccaacatgaccgaaggcgaagttcacgaagtgaatatcgtcctgaaggcagacgtacagggttctgtcgaagcgatctccgactccttgctgaaactgtctactgacgaagttaaagtgaagatcatcggttctggcgtaggtggtatcaccgaaaccgacgccacactggctgcggcgtccaacgccatcctggaagggctgttcacgttgacgttggatcggtaccgaatcgaggggtctgttctgggaaaaagtcgcatcgtaatcgacaccgttgtatgtcacgccgagttgataataacgatcctgcacccccggataggggtttacccaggcgtagacatgctcgctttcaaagttgccgttggtattgttgtcacaatagacgggaattttaatatcgtcagattcccagatcttatcaccgggtttggcattgcctggtacagcaaacggttgaatcgcttctgatttttctagaagacctggtgaaaactgtgccgtttccagcgcaatattgtcctgcatccatttaccgagccacggcttcaggtcgatgtcatccgcctggagccagacgcgaccattgcttaacaacccctcatcatcgcgcaaatccatgcgcacctgcatcacgccgtgcgatgaagcacgcgatcgtgaatctggcggtacaggtttggggctggcgattgttgaaaccacaatccccagcgtgatggcgacgatttccgcagacaatataaaatcggtacgaatcgccccttttattttgtccttttcaaacttcagcggatcctgcgcagagccagcagcgtctggagaagctggatagcgttgtcgatcccgttgccgcgattgaaaatgctgagatcgtgattgtcggcggcgggaatactttccagttgctcgcaagatgagtttgtcatcgcgcccggattctccaccgacccactggaagaacagcacagcgtagtgtctggtttgttgcataaataccacaaccgggcgcttttgctggtcaaaggcggctgcgcggtaaattgccgctattgcttccgtcgtcacttcccctatgccgaaaatcagggcaacaagcgtaactggcaaactgcacttgagtatgttgctgcgcatccggaactggacgagatgattttctccggcggcgatccgctgatggcgaaagatcacgagctggactggttgctcacacaactggaagatccggttgccgcggcctcccaaagtgctgggaatacaggcgtaagccactgtgcccagctttttctgactatcttctatgtgtggaataagactgattttcattttcacgggcgaatgatgcccggtgaatatgtactttcttccagctttggcatcgcaggtcacgatattcacgaactgccgtctggcggtcgcgatccgctctcctatgatgatccattgcgtcaaatcacccgcatgatccaaaaattcccgaaaccgatcatttcgatggtggaaggtagtgtttgggccatccgccat

SEQ ID NO: 17700 - DNA, 2125 bp, Homo sapiens
  SIMILAR (878)..(1651): 891254mologous to Escherichia coli glutathionylspermidine synthetase/amidase,accession number U23148,Smith-Waterman Score= 1228.
atgagatatatgggcagcatcttaccgcattccatacgctccactgcactctgcctgcgcatcgagtccgttacggcttgcgtgctgcagctggtcatccagcgtccacatcaacaaggccggtcaatcacggttcatcccacagcaatccagggcgatacacgccaggcaacagaaccatgtagacgcaacaacggccaagcaaaaagggcacagggaacacattacacaaggccgtataacaccctgtgcaagtacccctcgatgcagctcttccttggtaccgacacctttacgcattacccggactaccctgatccagaatttattccctttcgggaaaacgttgcagctaaactcaatagactcacggcagaacggtattcaaaatcagatcaatttcaggaagcgctttcacgtcagtggcagcgttatggcttaaattctgcggctgaaatgactcctcgccagtggtggctagcagtgagtgaagcactggccgaaatgctgcgtgctcagccattcgccaagccggtggcgaatcagcgacatgttaactacatctcaatggagtttttgattggtcgcctgacgggcaacaacctgttgaatctcggctggtatcaggatgtacaggattcgttgaaggcttatgacatcaatctgacggacctgctggaagaagagatcgacccggcgctgggtaacggtggtctgggacgtctggcggcgtgcttcctcgactcaatggcaactgtcggtcagtctgcgacgggttacggtctgaactatcaatatggtttgttccgccagtcttttgtcgatggcaaacaggttgaagcgccggatgactggcatcgcagtaacttaatgtcgcatcattacccaattgcatggcaacaaagtccgtattgcggaacagaacgtgattcattccccgttgccgcaagggcaacagtggacgcgcgagctggagatggtggtcgaaaacggctgctataccctgaaagacacttttgatgacaccaccattctgggctggatgatccagacggaagatactgaatacagcttaccgcagccggaaattgcaggcgagctgctgaaaatcagcggagcgcgcctggaaaacaaaggccagtttgacggtaaatggctggatgaaaaagatccgctgcaaaacgcctatgtgcaggccaacggtcaggtgatcaatcaggatccttatcattactacaccattaccgagagtgccgagcaggagctaattaaagccaccaacgagctgcacctgatgtatcttcacgcaaccgacaaggtgctgaaagatgacaacctgctggcgctgttcgacatcccgaaaatcctctggccacgtttgcgtctctcctggcagcgtcgccgtcaccatatgatcactggtcgtatggatttctgcatggatgagcgtggcctgaaggtttacgagtacaacgccgactccgcctcctgtcataccgaagcgggcttgatcctcgaacgttgggcggagcagggctataaaggcaacggcttcaataccattacgcgtgatagcagcgaggaagagattctctggctggaaacgatgttaaaccgcgcattgcatatttcgacagaaccttcggcggagtggcgtcccttgttggtagaaaaaataaagcaatttcaaaaaagccaccacttgaaaactgacggtgttgttggcttttcaaccatgaagatctgcaagccaatgcgcaaaccgttcttgaggtactgcgcagtggttccgcttacgacagagtcaccgcactggcggcacgaggcgaaaatcgtcgcagacaaggcgatttgggtagaagcccgcaaacagcagcaaccgctggccagttttcagaatgaggttcagccgagcacgcgacatttttatgatgcgctacagggtgcgcgcacggcgtttattctggagtgcaagaaagcgtcgccgtcaaaaggcgtgatccgtgatgatttcgatccagcacgcattgccgccatttataaacattacgcttcggcaatttcggtgctgactgatgagaaatattttcaggggagctttaatttcctccccatcgtcagataa

SEQ ID NO: 17701 - DNA, 1425 bp, Homo sapiens
  SIMILAR (838)..(1422): 991254mologous to Escherichia coli similar to,accession number D90861,Smith-Waterman Score=987.
atggcccagcagcataacattggcttacatggcgtgcgagagcaggatcttcctcacttgaccaagttctcttccaaaactcacaatataaagcaatttggggaactggtcaaggagattcctttcagctgttatgtggagtcccaaattactagcaggcagatggccccagtggtgtggcaggaccatggacagcgcccaccgggctattctgcgagccagccccaggcgcagaacgtctggatccgcacactgtacgatcgccatcgttttgttacacgcggcacgctgggctggattgaaaccggtgatttcgacaaagtaccgccggatctgcgtttcttcgccgggggcgaccgcagtattcgtggctacaaatacaaatctatcgctccgaaatacgccaacggtgacctgaaaggggcctcgaagttgataaccggatcgctggaataccagtacaacgtgaccggaaaatggtggggcgcggtgtttgtcgatagtggcgaagcggtaagcgatattcgccgcagcgactttaaaaccggtaccggggtcggcgtgcgctgggaatcgccggtcgggccaatcaaactcgattttgccgtaccggtcgcggataaagacgaacacgggttacagttttacatcggactggatattggcaaggtcaccggcggctggcgcgatctcaccttgtctgacgttcgttatgagcagccaggcgtggcggtaaaagcgggcaatctgcatctggctgtcgggcttgagtgcctgtggaacagcagtgtttgtattaatgatctggcgctgaaagacattcaggtcaacatcgacagtggaaccattgataacggtatcctggcgcttattcgccatacccgcgggaatgaaattctctttattcctgcgctgtttattctgttttcacttggcggcgcggtatttggtatgggagaagaggccgtcgcctttgccattatcatcgcaccgctaatggtccggctgggctatgacagtattaccaccgtcctggtgacctatattgccacgcaaatcggttttgccagttcgtggatgaacccgttttgtgtggtcgttgctcaggggattgccggcgttccggtgctttctggctccgggttgcgcatcgtggtgtgggttatcgccactctgattggcctgatctttaccatggtgtacgcctcacgagtgaaaaagaatcctcttctgtcacgcgtgcatgagtccgaccgcttctttcgtgaaaagcaggctgatgttgaacaacgtccgtttacctttggtgactggctggtattgattgtcctgaccgccgtaatggtctgggtgatttggggcgtgatcgttaatgcctggtttattccagaaattgccagccagttcttcaccatgggtctctaa

SEQ ID NO: 17702 - DNA, 509 bp, Homo sapiens
  SIMILAR (238)..(507): 861254mologous to Salmonella typhimurium zinc transport protein,accession number AF308568,Smith-Waterman Score=429.
aggatcgtacgaccctgattactatattgcagctcggcacccggggatcagatagttttgataatgattgacgctatttaacacttcacacgggttgtatacggaaaagcattttgctttttgtattcaatttagacagaattttattaatcatttcacggtaatggggtgatgagatgttgcgtaacagggccagaaggctagactacaaaataatgcgttgatgatggaggcactgtggaagcgattaagggatcggacgttaatgtcccggatgcagtatttgcctggatgctggatggtagaggcggcgttaaaccgctggaaaatacagatgtgattgatgaagcgcatccctgttggctccaccttaattatgtacaccatgatagcgcccaatggctggcgacaacaccgctgcttcccaataacgtacgtgatgcgctggcgggcgagagcacgcgtccccgagtcagccgtctcggtgaaggcacgctgattacattgcg

SEQ ID NO: 17703 - DNA, 422 bp, Homo sapiens
  SIMILAR (79)..(420): 971254mologous to Escherichia coli ribosomal protein S11 (aa 1-129),accession number X02543,Smith-Waterman Score=565.
gacaacgtaccaagaccaacgcacgtacccgtaagggtccgcgcaaaccgatcaagaaataatcggggtgattgaataatggcaaaggcaccaattcgtgcacgtaaacgtgtaagaaaacaagtctctgacggcgtggctcatatccatgcttctttcaacaacaccatcgtgactatcactgatcgtcagggtaacgcgttgggttgggcaacagccggtggttccggtttccgtggttctcgcaaatccactccgtttgcagctcaagttgcagcaaagcgttgcgctgacgccgtgaaagaatacggcatcaagaatctggaagttatggttaaagggccgggtccaggccgcgaatctactattcgtgctttgaacgccacaggtttccgcatcactaacattattgatgtgactcc

SEQ ID NO: 17704 - DNA, 482 bp, Homo sapiens
  SIMILAR (2)..(286): 1001254mologous to Escherichia coli YbaO,accession number D82943,Smith-Waterman Score=497.
ggaaaaaataggcctcggcctgaccgcttttgtgctgataaaaacgcaacatcacagcagcgaatggtattgccgctttgtcacggtggttaccgaaatgccagaagtgctggggttctggcgcatggctggtgaatacgattatctgatgcgcgtccaggttgccgacatgaaacgctacgacgagttttataagcgtctggtaaacagcgtgccggggctgtcggacgtcacttccagcttcgcgatggaacagattaaatacaccacttctttacccatcgaataaatatccagaatcaggtcaggacacaacgcgtgcgattatttgctcaattaagctggtatttccgtcgggaatggcgtcgctatctcggggctgtcgccttgcttgtcattatcgcgatgctgcaactggttccgccaaaagtggttggtattgttgtcgatggcgtgacagaacaacactttactaccgggca

SEQ ID NO: 17705 - DNA, 1629 bp, Homo sapiens
  SIMILAR (610)..(1626): 991254mologous to Escherichia coli Ig heavy chain-binding protein,accession number D90705,Smith-Waterman Score=1700.
atggtgtctatggcaaggaaaacagggtttactactggggaactagtaggccccaacaatggaccaacgatcggcaattggccagctggcgacagcacctacctgcgaaataccattcttatattgctcagcagtggaatagtacttaggcagcgtagcctgaatatattccgggctggcgtaacggtaattcagctgtaccagacggtcttcatcccgacggtattcaatgctggagttactggtcgctacgttatccagacgtgtatcgtactgaatcccgccacgcaatccccaacgctcggagatacgccacggaggcaatacggtcaagaccgccgtaagtccggtcccggaacaggccagagtagtcagattgcagcagagacgagtcgtagttatagatgtcgctctgatcgcgatacggcacgtacaaatactgcgcgcgcggttccagcgtttggtataacccggagccagcatttccatatcgcgttcaaagaccattttgccgtcaactttgaattgcggcattacgcggttaacggattcgtccagcttggtcgtgtttctggagttataccagtcaagattggtttgctgataatcgcggatgtcgccaggaccacgcttaacgagagtgaactggcagccttgtacgcctgtgtggaagcggcaaaatgtagcaatcaatcgccattgcacattcgctggcagtatcaggaagaaacgcgggaatgcgaattttacgagaacgaactggaagatttgtggttgccgctgctcaatcgcttgcgagtgccgattgaacaggcgttgcgcgatgcgcgtctgaagccgagtcaaatcgacagtctggtgctggttggcggcgcgtcacaaatgccgctggtgcagcgaatcgccgtgcgtctgtttggcaaattaccgtatcaaagttacgatccgagcaccattgtcgcgctgggcgcagcaatccaggccgcctgccgcttacgcagtgaagatattgaagaggtaatcctcactgatatttgcccttactcgttgggcgttgaagttaaccgccagggcgtttccggcattttctcgccgattattgaacgaaacaccactgtgcccgtgtcgcgtgtagaaacttattcaaccatgcacccggaacaggattcaattacggttaacgtctatcagggagaaaaccacaaagttaaaaacaacattctggtggaatccttcgatgtgccgttgaagaaaaccggggcttatcagtcgattgatattcgctttagttatgatatcaacgggttgcttgaagttgacgtgcttctggaagacggcagcgttaagtccagagtgattaaccacagcccggtaacattgagcgcgcacacgattgaagagagtcggacgcggttatccgcattgaaaatttatccgcgcgatatgctcatcaatcgcacctttaaagccaaactggaagagttgtgggcgcgggcgctgggtgacgagcgagaagagatcggccgggtgatcaccgattttgatgcggcgttgcagtcaaacgatatggcccgcgtggatgaagttcggcggcgggcgagcgattatttagccattgagatcccataa

SEQ ID NO: 17706 - DNA, 921 bp, Homo sapiens
  SIMILAR (696)..(328): 861254mologous to Escherichia coli YbaO,accession number D82943,Smith-Waterman Score=561.
tcattcgtcgttcattcgatatttatcatgaacagcaaaaaatatcgctgcataacgagagtattctgctgctggagaaaaatttggcagacgattttgcgttttgttcaccggatacgcgacgactggatatcgatgagctgacagtttgccattacttacaaaatattcgtcagcggcgtcggcgtgctggcagccgtcagcggcaccgcaggagctcggtaccggtagtaagtgttgttctgtcacgccatcgacaacaataccaccacttttggcggaaccagttgcagcatcgcgataatgacaagcaaggcgacagccccgagatagcgacgccattcccgacggaaataccagcagacgcttataaaactcgtcgtagcgtttcatgtcggcaacctggacgcgcatcagataatcgtattcaccagccatgcgccagaaccccagcacttctggcatttcggtaaccaccgtgacaaagcggcaataccattcgctgctgtgatgttgcgtttttatcagcacaaaagcggtcaggccgaggcctattttttccggatccagcagggcgactttgccgataaggataccgtcgtcctccagccgtttcaggcgcttccagcaaggggtggttgtcagattaacggcttcagccagtgcctggactgaatcctcacaatatctcttaagctgctgatcgtcgggattattgtggtttctattttgccgggcgtcatcgaaataatccgtcacaaacgcgccaacgacttgacggttctcacacatgctgaaagacgccagcctcaagaggttgcttacagtatgattccatttatgtgacattcttgaaaaagacaaaacttcttcattcttcacagaattccctatgagggcagttaccatgtgcaggctcat

SEQ ID NO: 17707 - DNA, 1821 bp, Homo sapiens
  SIMILAR (1063)..(1773): 941254mologous to Escherichia coli Ig heavy chain-binding protein,accession number D90705,Smith-Waterman Score=1122.
atgttagataaaattgaccgtaagctgctggccttactgcagcaggattgcaccctctctttgcaggcactggctgaagccgttaatctgacaaccaccccttgctggaagcgcctgaaacggctggaggacgacggtatccttatcggcaaagtcgccctgctggatccggaaaaaataggcctcggcctgaccgcttttgtgctgataaaaacgcaacatcacagcagcgaatggtattgccgctttgtcacggtggttaccgaaatgccagaagtgctggggttctggcgcaactggccccagccgtttatgggcggacaatggcaaaacgatacacccacgttgcgtattccctactatcgcccgctcgaaccgctacaaccaggctttttgcccggccgtgccgagcagcatctcgccgggcagatattttccggcctgacccgcttcgataataatactcagcgcccgattggcgatttagcgcatcactgggaaacctctactgacgggttacgctgggacttttatcttcgttcaaccctacactggcataacggcgatgcagtaaaagcctcacacttacaccagcgattattgatgctgttacaactgccagcactggatcaattatttattagcgtgaagcgtattgaagtcacccatccgcagtgtctgaccttctttttacatcgccctgattactggcttgcgcaccggctggcgagctattgcagccatctggcgcatccgcaattcccactgatcggcacgggtccttttcgcttaacacaattcacagcagagctggtgcgcctggaaagccatgattattaccatttacggatgctagagcccgggaggcggagctgcaaccttcagccacctggctacagaaccactaccagcaaccataaagctgttcagagaaagacaagccccatgtctctccactcgtgctgggaagggcaagcaccctcctatttcaccccaccaggaagcgcggggaggagggtggaaggcaaaggcaacttcaggcaaactgggaaaggcggccaggacctcggggacaccgcataccgccgggcgcacagcccctcacgcgcgccggtgattgaagttcacgcctccgctggcgacaactttcttgttggcgaagattttacccatatgctggtcgatgaggttttaaaacgcgcggatgtcgccaggaccacgcttaacgagagtgaactggcagccttgtacgcctgtgtggaagcggcaaaatgtagcaatcaatcgccattgcacattcgctggcagtatcaggaagaaacgcgggaatgcgaattttacgagaacgaactggaagatttgtggttgccgctgctcaatcgcttgcgagtgccgattgaacaggcgttgcgcgatgcgcgtctgaagccgagtcaaatcgacagtctggtgctggttggcggcgcgtcacaaatgccgctggtgcagcgaatcgccgtgcgtctgtttggcaaattaccgtatcaaagttacgatccgagcaccattgtcgcgctgggcgcagcaatccaggccgcctgccgcttacgcagtgaagatattgaagaggtaatcctcactgatatttgcccttactcgttgggcgttgaagttaaccgccagggcgtttccggcattttctcgccgattattgaacgaaacaccactgtgcccgtgtcgcgtgtagaaacttattcaaccatgcacccggaacaggattcaattacggttaatcactcggtaccatccaggtttcttccagcgccttgtggttcaacgtaa

SEQ ID NO: 17708 - DNA, 648 bp, Homo sapiens
  SIMILAR (79)..(642): 931254mologous to Escherichia coli similar to arylsulfatases of Klebsiella pneumoniae and Homo sapiens,accession number M87049,Smith-Waterman Score=905.
atggcggcagaaaaaatccgcgatattatcggcccagaactggtgaccttacataacctcatacccgaagcattttgcatggaattttcgttttcacccaaacgtattagtggttgctgttcaccgccgttctttcctctcatggccagcgcagcagataccccgtcaactgccaccgcacgcaaaggctttgccgaatacgatcacccaaaccagtatctggttaaaccggcgaccaatattgccgacaatatgatgccagtaatgcagcatccggcgcaggataaagaaacccagcagaagctggcagaacttgagaaaaaaaccggtaagaaaccgaatgtggttgttttcttgctggacgatgtgggctggatggacgtcggttttaacggtggcggcgtggcggtgggtaaccctacaccagatatcgacgccgttgccagccaggggctgattttaacttcggcgtattctcaaccaagctcttccccaacccgcgccaccattctcaccggacaatactccatccaccacggcattctgatgccgccaatgtacgggcaaccgggcgggctgcaagggttaaccacgctgccgcagttgctgcacgatcagggatacgtcactcaggccgtcggatcatag

SEQ ID NO: 17709 - DNA, 413 bp, Homo sapiens; identical to SEQ ID NO: 8619
  SIMILAR (174)..(413): 951254mologous to Homo sapiens reverse transcriptase,accession number L27428,Smith-Waterman Score=416.

SEQ ID NO: 17710 - DNA, 1449 bp, Homo sapiens
  SIMILAR (1127)..(1219): 671254mologous to Homo sapiens putative p150,accession number U93563,Smith-Waterman Score=92.
atgagtggaatcccattcacaattgcttcaaagagaataaaatacctaggaatccaacttacaagggatgtgaaggacctcttcaaggagaactacaaaccactgctcaaggaaataaaagaggatacaaacaaatggaagaacattccatgctcatgggtaggaagaatcaatatcgtgaaaatggccatactgcccaaggtaatttacagattcaatgccatccccatcaagctaccaatgcctttattcacagaattggaaaaaactactttaaagttcatatggaaccaaaaaagagcccacattgccaagtcaatcctaagccaaaagaacaaagctggaggcatcacactacctgacttcaaactatactacaaggctacagtaaccaaaacagcatggtactggtaccaaaacagagatatagatcaatggaacagaacagagccctcagaaataacgccgcatatctacaactatctgatctttgacaaacctgagaaaaacaagcaatggggaaaggattccctatttaataaatggtgctgggaaaactggctagccatatgtagaaagctgaaactggatcccttccttacaccttatacaaaaatcaattcaagatggattaaagacttaaacgttagacctaaaaccataaaaaccctagaagaaaacctaggcattaccattcaggacataggcatgggcaaggacttcatgtctaaaacaccaaaagcaatggcaaccaaagccaaaattgacaaatgggatctaattaaactaaagagcttctgcacagcaaaagaaactaccatcagagtgaacaggcaacctacaaaatgggagaaaatttttgcaacctactcatctgacaaagggctaatatccagaatctacaatgaactcaaacaaatttacaagaaaaaaacaaacaaccccatcaaaaagtgggtgagggacatgaacagacacttctcaaaagaagacatttatgcagccaaaaaacacatgaaaaaatgctcaccgtcactggccatcagagaaatgcaaatcaaaaccacaatgagataccatctcacaccagttagaatggcaatcattaaaaagtcaggaaacaacagggacatagatgaaggtgtaaaccatcattctcagcaaactatcacaaggacagaaaaccagtcactgcatgttctcactcatacgtgggagttcaacaatgagaacacatggacacagggtggggaacatcacacgctggggcctgtcatgggatatgtctttatcagcagtgtgaaaatggaccaatacactaaattggtatcagaagagtggggtgttgctgaaaagatacctgaaaatgtggaaacaattttggaattgggtaacaggcagaggctggaacggtttggagggtttcgaagaaggcaggaaaatgtgtga

SEQ ID NO: 17711 - DNA, 309 bp, Homo sapiens
  SIMILAR (9)..(92): 821254mologous to Homo sapiens Human secreted protein, SEQ ID NO: 6395,accession number G02314,Smith-Waterman Score=114.
atgtggaagcaactttggaactgggtaacagacataggttggaacagtttggagggctcagaagaagacaggaagatgtgggaaagtttggaacttcctacagacttgttgaatggctttgaccaaaatgctgatagtgatacgaacaataaagtccaggctcagacagagctgaggaacttcttgggaactggagcaaagaattctatagaaggaaaaagggggaccagcaagcatcagaagacacaagccccacctccaccactaactaattgtaccccggagcagattgtttatcctcatccgtaa

SEQ ID NO: 17712 - DNA, 516 bp, Homo sapiens; identical to SEQ ID NO: 15797
  SIMILAR (136)..(384): 971254mologous to Homo sapiens NAG13,accession number AF194537,Smith-Waterman Score=418.

SEQ ID NO: 17713 - DNA, 831 bp, Homo sapiens
  SIMILAR (9)..(92): 821254mologous to Homo sapiens Human secreted protein, SEQ ID NO: 6395,accession number G02314,Smith-Waterman Score=118.
atgtggaagcgactttggaaatgggtaacaggcagaggttggaacagtttggagggctcagaagaagacagaaaaatgtgggaaagtttggaacctcccagagacttgttgaatggctttgacaaaaatgctgatagtgatacgagcaataaggtccaggctgaggtgatctcagatggaaataaggaacttattgggaactggagcaaaggtacacagaagtcaagaattgaggtttgggaacctctgcctagatttccgaagatgtatggatatgcctggattcctagacaaaagtttgctgcaggggcagggccctcgtggagaacctctgttaaggcagtgcagaagggaaatgtggggtcgaagccccaccacagagaccctactggggcactgcctagtggagctgtgagaagaggaccaccatcctccagacctcagaatggtagatccactggcagcttgcaccatgtgcctggaaaagccagacctcaacaccagcctgtgaaagcagccaggagggaggccgtgccctacaaagccacaggggtagagctgcccaagaccatgggaacccacctattgcatcagtgtgacctggatattaatatctgcaaattaataaagataatgctccttgtgtctttgtattttcggggtgtgggattactgccatcatttgatggagaagaagttttaactactaagtcagcatgtttccatggtgctacctggttgcaaatctgggatgacataaggcaccagctttctttacaaaccttcaagcttggaggagctgtttcagctgttgtaaatcaagcattgtga

SEQ ID NO: 17714 - DNA, 567 bp, Homo sapiens
  SIMILAR (123)..(1): 751254mologous to Homo sapiens Human secreted protein, SEQ ID NO: 7420,accession number G03339,Smith-Waterman Score=153.
atgtgggaaagtttggaacctcctagagacttgttgaatgcctttgtcaaaaatgctgatagtgatatgaacaataaggtccaggctgaggtggtctcagatggagatgaagaacttgctgggaactggagcaaaggtgactctcgttatgttttagcaaagagactggcagcattttgcccctgccctagagatttgtggaactttgaacttgagagagatgatttagggtatctggtggaagaaatttctaagcagcaaagcattcaaaagttttcagaaagcctgagctcctggggcaagaagtttctcttgggaaacaagatggatgagtactttaaagaagaaatagtggctgcaatgggcctaaggctgaaagatggtaaaataaatataacctcacgtgttgcgtttcaaaatgatggcatagaaggcttccccatgtctcatgatttctacactggaaaaagtgaaatcaaggtggacaaccagctttcccacattttgggtctcttggcagagaacttatccctacctcaaacaacaggaagtattgggagtagttga

SEQ ID NO: 17715 - DNA, 1227 bp, Homo sapiens
  SIMILAR (252)..(76): 611254mologous to Homo sapiens Human secreted protein, SEQ ID NO: 7420,accession number G03339,Smith-Waterman Score=163.
atgtggaagcaacttgggaactgggtaacagggagagcctggaacagtttggaggactcagaagaagacaggaaaatgtgggaaagtttggaacttcctagagactcgttgaatggctttgacaaaattgctgatagtgatatgaacaataaggcccaggctgaggtggtctcagatggagatgaggaacttgttgggaactggaacaaagtaagtttcgagtccatgatgtgttgctatggtcgtttccaggtctctggcacacagaaccccagaaactcaacaactgcccgaagacagtgcacctggagtggcttcagcccccaaggctggtcccgtggatccaggaagccccctgcattgtacagtaattatagccacgcaacccaccacaccacttgtctccatcagcaggatggtccagagagctgcatcctgggcatcttaccaccccgatgctttcctaaggaccccgggcaccttctccagacccccagggtccacgtgatcatttcctctcagacctatgcccacggcactgcctctaccactggatccaatgaccatgggccctcatacacggatgagccatggctctgccacagactgccccagaatcccggtctccggagatatacgacatccattccttcagatggagtgataaagatttggaacggccacacgtacaccctaccggttctgtttctctggagaatcctgactaatacactcactaaggccatgcgtgtggggacaggaggtgccttgaagccagtcatctgtggaatgtcctttgacaccacccacaagggcacacctccagagacaggaggcaagacttcaggggctgctgccttctggatcgggaagggggtcctggatgaactgctgaccctgatttccttaactcccctgcaggaggttccctattcctcgagtgcatctacaggtgcaggccggctctgcaaggacgaatgtgtgctctgcaggacacgtttgaggtctgagggcctgcttcaggtcaagtcggatctcgttcctgttggccccagggctctgccccctctgcagccaggcctccagctgactgcttctgcatccactgcctgcgtgctggctttcctcacctcgcactgccagggtcccccaccgtcctttcgtggggttctcaggagtcctcagggccaagagaggtttgctcgggcccctgcagacaagcaatga

SEQ ID NO: 17716 - DNA, 900 bp, Homo sapiens
  SIMILAR (1)..(243): 801254mologous to Homo sapiens Human secreted protein, SEQ ID NO: 7284,accession number G03203,Smith-Waterman Score=336.
atgagtgaactcccattcacaattgcttcaaagagaataaaatacctaggaatccaacttacaagggatgtgaaggacctcttcaaggagaactaccaaccactcctcaatgaaataaaagaggatacaaacaaatggaagaacattccatgctcatgggtaggaagaatcaataccatgaaaatggccatgctgcccaagaacagggtatcctgtatcccagcctctccagctccagtcacgggtaaaagaggccaaggtacagctcaggccattgtttcagagggtaaaagccccaagcctttgcagcttcactgtgattttgggcctgctggtggacagaaggcaagaattgaggtttgggaacctctgctgcctactgttacatttcccaccttaaaagtccaaggccccaattctttggagaaaatggatgaaggcttgaccccgactgctctgagattggagagggcaccaacatcagggagaagccaggcagtgggggcaggcacttccaagcctgcaggggcaggggggcattcccgggcccccaagtatgcagtgatgcctgagtctgtagcctcagtttcagtttgggcagctgcagctgttcagggaatgagggtggttcctgccttctccatggagtgggaggcccaggtgtgcagccgtgttgctgcagcaacaattggggagttcctgcccgaactaagaaagggcggggctcccacttctcccttgcttctgccagctgcacacaacatgcagccccagctgtacctccctgctacagcctgcgggatggcagcgtcaggctgtctggagtggtcactgtcatcattagcctctttctttctgaatggcagtactcacaatggtgattcgaaggtcttgaaatga

SEQ ID NO: 17717 - DNA, 687 bp, Homo sapiens
  SIMILAR (245)..(295): 821254mologous to Homo sapiens Human secreted protein, SEQ ID NO: 7420,accession number G03339,Smith-Waterman Score=69.
tcacagttctagaggcttggagtccaagatcaaggcaccagcaggatcagtgtctggtgagggctcagtttccagttccaagatggcaccttgttgctgcattctcttgaccccttttagccatggctctggaaggagtggctgggatgcagggcaccaagtccctatactgcacacagcacggggaccctgggcccagcccataaaaccattttctccaaggccttgggcctttactccagttcccaacaagttcctcatctccatctgagaccacctcagcctggaccttatgtccacatcactatcaggcgtttggtcaaagccattcaacaagtctctaggaagttccaaactttcccacattttcatgtcttcttctgagccctccaaactattccaacctctgcctgttacccagttccaaagtcgcttccacattttcaggtatcttttcagcagcatcccactgtactggtgccaatttactgtattagtccattttcccgctgctgataaagacatatctgtgactacaattccttgaggataaggtccatagtgctccctctggtgccagcaacccacaccaggaatgtggctgccatcttcaaggccactgacaacttggagaatagaagatgaccacagaactctcttaccaaaattcagcagttttttcttcat

SEQ ID NO: 17718 - DNA, 1128 bp, Homo sapiens
  SIMILAR (7)..(462): 571254mologous to Canis familiaris triadin isoform 3,accession number AF165917,Smith-Waterman Score=384.
atggtggaaggaaatgcatctacaaccacaactgtgatagacagcaaaaatggatctgtgcccaaatcccccggaaaagtgctgaagaggacagtcacagaagacatagtgacgacgttcagctcccctgcagcctggcttctggtcattgccctgataatcacgtggtcagctgttgccatcgttatgtttgatttagtggattacaaaaacttttcaggcagaggttggaatagtttgaacggctcagaagaagacaggaaaatgtgggaaagtttggaacttcctagagacttgttgaatggctttgaccaaaatgctgatagtgatatgaacaataaggtccaggctgaggtcgtctcagatggagaagaggaacttgttgggaactggagcaaagaattgtatgaagatgaagtgaagtgcaaatcttccaagtctaatagacctaaagccacagtcttcaagagcccacggacaccacctcaacgatggaaccaggaggtcccgttcataagtgaagaaaatccattttccccatccttcacctatggagcatcttgggccatcggacacctcaggaaattcatgatcatgaaagatgaatacatgcttactgggtataaagaggacgagaaagttccatgcaaaggaaatggtaatgaagtgcaaaatgacatggcatatttgcaaatccatcagtggcttagaacagctaaagcacatgggaagggaatgagttggtggggttatggtcagaacagcaacatgatagtctttgtgcttttaaaaaatagttctgagagcgatacagagggcagaatgaaagcagaggccccagctgggaggcagggtgacaaccaaggcagaagtctgaagatcgtgaactgtgccagtggaaagcagagtgaagaggagaatacagatcgaagagattttttggaggaaaaaattgaagatttggagccaaagtcagaagaatccgaggaaacaataacttcacagcaaagatgccacagcattttattaccatcacaaaagtcaattaatgatattttcattgaaatatccacactcgatgattcaacatataaggcgaagagggatgtctttggaaaaggcacttaa

SEQ ID NO: 17719 - DNA, 768 bp, Homo sapiens
  SIMILAR (1)..(309): 951254mologous to Homo sapiens candidate tumor suppressor protein,accession number AF254956,Smith-Waterman Score=512.
atgaactttcggcagctgctgttgcacttgccacgttatcttggagcctcgggttccccgcgtcgcctgtggtggtccccgtccctcgacaccatctcctcggtgggctcttggcgtggtcggtcctccaagtccccggcccactggaatcaggtagtgtcagaggcggagaagatcgtggggtaccccacgtccttcatgagccttcgctgcctgctgagcgacgagctcagcaacatcgctatgcaggtgcggaagctggtgggcactcagcaccctctgcttaccacagccagagacttgttgaatggctttgacaaaaatgctgacagtgatatgaacaataagatccaggctgaggtggtctcagatggagatgaggaacttgttgggaaccggagcaaaggggcggagccctcatggagaacctctggtagggcactgcagaagggaaatgtagggttggagcctccacaagaagtccctactggggcaccgtttagtggagctgtgagaagagggccaccattctccagaccccagaacggtagatccactgacagcttgtaccgtgtgcccagaaaagctgcagccactcaacaccagcccatgaaagcagccaagagggtggctgtaccctgcaaagccacaggggcagagctgcccaagaccatgggagcccaccctttgcatcagcgtgacctgaatgcaagacatggagtcaaaggagattattttggagttttacgatatgactgccctgcttga

SEQ ID NO: 17720 - DNA, 1657 bp, Homo sapiens
  SIMILAR (343)..(480): 951254mologous to Rattus norvegicus neurabin,accession number U72994,Smith-Waterman Score=228.
atgagtgaactcccattcacaattgcttcaaagagaataaaatacctaggaatccaacttacaagggacgtgaaggacctcttcaaggagaactacaaaccactgctcagtgaaataaaagaggatacaaagaaatggaagaacattccatgctcatgggtaggaagaatcaatatcatgaaaatggccatactgcccaaggtgctagagaaaaacgtattaggaagagatatggaaactatgaaaaaggtccaaatcaaacttctagagataagcactataatgaaaaatgagatgaaaaatgtactggatggaattaactgtgcattagacagtgaacaaatgaaggttttcaacacatactccaatgaagactatgacaggagaaatgacgaagttgaccctgtggctgcttcagctgagtatgaacttgaaaaacgtgtagaaaagctggaacttttcccagtggagctagagaaaggaatgtatggagaggaagacagggtgcagctgggttctcgatgggtcagccacaggaataataagtggcctttaaggatgaggttccagacttcactcagagaaagctatgaggatggtcttggtataagtattattggaatgggtgttggagcagatgctggacttgaaaagctgggaatattcgtcaagacagtaacagaaggtggtgctgctcaacgggatggcagaaaaagtggggtattgctgaaaagacacctgaaaatgtggaagcgactttggaactggacaacaggcagaggttggaacagtttggagggctcagaagaagacaggaaaatgtgggaaaatttggaacttcctagagacttgttgaatggctttgaccaaaatgctgatagtgatatgaacaataaggtccaggctgaggtgtcctcagatggagatgaggaaacttgttgggaactggagtaaagatgacccttgttacgttttagcaaagagactggcgtcattttatccctgccctagcaatttgtggaactttgaacttgagaaagatgatttagggtatctggaggaagaattttctaagcagaaaagcatccaaggggtgacttgggtactgttaaaggcattcagttttataggagaagcagagcataaaagtttggaaaatttgcagcctgactatgccatggaaaagaaaatcccattttctggggagagattcaagccagctgcagaaatttgcataagtagcaaggagcctaatgttaatccccaagaaaatggggaaaatgtctccaaggcatgccagagaactttggagcaggccttcccatcacaggctcagaggcctagggggaaaaaatggttttgttggctaggcccaaagcccttctgctgtgtgcagcctagggacttggtaccctgtgtcccagctgctgtagccatgggtaaaggggccaaggtacagcttgtgccatggcttcagaggggagcaagccccaagccttcgcagcttccatatgatgttgagtctgtgggtgcacagaaatcaagaattgaggtttgggaacctctaaccaagatttcagaagatgtacagaaatgcctgaatgtccaggcagaagtttgctacaggggcagagccctcatggagaacctctgctag

SEQ ID NO: 17721 - DNA, 2791 bp, Homo sapiens
  SIMILAR (1569)..(1649): 961254mologous to Homo sapiens putative p150,accession number U93574,Smith-Waterman Score=129.
ttatttctttctcccatgctgggattcaatttctgggattccatgcagaaattgaattccttccatttctgtgatgctgaagtgaacataattgtatttccctggtaccttgttagcaaaaatttggattggctggttgtgttcattccagtacactgccagcgtgggcccagtgtgaacttccatgcaattccactctgtgtagaaggccacccaccccacaacagtccccagagtgtgatgttccccttcctgtgtccatgtgttctcattgtttaattcccatctatgagtgagaacatgcggtgtttggttttttgtccttgtgatagtttgctgagaatgacgatttccaatttcatccatgtcccttgtatacgtggctgccttttctgtttttccttcttctgtcgctaatattccaaattcttgttctctatcagacagtatcttatctacatttggtgccacaaaatcatcactggccatcagagaaatgcaaatcaaaaccacaatgagataccatctcacaccagttagaatggcaatcattaaaaagtcaggaaacagcaggtgactctctgaagccatggtctgagttttacattggccactttcagccacaactggagtggctaggacacagggcaccaagtccctaggctgcacacagcacagggaccctcggcccagtccacaaaaccgtttttgcctcctacgtctccaggccttggtggtcacacagatggtggcatctgcttctttgtggctagcaagagaagaccttctagcattccattgttcatcgtggatagacactatagcagtggtgttgagaggtggcagcagcactgctttgctaaaacaccatgctgttttggttactgtagccttgtaagtaatagtttgaaagtcaggtagtgtgatgcctcccagctttgttcttttggcttaggattgacttggcgatgcgggctcttttttggttcccatatgaacttaaaagtaagatttttcccaatcctatgaagaaagtcaatggtagcttgatggggatagcattgaatctataaatttaccttgggcattatggccatttttcacgatattgattcttcctcctacccatgagcatggaatgttcttccatttctttgtatcctcttttatttcggttgagcaagtggtttgtagttctccttgaagaaggtcctttcacatcccttgtaagttggattcctaggtattttattctctttgtagcaattgtgaactgggagttcactcatgatttggctctctgtttgtctgttgttggtgtataagaatgcttggtgatttttgcacattgattttgtaacctgaagacttttgctgaagttgcttaaccagccttaaagaagattttggggctgagacggaagggggttttctacatatacaatcatgtcatctgcaaagaggggacaatttgacttcctcatttcctaattgaataccctttatttctttctcttgcctgattgccctggccagaacttccaacactatgttgaataggagtggtgatttttgcaatctactcatctgacaaagggctaatatccagaatctacaatgaactcaaacaaatttacaagaaaaaaacaacccaatcaacgggctaaggatatgaaaagacccttctcaaaagaagacattgatgcagccaacaaacacatgaaaaaatgctcatcatcactggccatcagagaaatgcaaatcaaaaccacaatgagataccatttcacaccagttagaatggcgatcattaaaaagtcagggaacaacaggtgctggagaggatgtggagaaataggaacacttttacactgttggtgggactgtaaactcattcaaccattgtggaagtcaatgtggcgattcctcaaggatctagaactagaaataccatttgacccagccatcccattactgggtatatacccaaaggattataaatcatgctgctataaagacacatgcacacatatgtttattgcagcactattcacaatagcaaagacttggaaccaacccaaatgtccaacaatgatagactggattaagaaaatgtggcacatatacaccatggaatactatggagccataaaaaggatgagttcatgtcctttgtaggaacatgggtgaagctggaaaccatcattctcagcaaactatcgcaaggacaaaaaccaaacaccacatgttctcactcataggtgggaaatgaacaatgagaacacatggacaaaggaaggggaacatcacccaccagggcctgttgtggggtgcggggagaggggagggatagcattaggagatatacctaatgtaaatgatgagttaatgggtgcagcacaccaacatggcacatgtatacatacgtaacaaacctgcacattgtgcacatgtaccctaaaacttaaattaaaaaaaaaaagttcaaaaaaaaacaaacaaactcctgagtacagtttttgtgctgagctctcaaagagattacagaatgaacaaatcaagattcttccataagactgaagtgctggttaccaactttcctggttaacattcagcaaaagcattttctctctaagtctggaactaggatcaggatattttcttttgtaaaattcacttgttactttcagaccaaagttgtgttttacacaaatcatgcgatcttggcactcctgattgcttggttgaaaaaatatttctgaataaaaaatattttaaatttgccattttt

SEQ ID NO: 17722 - DNA, 1788 bp, Homo sapiens
  SIMILAR (1728)..(1015): 811254mologous to Escherichia coli Xylulose kinase (EC 2.7.1.17) (Xylulokinase),accession number D90793,Smith-Waterman Score=963.
ttagcgaagtgcatcaggcacgatgaggaaaagattgcaatgagtatggttgaaactgccccgagtaaaattcaggttcgtaatttgaacttctactacggcaaattccatgccctgaaaaacatcaacctggatatcgctaaaaaccaggtaacggcgtttatcgggccgtccggctgcggtaaatcgacgctgctgcgtaccttcaacaaaatgtttgaactgtacccggagcagcgtgcggaaggtgaaattctgcttgatggcgacaacatcctgaccaactctcaggatatcgcactgctgcgtgcgaaagtgggcatggtgttccagaaaccgacgccgtttccgatgtccatctacgacaacatcgcttttggcgttcgtctgtttgagaagctctcccgtgccgacatggacgagcgcgtgcagtgggcattgaccaaagccgcattgtggaacgaaaccaaagataaattgcaccagagcggttactctctctctggtggtcagcaacagcgtctgtcctcctagctcgcatgcctgcaggtctttcatgcggaccacttccgcattgtaccctcgaccgtcggaaccttcctttctggcaatttcatgatcaagtttattgtgtttatcgaacaaggacataaagcgaggattttcgtttttcagacgggatattaaatctcggtattgtttatccggcgctggcgggaaatactgatacagccatgtttcactgatagcgtccccctgacaacgtagatacatccgcatatcgaccggatcagtggagtccgaagtcggataccagtcaaactgaatacgataaccatcgatgggttcaatatagagaatttcgatttgcttcgcttccccactggaaagcgtaatcaccggctcaatgccttttggcgcggcagctttcagatcaccaccaacgaaatcgacggcaaaacgacgcgaatgaacaacggctatatcccgagacatcagcgagaatttgactcctaatttcccttttgaacctccgcctgcaaagactaacgatgaaggatgaatattcgagaaatcagcaatttgctgcaagttacacgctgatacaatcgccgcattttcttccagcgcacggaacaatgtcgctttgttacatttatccgggtcaatggacaagttaataaaggaaggcgcagcgtgataccaggttttaaagcgcattctgtcggagaagatcggcattacgccccacgacccaagcggcacccgactggccatctcttccagcagcgtataggtgtcgatgcctaaacgttcggcaatcagtttttcttcggcacagaaagcatcgcggaaccagcgcatggtgagtccggtaaaaaagcttatagattcagcttgtaccatgccaggaataacatgaggattaacgcgcacgttcatttctgggtctgtcaccggcgcggctaaatttacaactagctgccaaaatgtgctgtcaagaaccgcaggttgtgccggacgcacaacgcctaacccaaggcaaccaagctgcacgtcggctcctccaacgaccaccggattgccgtggcctccttcaaatgataagccgggttccagcgcaaccagaggcgctctaacagctgcgcgctgacgggagccagtttgccgagcagggcgtaaagaataataacgactaccaccacgttcgtttgcaacatactcccacgcattcatcggctgataaccaatgcctgaattggcaaaaatggtttcggcaacaatcat

SEQ ID NO: 17723 - DNA, 465 bp, Homo sapiens
  SIMILAR (157)..(462): 991254mologous to Escherichia coli ribosomal protein L12 (AA 1-179),accession number X15860,Smith-Waterman Score=526.
atgtccttgttcgataaacacaataaacttgatcatgaaattgccagaaaggaaggttccgacggtcgagggtacaatgcggaagtggtccgcatgaaaaaacaaaagctacagttaaaagatgagatgctcaaaatcctgcagcaggagagcgtcaaagaggacacgcgaaaaacggtgcagggtaatgtgatgttgcatcaacgcggctatgccaaaatgttcatgattttcaaagaagatgaacttatcggcgttatctcgtttaatcgtattgaaccactgaataaaaccgctgaaataggctactggctggacgaatctcatcaggggcaggggatcatttctcaggcgctgcaggcattgattcatcattacgcccagtctggtgaacttagacgcttcgtgatcaaatgtcgggtggacaatccgcaaagcaaccaggtcgctttgcgcaatggttga

SEQ ID NO: 17724 - DNA, 1112 bp, Homo sapiens
  SIMILAR (1)..(867): 951254mologous to Escherichia coli K12 putative 2-component sensor protein,accession number AE000485,Smith-Waterman Score=1408.
atgaataaagcgaggacacagaaggtaaaaagcagacaacaaaagggaaaagaacgagaaacagcgcaaaataaaaaaagaaaaccacagagaaaagacaacaagagcgccgaagagaaaaaagaaggcacaaacacaggaagagaaccaaaacaagcacacgcacagacgaaagacacatgcaagcaaagcagagcgctacgagaagaacaacaaaagcaccaatctaaaagaaacaccaagcccgggagacaccagacaagacacaacaaagcaagcaaccaaaacacacaaacacaacacccaccaagcaaagggacagagaaaggacacaaccacacagaaaaaacgaaagacaaaaaagaacaaggcaaacgggacaaacaaaaatcaaacaagaacaaacaaaaaacaaaaacaaaacaaaaagtaaaacccaaccaccaagcaaagccagaaaccaccacccaccacaaaagaacgcacgaggaaaccacgcacgaccgcccccaccccaaaagcaaaacagaccagcgcacacaacgacaacagcacggccacccggcccccaaaagcggacaaaccgcacaccccacacaacgagagaaaacacgaacacaaaaaacacaacagaacacaacaaccacacaaaacaaaacaaccaccaacccaacaaacacagcaacgaaccagaaagcgcacacacaacaaacacaacgcacgcgcacaacaaacacaaaagacaacaccagcaacagaacaagacaacaaaaaagaagacaaacacaagaccgacacaaacgacaacaaagcgaaaggacacaggagcaaaatcggtacctgtcgatgaataccggatttaatatcccgtctgaaaaacgaaaatcctcgctttatgtccttgttcgataaacacaataaacttgatcatgaaattgccagaaaggaaggttccacggtcgaggcagtcgctaaactggccgcagtttgttcaaagtgaagaggacacgcgaaaaacggtgcagggtaatgtgatgttgcatcaacgcggctatgccaaaatgttcatgattttcaaagaagatgaacttattcgcgttatctccgtttaa

SEQ ID NO: 17725 - DNA, 1463 bp, Homo sapiens
  SIMILAR (496)..(954): 961254mologous to Escherichia coli similar to Desulfurolobus ambivalens hypoth. 28.3 kDa protein in sor 3' region,accession number U00006,Smith-Waterman Score=747.
cctcctacctgggttcttttgctccaatttggctccagtaccaccttcaggtggacaccagcatgatctaccgtatccctcctctgcataaaaccctggtgcctcagggacagggcaagcaagaatgggccaatcacaccaatgggcattcttatggaggaaggatgctcatgtgcgtaaagagagtgggtacatgtatagcctatatgaccgcgcctatggagaacgtactacaggacgccgaggccgcggtcgcgggcccatcccacgcccctgatacgtccgacgtcggggccacgctgcttgtgtctgacgggacccacagtgtccgatgcctggtgacgcgggaggccctggacacctcggactgggaggagaaggagttcggcttccgcgggacagagggccggctgctgctgctgcaggactgcggggttcatgtccaggtcgctgagggcggcgcgcccgcagagttctatctccaggtggaccgcttcagcttgctgcccacggagcagccccggctacgggtgcttgagagcacctcacagagtccacatggttgggacaaacattcctatggttaccatggtgatgatgggcattcgttctgctcctcagggactggccagccctatggtcccacattcaccacaggagacgtgatcggctgctgtgtcaacctcatcaatggcacctgcttctacaccaagaatggccacagacttgctcaagggcgcctcgagggaaacgcgctgaagctggacttgctgacttccgaccgggccctggacaccaccgctccccgtggcccctgcatcggtcccggtgccggagagatcctggagcgcggccagcgcggcgtcggggacgtgctgttgcaactcgaggggatctccctaggtcctggggcctctctcaagactctctgtggcctgagtacctggagggcggtaagaagaccttggacagcgtccctgctactggagctgaggtctggggttaagtctggacgtcagtcagcagtcattagccaagccaagagccttctgtccatgggagatggatggcctgaaagggacactccaggattgtctgatggcgagcgtatgattaaacgcacctttaatccggtgcttaagaagagcgtttcattaggtagtaacataagacacatgcttgcagaggaggcaactacagaagaattagacggaacagtgccctgtgctggtgtagccgaaccgccattagccggcgtattggatgcgggcgtatttgaatttgaagaagatgagctgccgctcttttcgcaggaaggcgtagagatggtaatgccgggcgacaacatcaaaatggttgttaccctgatccacccgatcgcgatggacgacggtctgcgtttcgcaatccgtgaaggcggccgtaccgttggcgcgggcgttgttgctaaagttctgggctaa

SEQ ID NO: 17726 - DNA, 1290 bp, Homo sapiens
  SIMILAR (344)..(799): 571254mologous to Vibrio cholerae peptide ABC transporter, periplasmic peptide-binding protein, putative,accession number AE004389,Smith-Waterman Score=470.
atgcaaatgactaagcaaccaccaatcgcaaaagccgatctgcaaaaaactcagggaaaccgtgcaccagcagcagttaaaaatagcgacgtgattagttttattaaccagccatcaatgaaagagcaactggcagcagctcttccacgccatatgacggctgaacgtatgatccgtatcgccaccacagaaattcgtaaagttccggcgttaggaaactgtgacactatgagttttgtcagtgcgatcgtacagtgttcacagctcggacttgagccaggtagcgccctcggtcatgcatatttactgccttttggtaataaaaacgaaaagagcggtaaaaagaacgttcagctaatcattggctatcgcggcatgattgatttagagacatcgcaattaaaacaagggcaacggatacatatgccgatgcggatggtggcgttccatgaaatgccgaatctggcgcttacaatgtcacccgctctggcgacagctatattctggttaacttctataccgatgcggaatgtgccggaccctgcagatgaaggcgcattacagaaatggtggtctgttctaccagacggttatggttttgaggaagactgggcagaagtttatacctcgaaaaatcttccaccagaaagctacccagtcggcgcaccaatcccgtggccatcagataccgttccgtctggttatgccctgatgcaggggcaggcttttgacaaatctgcttacccgaaacttgcagccgcttatccgtcaggcgtgatccctgatatgcgtggctggacgattaagggcaaacctgccagtggtcgggccgtattgtctcaggaacaggacggcattaaatcgcatacccacagcgccagcgcatccagtacagatttggggacgaaaaccacatcgtcgtttgattacggcactaaatccacgaataacaccggggcacatacacacagtgtgagcggctctacaaactcggctggagcacacacacactcactagccaacgtgaacacggctagtgctaactccggtgctggtagtgcatcaacaagattgtctgttgtgcataatcaaaactatgcaacatcatctgctggcgcacatacccactcactgtccggcactgctgcaagcgcaggtgcacacgcgcatactgtcggtattggtgctcatacgcactccgttgcgattggttcacatggacacaccatcaccgttaacgctgctggtaacgcggaaaacaccgtcaaaaacatcgcatttaactatatt

SEQ ID NO: 17727 - DNA, 2980 bp, Homo sapiens
  SIMILAR (593)..(1306): 951254mologous to Drosophila melanogaster Sog,accession number U18774,Smith-Waterman Score=1158.
ggattttgccgatttcggaaccaccatcaaacaggattttcgcctgctggggcaaaccagcgtggaccgcttgctgcaactctctcagggccaggcggtgaagggcaatcagctgttgcccgtctcactggtgaaaagaaaaaccaccctggcgcccaatacgcaaaccgcctctccccgcgcgttggccgattcattaatgcagctgtttcgacaggtttcccgactggaaagcgggcacacacatcgcgatacacttctaagccagacgtggcgcggcctgcaacgatcagggatctatatggatctaattgggatctgtatggacctgattattggatctatccagtggataatgtggataagtgaaaaaccggccaacgtagccggttggaagggagtcgtattattctacgctttcgatgagaagaccatgttcatagcatttaagctcatcgccctcttccgtggcaccagcaaccaccaacgcttaccagcggccctcaccgtcgttaacacccactaccctcccggaatcaactgcacctttaaacagcgtgttgtcattccgcgtctcaatttgggccttcgcctatctatcaaccttatgcccgcacaccgaaaggaggtgatcttcgatgagattccacgtgtgcgcaaaccctctgccgagatcaatgtcctgaagctgtcgtcgcccatttccatacagaatcttcgactgatgtcgcgtggcaaactcctgctgaccgtggagtccaagaagtacccacatctgcgcatccagggacacatcgtgacccgagccagctgcgaaatcttccagacccctgtggcgccgcacagtgccgaatcctcgaccaagagcagcggtttggcgtgggtctacttgaacaccgatggatctctggcctacaacatcgaaacggagcacgtgaacacccgggataggcccaacatcagtttgattgaggagcagggcaagcggaaggccaagctggaggatctgacgccgagcttcaacttcaaccaggccattggtagtgtggagaagttgggtcccaaggtcctcgagtcgctgtatgccggcgaactgggcgttaatgtggccaccgagcatgagacgagcctgatccgtggccgcctagtgccccgtccagtggccgatgctcgggactcggcggaacccattctgctgaagcgacaggagcacacggatgcacagaatccacatgccgtcggcatggcctggatgtccattgacaacgagtgcaatctgcactacgaggtgacgctcaacgccatcaatgaaagagcactggcaacagctcttccacgccatatgacggctgaacgtatgatccgtatcgccaacacagaatttcgtaaagttccggcgttaggaaactgtgacactatgagttttgtcagtgcgatcgtacagtgtccacagctcggacttgagccaggtagcgcctcgggtcatgcatatttactgccttttggtaataaaaacgaaaagagcggtaaaaagaacgttcagctaatcattggctatcgcggcatgattgatctggctcgccgttctggtcaaatcgccagcctgtcagcccgtgttgtccgtgaaggtgacgagtttagcttcgaatttggccttgatgaaaagttaatacaccgcccgggagaaaacgaagatgccccggttacccacgtctatgctgtcgcaagactgaaagacggaggtactcagtttgaagttatgacgcgcaaacagattgagctggtgcgcagcctgagtaaagctgatacggatgtagccttggatgtgcccgtgcccaatgaagaggaagagcgcaacatgaaacattacgctgcgttgctaacgggccgcacctcctatttcctcaagggtgaggaaatgaagtccatgtacaccacctacaatccgcagaatgtggtggccaccgcccgtttcctgttccacaagaagaatctatactactccttctacacctcatcgcgaatcggtcgtccgcgtgccattcaattcgttgatgatgcgggtgtaatcctggaggagcatcaactggagaccaccttggcgggcactctcagtgtctatcagaatgccacgggcaagatctgcggtgtctggcgacgagttccacgtgattacaagcgcatcctgcgcgacgatcgtctccatgttgtcctcctctggggcaacaaacagcaggccgagttggctctgacttggctgggcaagcatgcgcagttcggtactggcaagttaataagtaataggtatactggcaattctgaaaccaagtccaagcgccacctgctttaccggaaccaaaaacaattagtatacagtacactaataggcgtcgcgtggcagccgccgcccccgacagtaaagctaataagccagcggtatcatgggcagtcgtgcaacaagtcccagtaccaactgcgttacaggcaaagcatggcaactagcatacagcataatactactaggcgtagcgtggcaggtcaggagggttctatctctgttggccagaatgtcccttttattactggtcgtgtgactggtgaatctgccaatgtaaataatccatttcagacgattgagcgtcaaaatgtaggtatttccatgagcgtttttcctgttgcaatggctggcggtaatattgttctggatattaccagcaaggccgatagtttgagttcttctactcaggcaagtgatgttattactaatcaaagaagtattgctacaacggttaatttgcgtgatggacagactcttttactcggtggcctcactgattataaaaacacttctcaggattctggcgtaccgttcctgtctaaaatccctttaatcggcctcctgtttagctcccgctctgattctaacgaggaaagcacgttatacgtgctcgtcaaagcaaccatagtacgcgccctgtag

SEQ ID NO: 17728 - DNA, 786 bp, Homo sapiens
  SIMILAR (1)..(423): 871254mologous to Escherichia coli rhamnulokinase,accession number L19201,Smith-Waterman Score=637.
atgtgcagcgaaattcaagctgcgtgtcgggaaacggcgcaaccgatcccggaaagtgatgctgaactggcgcgctgcattttcgacagtctggcgctggtgtatgccgatgtgttgcatgagctggcgcatctgcgcggtgaagatttctcgcaactgcatattgtcggcggaggctgccagaacacgctgctcaaccagctatgcgccgatgcctgcggtattcgggtgatcgccgggcctgttgaagcctcgacgctcggcaatatcggcatccagttaatgacgctggatgaactcaacaatgtggatgatttccgtcaggtcgtcagcaccaccgtgaatctgaccacctttacccctaatcctgacaattcactctacacgacagacaaaggagctttgcgcatgaccactcaactggaacaggcctgggagctagcgaaacagcgtttcgcggcggtggggattgatgtcgaggaggcgctgcgccaacttgatcgtttacccgtttcaatgcactgctggcaaggcgatgatggattgagtctagaggaagattcaacaggagacttagttgctatagccacttggatccctgacaaagtgggcttcagtgcaatagaaaagccacattttccccacaataccttccccccaaacaaaatgaatggaagtcaaagccttatttccaatggagggatgaaagacaaaattgagccatttgaaaaacagtcagaaataaatacggacatcattgagcaacttgcagtgcaccacaaataa

SEQ ID NO: 17729 - DNA, 769 bp, Homo sapiens
  SIMILAR (122)..(766): 991254mologous to Escherichia coli rpiR,accession number X82203,Smith-Waterman Score=1082.
cttctgccgccagcgccagtgccaggtttaccgccgtggacgatttacccacgccgcctttaccggaactcaccgcgataatgttcttcaagtgcagagtaaactgagggcagatggttgtgcgctggaagattatttttctcagtcagaacaggtattgccttccgagttggcttttgatgaagcgccgcaggatgtggtgaataaggtatttaacatcactttacgcaccattatggaaggtcagtcgatcgtcaacgttgatgagatccaccgtgccgcccgctttttctatcaggccagacagcgggatttgtacggtgccggaggatcaaatgctatctgtgctgatgtacagcacaagttcttgcgcattggcgtacgctgtcaggcctatcctgatgctcacatcatgatgatgtccgcttcgttgttacaggaaggagatgttgtgctggtagtgacccattccgggcgaaccagtgatgtaaaagcggccgtagaactggcaaaaaagaacggggcaaagattatttgtataacccatagctaccattcaccgatagcgaaactggccgattatattatttgctcaccagccccggaaacgccgttattaggtcgtaatgcctcggcaagaatattacaactaactttgctggacgctttttttgtctctgtcgcccagctcaacattgaacaagctaatattaatatgcaaaaaaccggcgcaatggttgatttcttctcaccaggcgcgctgaaataa

SEQ ID NO: 17730 - DNA, 4809 bp, Homo sapiens
  SIMILAR (3834)..(3652): 1001254mologous to Escherichia coli L-rhamnose isomerase,accession number L19201,Smith-Waterman Score=323.
atgtttcgtgtaacttggtcgtctggccgaacaggcttaggcaaaaggttattcagaacaccatacgacaacgatgacacagggccttacgcgttcaataaaactcacccaaaagacaattatacctgcaccgtattgttcatcgatgacatgtccgcgagtggtcaaagtctcgacaaagcgcaggataattatcggcaggcaatgaaaaaactctcttcagggcgcggaaatgtgctggcgcaggcagaagcgtttcgcggtttaggagtagaaattaaacgcgagattaatccggatttggctgaacaggcgattcgcctgcaagattgcgtatttgatactcaggaaacaatgaccactacctttactggtaccgtttcttctgcaaatagcggcaattattacaccattttcaataccgataccggtgcggcatttaacaatgttagcctggcgatcggtaattatgtagttttagcgtttagcgcatcggcggcgcagtatgaagatggtaaacagtacaatcaccgcttccggctcaaaacgctcaactaccgttttgcggcaggggctctcccagcggtggctattaagtgccggagcgcgaaatttactgcaacactacagtttccgggaaacgtgcgcgaactggaacatgctattcatcgggcggtagttctggcgagagccacccgcagcggcgatgaagtgattcttgaggcgcaacattttgcttttcctgaggtgacgttgccgacgccagaagtggcggcggtgcccgtggttaagcaaaacctgcgtgaagcgacagaagcgttccagcgtgaaactattcgtcaggcactggcacaaaatcatcacaactgggctgcctgcgcgcggatgctggaaaccgacgtcgccaacctgcatcggagagcaatgagtgaagcactactgaacgcgggacgtcagacgttaatgctggagttgcaggaagcaagccgtttaccggaacgtctgggcgatgattttgttcgcgccgccaatatcatcctgcactgtgaaggcaaagtggtggtttcgggaattggcaaatcgggccacattggtaagaaaatcgccgcaacgcttgccagtaccggcactccggctttttttgtccatccggcagaagcgctgcacggcgatctggggatgatcgaaagccgcgatgtgatgctgtttatctcttactccggtggcgcgaaggaactggatctgattattccgcgtctggaagataaatctatcgcgctgctggcgatgaccggcaaagcgacgtcaccgctgggcctggcggcaaaagcggtgctggatatctccgtagaacgcgaaggcagccgaatgacttacgcgacttcagcacatcaacccggatgtggattattgccacgctcaatgattacgccaacattcgccgcccgcgccactgcgcctggcttgctgagtttgatacgcacccacggcgagttgaagcgtgctaacagcagctccgccacctcttcagccacgcgttccaccagcgcaaaacgcgccccctcgacgtggctgaccaccgtttctgcaatgtcagcggccagcaacgacccacggtccaagcggggggactttcaaccggcccacggggcacccaatgcaaccacattgctgcaagggcaacaaagaggggtcccccgggcacaaaccagggggcccaaggggaacaccgggataacaccaacgggccggcggactcggcatggggcgataagagacccaatagggcgtcccgagcccccctgtagcggcgccatcggcaaaagatccagcgcacaagtccagaaagtggggaaagcccggacccgaccatctcaagataccatgttcgaatatatcccacaacgcgtcatcgtccggcagcaccggtggtcgcgaaccaaacagcgtattgggttcgatgtgtatctggacgtcaactataaatttgtaccatggtttaatctgacagtacgaaatcgctataaccataataactatagttcaacagatttgagcggggaactggataataatgacacctatgaaattggcacctactggaattttaaaatcaccgataaattttcctatacatttgagccacattacttcatgcgagtgaatgactttaatagtagcaacgggaaagatcatcattgggaaatcactaacaccttccgttaccgtattaatgaacactggctcccttatttcgaattgcgctggttagaccgcaacgtcgaaccgtaccaccgcgagcaaaaccagatccgtatcgggacgaacaattttggcttcgcatgcgttatcgctgattgtcggcagcttgattggcgttctcgcgtactacgtcagagaaaaaaacgcacgatgccggacgcgacaaagtcaaaaatgagcgttacggcgtcgccccttctgtcgcttttggccttgcacaacacgccagacggcggcattccgaccatcggtttgccgggctattctgccccatctgcgggaacggcggccctgaatcattccggaaaagttgatatcttcaataaacttcacctgttcctcttcccacactgcatcaagcgcctggcggctttcccggaattacgcccagatgagctactccacggcacgggccagtgcgaacgagtcgtgggcgtactttatggggcggcgaaaattcgtcgcatcccgtcaggcgagccagatgtttctgtgtcactactggtccatatgcgaatatggcacactgcccaagtaatttatagattcaatgccatccccatcaagctaccaatgactttcttcacagaattggaaaaaactactttcaagttcatatggaaccaaaacagagcccgcatcgccaagtcaatcctaagccaaaagaacaaagctggaggcatcacgctacctgacttcaaactatactacaaggctatagtaaccaaaacagtatgccataccaggaccagaaagcgaaccatcctgggcaacaataatcggatcgatacgaacttaggtgttccctgtttgctggcggacggcagtttggccgctttattgacgtcataccaccaggtgtcgattccgttaggcattcgcaaagctgtttataatgggagccgctttgacgtctggagtagcgcatttatcatcatcggctacgccattccggcctttttgtttgccatcctgctgattgtcttcttcgcgggcggcagctatttcgacctgttccctctacgcggcctggtttccgctaactttgattcgctgccgtggtatcagaaaatcaccgattatctgtggcatatcacgctgccggtgctggcgacagtgattggtggctttgcggcgctgaccatgctgacaaaaaactcattccttaatagcgagcaggggcagagtgttccattaaatacgtcgacaactacagacccggctacaacgtccacgccgccagcgtctgtggatactaccgcaaccaacacgcaaacacctgccgtaactgcgccagcaccagctgttgatccgcaacagaatgcggttgtttcgccttcgcaggcaaatgttgataccgccgcgaccccggcaccaacggcagcaacgtgctgccagcagacgctgacgcggggcgagacggtcaacggtgatatctttcataccatccgggatccagatgttcatcaccgatggtgtgccgagttgctcgccaaaataggccgaaacgcgacggctggctttgcagtgatcaatccagaactggcgaatgctgtcgtcggcatgggaaagcatcggcacgtagctcactggcattacgcgctttgcccggataattgcctgtggcctgaatccccccggtcagcgaaccttccgggttttcaaaaccggaaacatcatcgccctgccagcagtgcattgaaacgggtaaacgatcaagttggcgcagcgcctcctcgacatcaatccccaccgccgcgaaacgctgtttcgctagctcccaggcctgttccaatgagttttacatgggaaaataatcgccagatatggtttaaagtccaggatagtcagttgatgaaatatattctgtacaaaggatttattggcatcgacggtattagcctgaccgtcggcgaagtcatgtcttccgccatatcttcgtggtccagacccgcgataccagttcagcgcaggagcgtaaacgatcgggaagtccatctgctcgtcggtcgcgtcgaggttaacgaacagatcgaatacctgatccacaacccaatcaggacgcgcgccaggccggtcaacttaggtgataaccaccatctgctcctcgccgttaggtaccgagctcgaataactaatctggacgaatcggacgtctcggcgtatagcgagagcccaacgggacagacggcgtccaatgcttgcggggggaccgtccgcctatggaaggcgccttacacgattgcccaccgagcctcgcttagccaggggcctgacaatttcagagcgtgcagtgcacacgggtcatcctcgccatattacggagtctgtttccgaaaagtgcacgacgagcccttaggcggaatgactgctccggtgcataaccccagcgtactgcgttctttcaggaatcaatcagttgctgtgcccggttcagccacccacgacccgaatatcgaactgggtgtcgcaggtttgatcggccagattcaacatgccttccgctgtcagcgccagcacaggcgattgactttgcatgtcgtttaa

SEQ ID NO: 17731 - DNA, 895 bp, Homo sapiens
  SIMILAR (461)..(895): 1001254mologous to Escherichia coli OUTER MEMBRANE USHER PROTEIN PAPC PRECURSOR,accession number D90864,Smith-Waterman Score =744.
atgacggcctcagaacgtcacgccagcacagagaatgatattcgcatacggagaacattctccgctgcgaattaccgcctgactttctgcggtttgttgtttgaattgttcatgcgtggtgtaacgaatttcaatggtatttccctggtgtttttgcagctgctcaagaactttagcaacaacgcccgcgccaacggtacggccgccttcacggattgcgaaacgcagaccgtcgtccatcgcgatcgggtggatcagggtaacaaccattttgatgttgtcgcccggcattaccatctctacgccttccggcagttcgatggtaccagtcacgtcagtagtacggaagtagaactgcggacggtagcctttgaagaacggagtatgacggccgccttcatctcttggacagaatgtacacttcagattcgaacttgcacggccttcgtccagcagtttcaccagtgacaaacacaccagcgttgatggctactacagccatgatggttcgctggcgcaggttgacctcagtgcgaactaccatgaagggcaatacacctctgcgggcttgtcgttacagggcggcgcaacgcttactacccacggcggcgcacttcaccgtacccagaatatgggcgggacacgcctgctgattgatgccgatggcgttgccgatgttccggtggaaggtaacggggctgctgtttataccaatatgtttggtaaagccgtcgtttctgacgttaacaattattatcgcaatcaggcgtatatcgacctcaacaaattgccggaaaacgccgaagcaacccagtcggtggtgcaagccacgctaactgaaggagccattggctaccgcaaatttgccgtcatcagtggtcaaaaagcgatggcg

SEQ ID NO: 17732 - DNA, 1150 bp, Homo sapiens
  SIMILAR (288)..(64): 551254mologous to Escherichia coli elongation factor Tu,accession number J01717,Smith-Waterman Score=209.
aggttggcatgccgcaagggtgccttctagaggttcagggtaccaccctttttgatgttttcgcccggccattcccctctttacgccttccggcagttgaatggtcccagtcccgccagtagtacggaagtaaactggcggccggtagcctttgaagaccggagtatgacgcccgccttcatctttggacagaatgtacacttcagatttcaactttggtgtgcggctgaatggtgcccggctaagccagtacctgaccacgttcgatttcttcacgtttgataccacgcagcagaacacatacgttctcaccagcacggccttcgtccagcagtttgcggaacatttcaacgccagtacaggtagacttctgagtctctttgataccaacgatttcaacttcttcaccaactttgatgataccgcgttctacacgaccggtaacaacggtaccacgaccggagatggagaatacgtcttcgatcggcagcaggaacggcttgtcaatcgcacgctctggttccggaatataagaatccaggaagccagccagttccaggattttcgcttcccactctgcgtcgccttccagcgctttcagagcagaaccacgaacgatcggagtgtcgtcgcccgggaagtcgtactgagacagaagttcacgaacttccatttcaaccagttccagcagctcttcgtcatcaaccatgtcgcatttgttcaggaacacgatgatgtacggaacgcctacctgacgacccagcaggatgtgctcacgagtctgcggcatcgggccgtcagtcgcagcaactaccaggggggatcctctagagagatcgttatggagatcctctacaacatctttaccgtgttttttaaccaggtcatgaccaatgccccgttgttgctgggtattgtgacctgtctgggctacatcctactgcgcaaaagtgtcagcgttattattaaaggcacgattaaaaccataattggtttcatgttgttgcaggcagggtccggcatcctcaccagcaccttcaaaccggtggtggcgaaaatgtccgaagtctacggcattaacggcgcaatttccgatacctacgcttcaatgatggcaaccatcgaccgcatgggcgatgcctatagctgg

SEQ ID NO: 17733 - DNA, 2734 bp, Homo sapiens
  SIMILAR (2081)..(2707): 1001254mologous to unidentified RECT,accession number A95099,Smith-Waterman Score=1063.
atggaaggtcagtcgatcgtcaacgttgatgagatccaccgtgccgcccgctttttctatcaggccagacagcgggatttgtacggtgccggaggatcaaatgctatctgtgctgatgtacagcacaagttcttgcgcattggcgtacgctgtcaggcctatcctgatgctcacatcatgatgatgtccgcttcgttgttacaggaaggagatgttgtgctggtagtgacccattccgggcgaaccagtgatgtaaaagcggccgtagaactggcaaaaaagaacggggcaaagattatttgtataacccatagctaccattcaccgatagcgaaactggccgattatattatttgctcaccagccccggaaacgccgttattaggtccccagaactttagcaacaacgcccgcgccaacggtacggccgccttcacggattgcgaaacgcagaccgtcgtccatcgcgatcgggtggatcagggtaacaaccattttgatgttgtcgcccggcattaccatctctacgccttccggcagttcgatggtaccagtcacgtcagtagtacggaagtagaactgcggacggtagcctttgaagaacggagtatgacggccgccttcatctttggacagaatgtacacttcagattcgaacttggtgtgcggcttgatggtgcccggcttagccagtacctgaccacgttcgatttcttcacgtttgataccacgcagcagaacacctacgttctcaccagcacggccttcgtccagcagtttgcggaacatttcaacgccagtacagaactaaacataaagttagatcttgtctttgaatcaatggctaggcatttcgggttcccgttcaatgaccatccccagggcgttggctttttgattctggagacgatgtgcagcgaaattcaggctgcgtgtcgggaaacggcgcaacggatcccggaaagtgatgctgaactggcgcgctgcattttcgacagtctggcgctgctgtatgccgatgtgttgcatgagctggcgcagctgcgcggtgaagatttctcgcaactgcatattgtcggcggaggctgccagaacacgctgctcaaccagctatgcgccgatgcctgcggtattcgggtgatcgccgggcctgttgaagcctcgacgctcggcaatatcggcatccagttaatgacgctggatgaactcaacaatgtggatgatttccgtcaggtcgtcagctccttccgcgaatctgaccacctttacccctaatcctgacaattcactctacacgacagacaaaggagctttgcgcatgaccactcaactggaacaggcctgggagctagcgaaacagcgtttcgcggcggtggggattgatgtcgaggaggcgctgcgccaacttgatcgtttacccgtttcaatgcactgctggcagggcgatgatgtttccggttttgaaaacccggaaggttcgctgaccggggggattcaggccacaggcaattatccgggcaaagcgcgtaatgccagtgagctacgtgccgatctggaacaggctatgcggctgattccggggccgaaacggcgtaatttacatgccatctatggatcaaaggttttcgcggtagcgggatgcgtcgtgttgatgacgaccatgcccgacagttgcaattcgtggcaaaaatgcaggaataaaacaatgaacaagaagattcattccctggccttgttggtcaatctggggatttatggggtagcgcaggcacaagagccgaccgatactcctgtttcacatgacgatactattgtcgttaccgccgccgagcagaacttacaggcgcctggcgtttcgaccatcaccgcagatgaaatccgcaaaaacccggttgcccgcgatgtgtcgaagatcatccgtaccatgccaggcgttaacctgaccggtaactccaccagtggtcagcgtgggaataaccgacagattgatattcgcggtcggtttgatgggattgtgggtatttttgctctcatcggtgattggtacccggcaatgtatggtaccgagctgaatatgcaaatgactaagcaaccaccaatcgcaaaagccgatctgcaaaaaactcagggaaaccgtgcaccagcagcagttaaaaatagcgacgtgattagttttattaaccagccatcaatgaaagagcaactggcagcagctcttccacgccatatgacggctgaacgtatgatccgtatcgccaccacagaaattcgtaaagttccggcgttaggaaactgtgacactatgagttttgtcagtgcgatcgtacagtgttcacagctcggacttgagccaggtagcgccctcggtcatgcatatttactgccttttggtaataaaaacgaaaagagcggtaaaaagaacgttcagctaatcattggctatcgcggcatgattgatctggctcgccgttctggtcaaatcgccagcctgtcagcccgtgttgtccgtgaaggtgacgagtttagcttcgaatttggccttgatgaaaagttaatacaccgcccgggagaaaacgaagatgccccggttacccacgtctatgctgtcgcaagactgaaagacggaggtactcagtttgaagttatgacgcgcaaacagattgagctggtgcgcagcctgagtaaagctggtaataacgggccgtggtactcactggaagaggtaccgagctga

SEQ ID NO: 17734 - DNA, 732 bp, Homo sapiens
  SIMILAR (1)..(405): 921254mologous to Escherichia coli YbaO,accession number D82943,Smith-Waterman Score=651.
atgttagataaaattgaccgtaagctgctggccttactgcagcaggattgcaccctctctttgcaggcactggctgaagccgttaatctgacaaccaccccttgctggaagcgcctgaaacggctggaggacgacggtatccttatcggcaaagtcgccctgctggatccggaaaaaataggcctcggcctgaccgcttttgtgctgataaaaacgcaacatcacagcagcgaatggtattgccgctttgtcacggtggttaccgaaatgccagaagtgctggggttctggcgcatggctggtgaatacgattatctgatgcgcgtccaggttgccgacatgaaacgctacgacgagttttataagcgtctgctggtatttccgtcgggaatggcgtcgctatctcggggctgtcgccttgcttgtcattatcgcgatgctgcaactggttccgccaaaagtggtggtattgttgtcgatggcgtgacagaacaacacttactaccggtaccgagctcctgcggtgccgctgacggctgccagcacgccgacgccgctgacgaatattttgtaagtaatggcaaactgtcagctcatcgatatccagtcgtcgcgtatccggtgaacaaaacgcaaaatcgtctgccaaatttttctccagcagcagaatactctcgttatgcagcgatattttttgctgttcatgataaatatcgaatgaacgacgaatga

SEQ ID NO: 17735 - DNA, 2883 bp, Homo sapiens
  SIMILAR (2282)..(2253): 901254mologous to Escherichia coli K12 putative permease,accession number AE000463,Smith-Waterman Score=48.
tcactcatagatctcgttatccgggttaagacgacgacgactaataattcgcagcagacgccacagtacccatgccagcaatatcacactgatagccgccagcaccgccagcagaatcggatggtttgccagcgcataccacacgcgctcgaaccacggcagatgacctacgtaataaacgtcgccaacacgtaggctgttgataccggactcgcggatcaccgcgaccgaaccgaacatggtggcgcgtttgccgctatcgttcaccgcatcgttaagcatttcataaccgcgtgggctatctgccaacagcgcaatcacgctgcgctggtcgttatacggcgactggaagccaatcaccgccgccatcgcaccggaagaggtcagcgttgaccgggtttctgccgcgcgatcgctctcgtccggcacaatgccggggaacggggtctggcgcatcggtgttttcacccagctttcggtcgcctgcaccaataggtcgatctgcttatcgtctttcagtttgtccgggataccaccgatgatcatgatgtcggcatctttgccctggcggctaacgaccgtgcagctttcgataatattctcgacacccagcgctatgcgtgcgtccagctctttttcaccatcctggcggatatgctcatgaattgccatcgcccgggaggggagtcggtcttcatctatttctatttttttgccgcgctctttttcttcgctctcaacttcaatttcgtcgctgtgttgatcaattttgtcgttgtccatggtctcttctcttgaattagcacgtatagctaaagcgtagcggcttttttgctcgcaactgacgggagttactctgaaaatgtagaaaaggctgcgtttgcctttttctgtttctatagaatcaagtagccttagccacagccccagattcctggagatggccccgcactcactcttcttgcaggaggtgcatttgcactttttgcacttgcaggagccggcgcaggcgcaggagccaccacgcgccttgcggatgatgagattcgggcgcgtatacagtcggcgacgacgcctgatgagttgctctcggcgctggatgacaagggaggcacgcaaccttctgcctctttttccaacgcgccaactatcgtctgcgtaacggcctgtccggcgggtattgctcacacctatatggctgcggaatatctggaaaaagccggacgcaaactcggcgtaaatgtttacgttgaaagccaatggcgctggaagaaacgccgtgcgtttacgggcttctatctcttccacaatgcggacatacatcttctcgttcaggctgtagaagcaacccatcgccacaatggtgactaccgccagtgcgcttgggtagatgaagatcaactggcgtaacccttcaatggtgtggtcagcctgtgcgacgttcggcacatagccaatttgcgtcagcatccagccggggaagaaaccagccagcgcctgagacactttgcgaaagaaggtaaaaccggtgtagaccgttccttccgaacgcacgccggtgcgccactcgccgtactcgacggtgtcggaaaccagcgcccagttcaggctgttaacaaacgctgagccaaagaacgccaggcaggagaacgccacgaagctgaccgaaccgccgccgaagaaatagttgagcagatcgcccagcacccaaatcagcaggccgccgatataaactttcttcttgccaaaacgtctgactgaggcaggcatcaggaatacgccgatgcaaatacagcccatgctgaaaaatcccatatacgacaacaggatgggatcgttaagcacgtactgggtgtaatagacctggatggcgaggttaaacgcccctaaagtgcagaggttggcaatgcacagaatgaacagcgggcggttacccgcaattgcgcggaaagattgcagcaggcccggcttttgcgccggattagcaggctgggtttcgacataacgctctttcacgcccgagtagcagatccacataaacagcaggccaaacagtgaaaacagcgtggcggcgaagatatagccaagttgctgattaccttcgataagattcataactggcacgaatcccaccgtgcacagcagcaggcccagcgtagcgccgccctgacgccatgccgccagtgaggcgcgttcgttggggtttttggtgatagcgggaaccattgcgccgtaggagcagttcatcatgcttttggaccgatcttgcgtcgggaatctacatcctgctgatatcgacgctagtctggccggcgcatgcaatgaaccacggctaaaatccgccagctttgcggaaaattcagccactttcgccgccggaagcgccacccgcagcagaacgaatgcctgataatcactgttgataattttgccgtcacactgccccagcaacgcttcaatgccggttaactgatgatattcacattgcaaagtatattcggttaatggcgtcttgcgttgggtcgttagctggcgcagcgcctgattcacgccgccgccatacgctttcactaacccaccggtgccaagcaatatgccgccgtagtagcgcactaccacagcggtaatttccccgacgccgctgcccattagctgggcgagcatcggtttacctgccgttcccgccggctccccgtcgtcagagaaacccagctgttgagaatcatccggcgcacccgcgacccacgccacgcaatggtgccgggcatcggggtgttctgcccgcaccgattcaacaaacgctttactgccaacaataaaatgccacggctgggagttggtgctggatgggctgtattgcagtagcgttttgatcttgctcat

SEQ ID NO: 17736 - DNA, 1736 bp, Homo sapiens
  SIMILAR (359)..(1021): 991254mologous to Escherichia coli multidrug resistance-like ATP-binding protein Mdl,accession number U82664,Smith-Waterman Score=1108.
tcacctcgattacggattcaatgtccgtacccgtagatccggaagaatggggactccgtgtggccgcttttgttatgatacttgcgcaacatcacagcagcgaatggtattgccgctttgtcacggtggttaccgaaatgccagaagtgctggggttctggcgcatggctggtgaatacgattatctgatgcgcgtccaggttgccgacatgaaacgctacgacgagttttataagcgtctggtaaacagcgtgccggggctgtcggacgtcacttccagcttcgcgatggaacagattaaatacaccacttctttacccatcgaataaatatccagaatcaggtcaggacacaacgcgtgcgattatttgctcaattaagctggtatttccgtcgggaatggcgtcgctatctcggggctgtcgccttgcttgtcattatcgcgatgctgcaactggttccgccaaaagtggttggtattgttgtcgatggcgtgacagaacaacactttactaccgggcagatcctgatgtggatcgccaccatggtgctgattgccgttgtggtttatctcctgcgttacgtctggcgggtattgctgtttggtgcgtcttatcaactggctgttgaactgcgtgaagattattaccgtcagctaagccggcagcatcctgagttttacctgcgtcatcgcaccggtgacctcatggctcgtgcgaccaatgacgtcgatcgcgtcgtgtttgccgccggagaaggggtgctgacgctggtggattcactggtgatgggctgcgctgtgttgattatgatgtctacgcaaattagctggcagttgaccttattttccctgttgccgatgccagtgatggcgatcatgattaagcgcaacggcgatgctttgcatgaacgctttaagctggcacaggcggcgttttccagtcttaatgaccgcacccaggaaagcctcaccagtatccgcatgatcaaagcctttggtctggaagatcgccagtcggcgtattgccgcgagcagtccacgtatttggcatcaatgaagagacggacgcctgttagtcgaacatttgttcatccggtgatgaaaagcccttacggactgacgctcaattcccggagaataccgggtccacgcctggacgggagaacatcgatgagtcacatcacaacggaagatccagcaactttacgcctgccctttaaagagaaactctcttacggtattggcgacctggcctctaacatcctgctggatatcggtacgctttatcttttgaagttttataccgacgttctggggctgccaggcacctatggcggcattatctttttgatttcaaaattctttactgcgtttaccgatatgggtaccggcattatgttggattcccgacgcaagatcggtccaaaaggtaagttccgtccttttattctgtatgcgtcattcccggtcaccttactggcgatcgccaactttgtcggcacaccgtttgatgtcaccggtaaaacggtgatggccactattctgtttatgctttacggactgtttttcagcatgatgaactgctcctacggcgcaatggttcccgctatcaccaaaaaccccaacgaacgcgcctcactggcggcatggcgtcagggcggcgctacgctgggcctgctgctgtgcagcggtggattcgtgccagttagattataggatctgtgatcggatatga

SEQ ID NO: 17737 - DNA, 964 bp, Homo sapiens
  SIMILAR (264)..(824): 1001254mologous to Shigella flexneri VacC,accession number D26469,Smith-Waterman Score=1007.
aaacaaggggggcggggcgctgctgacgaacttgcacttgccaaagtcgacgctgaatatgctgggttccgcctttgccggttatcaacacacgcatgaactgcctatagagcagcggtataagagaaatatacgcttttttagtcacggggatgccatgtttatcacgttcaatccgcaggcaattaatgagcgcgtcggggagtaattccgcggcgctggtttaaaacgttggactgtttttctgacgtagtggagaaaaaatgaaatttgaactggacaccaccgacggtcgcgcacgccgtggccgcctggtctttgatcgtggcgtagtggaaacgccttgttttatgcctgttggcacctacggcaccgtaaaagggatgacgccggaagaagttgaagccactggcgcgcaaattatcctcggcaacaccttccacctgtggctgcgcccgggccaggaaatcatgaaactgcacggcgatctgcacgattttatgcagtggaaggggccgatcctcaccgactccggcggcttccaggtcttcagccttggcgatattcgtaaaatcaccgaacagggcgtgcacttccgtaacccgatcaacggcgatccgattttcctcgatcctgaaaaatcaatggagattcagtacgatcttggttcggatatcgtcatgatctttgatgagtgtacgccgtatcctgctgactgggattacgcaaaacgctccatggagatgtctctgcgttgggcgaagcgtagccgtgagcgttttgacagtctcggaaacaaaaatgcgctgtttggtatcatccaggcacttacgattccaaccaacaaagtgagctttcgatactctttcgtggaaatgaaagaaagcgttgtgcctgccgcaatgtaagccctgtttgctgcaatacaaccgcatcaatatgcgactgttttgccacccagtga

SEQ ID NO: 17738 - DNA, 341 bp, Homo sapiens
  SIMILAR (192)..(335): 971254mologous to Escherichia coli pot. cell division protein (fic); putative,accession number M32354,Smith-Waterman Score=236.
ccttgcggagtgaggtataacaagggtagacgtgactggcgaaatcttcgccagtcggtaacagctttacgacagctatcacgaatttacgggcaagggttacagagatagttgaaaaagcggctaacaatttgccagccgttgtggaaatgatgattacatcgctgcgcgataaatcgccacaatttcttcggctgaacatccgccagcagcagcggctggaacaggccgcttacgaaatgacggcgctgcgtgctgcgaccattgagcttggtccgctggtgcgcggtttaccgcatttgcgaactatccatcgccagctgtatcaggaaatagagtaa

SEQ ID NO: 17739 - DNA, 1458 bp, Homo sapiens
  SIMILAR (238)..(510): 921254mologous to Escherichia coli sn-glycerol-3-phosphate acyltransferase,accession number K00127,Smith-Waterman Score=449.
atgctaaagtcggttccaggtgaagcccagaatacggtcagtcaggcgaatcatctcgtaagagaaattcgccgcaatctcttccatcagtgcaatcgcgttctgctgcgctttttcatgggagatttttttgctgcgcgcttcatcttctaccgctttggcaatggcgcgggaggcgagcagcttattaaacagatcctgacgagcaggcaaacgtgggcctacggcagccagacgttgacgggcaaagtgcatacgcgctatgtgttcattcacggcgggccgcgtgtgttcacctattacacgccgaaagaagagtctattaagctgttccgcgactatctcgatttgcaccgtagcaacccaaatctggatgtgcagatggtgccagtgtcggtgatgtttggtcgcgcgccggggcgtgaaaaaggcgaagtgaacccgccgctgcgtatgcttaacggcgtacagaaatttttcgctgtactgtggctcggtcgcgacagtttttcagggattgtcggtgccgcgctactgatggcgggttgtagctccagcaacgaattgagtgctgccggtcagagtgtacgcattgtggacgagcagccaggcgcagagtgccagctgattggtactgcgacaggaggaacaatgtctcaggttcagagtggcatttgccagaacattcgccgcgcggcgatttggatcgaagccaacgtgaaaggggaagttgacgccctgcgtgcggccagtaaaacatttgccgacaaactggcaacttttgaagcgaaattcccggacgcgcatcttggtcaacaatctgaggccagccttgatatcatgcgtaaccggctgaacatccgccagcagcagcggctggaacaggccgcttacgaaatgacggcgctgcgtgctgcgaccattgagcttggtccgctggtgcgcggtttaccgcatttgcgaactatccatcgccagctgtatcaggatattttcgactgggcagggcaacggcgtatcaccctgataaaccatgggtttgtgcccaagtcaacgacagttgtggaaacgaacggaccgagcgaccaaagcattgcaatgcgcaggccaggtcagactattagtaggatccaccaagtccagaaaaagctgggcatcgagctcaccaactgttatgaacacagcggcttaccagacattaaaaacgtcaccggtattttaatatgtcggcaaacccacgcccgccctgcgcgccttgccaggctcatcttcaccgccaataaaaccaatacgattaacgccctggttgatatagaagtcgatgatttctttactgatgcgtgccagatcgattgttgttttgagacagggtctcactccgttctcgccaggctcggaggggctagtgcgcaagatctccagctcgacgcaacctctgcctcccatggttcgaagtga

SEQ ID NO: 17740 - DNA, 1671 bp, Homo sapiens
  SIMILAR (1048)..(1656): 1001254mologous to Escherichia coli K12 putative oxidoreductase,accession number AE000459,Smith-Waterman Score=1088.
atgccatgcacgtttatcgaaaggaacatactggactatttcaccatcacggcgaatcaaacacatcccatcttgcgcattgccgtcgccggttatgccatgccagcgccagagttgcttactcgccatgcggcatccccagtacgcggattaactcttcaaaggtggttaagccttgctctacggccaggcagccgttttcaaaaagcgtacgcatacccgcctgtcgtgcgccgtacgaccataaaaaccgtggtagcaatgtacacaaccgggtgcctgccagtggggcagcggcgatggccatacattgtctggaatgtggatgggctccccttgctgccggcgacaatgtgggcaaagtttgcgtaccagacgctgggctattaccagcggagacaacaccaggtgacccagttgcgccgcctgaacatcaaaccggttatcctggcagctgacggctctgagccagatctttctcagcaagccctgactgaaaaaggcgtgctgttcaactctggcgagttcaacggtcttgaccatgaagcggccttcaacgccatcgccgataaactgactgcgatgggcgttggcgagcgtaaagtgaactaccgcctgcgcgactggggtgtttcccgtcagcgttactggggcgcgccgattccgatggtgacgctggaagacggtaccgtaatgccgaccccggacgaccagctgccggtgatcctgccggaagatgtggtaatggacggcattaccagcccgattaaagcagatccggagtgggcgaaaactaccgttaacggtatgccagcactgcgtgaaaccgacactttcgacacctttatggagtcctcctggtactatgcgcgctacacttgcccgcagtacaaagaaggtatgctggattccgaagcggctaactactggctgccggtggatatctacattggtggtattgaacacgccattatgcacctgctctactttcgcttcttccacaaactgatgcgtgatgcaagcatgactaaccctagctcggtaccccgtgccggtgggcctgcgctgttgttcgaaaaccctaaaggctactcaatgccggtgctgtgcaacctgttcggtacgccaaagcgcgtggcgatgggcatggggcaggaagatgtttcggcgctgcgtgaagttggtaaattattggcgtttctgaaagagccggagccgccaaaaggtttccgcgacctgtttgataaactgccgcagtttaagcaagtattgaacatgccgacaaagcggctgcgtggtgcgccctgccaacaaaaaatcgtctctggcgatgacgtcgatctcaatcgcattcccattatgacctgctggccggaagatgccgcgccgctgattacctgggggctgacagtgacgcgcggcccacataaagagcggcagaatctgggcatttatcgccagcagctgattggtaaaaacaaactgattatgcgctggctgtcgcatcgcggcggcgcgctggattatcaggagtggtgtgcggcgcatccgggcgaacgtttcccggtttctgtggcgctgggtgccgatcccgccacgattctcggtgcagtcactcccgttccggatacgctttcagagtatgcgtttgccggatctggtacctgctga

SEQ ID NO: 17741 - DNA, 1083 bp, Homo sapiens
  SIMILAR (616)..(1080): 761254mologous to Bos taurus mat. b-subunit (AA 1- 214),accession number X06088,Smith-Waterman Score=595.
atgcctttcaaggggcagatccaagccccagtgggcacaggggaagggaagggctcagcgggaagtcttgaacgccagatggcaaaaacacccccagggctctggaaaattaagggtaaaggggcatttcaggctcactctttcccagctgaagaggatcatcataatgaagaaagacaaacaaagaaaaaaagaaaaacaaaacaccgacataaattttctgaagaattattgcaggaacttaaggaaatatttggagagaacggttatcctgatttcaccactaggaaaacactggccaacaaatttgattgtccggttaacgtgataaacgcatacttcaaaaagaattctggagaaacagaattcagtataacgagagtcaaaaggatatcctccaatcatggtttcaacatgaccctttccctgataaagctgccagagaacaactggccaaagaaattggggttccagaatctaatattcagtttttttcaccatccgcatctggaaatcactgaaattgctgaccgcactttgcgtgccggtgggcctgcgctgttgttcgaaaaccctaaaggctactcaatgccggtgctgtgcaacctgttcgctggtgtaacaggactctatgtgctcggaattgggcttattttgtatgctttatccaaagaaatatatgtgattaccacagagaccttctctaccatatcagtagtagggttacttgtctatgcaattaaaaaatatggtgcctctcttgcagaatttgctgataaactcaatgagcaaaaacttgtccaactagaagaggcgaagcaggcttccatcaaacaaatccaggatgcaactgatttggagaagtcacagcaggtactgccattactttttgatgtgcagaggaaaaacattcctatggcttcagagtttacttaccaggaacagctgtatagagtacataaggaagtaaagaattgcctagactatcatatatccgtgcagaacatgatgcatcaaaaggaacaagagcacattataaattgggtggagaagcatgtggttcagagcatctctgcacagtag

SEQ ID NO: 17742 - DNA, 2697 bp, Homo sapiens
  SIMILAR (79)..(648): 921254mologous to Escherichia coli hydrogenase-1 small subunit (hyaA) precursor,accession number M34825,Smith-Waterman Score=956.
atgcgggcaggattcacaagtaacgtcctgaccttcctgacgtgcacgagtcacttcctcaacaccttccgggctgctgacgtggcaaacgtgcagacggcaaccagcaactttcgccagatacaagtctttgaagacatcatcacgcaatacaatggcaaatatatcctcgcagtagaaggtaatccgccgctgggcgagcaggggatgttctgtatcagcagcggtcgaccgtttattgagaaactcaaacgtgccgctgccggagccagcgcgattatcgcctggggaacctgcgcgtcctggggctgcgtgcaggccgcgcgacccaatccgacgcaggcaacgcctatcgacaaagtcatcaccgacaaacccattatcaaagtacctggctgcccgccgatcccggatgtgatgagcgccatcattacttacatggtgacctttgatcgcttgccagatgtcgacagaatgggccgtccgctgatgttctatggtcagcgaatccacgataaatgctatcgccgcgcccacttcgacgccggagagttcgtccagagttgggatgatgacgctgcccgcaaaggttactgcctgtacaaaatgggctgcaaagggcctaccacctataacgcctgttcctcacacgctggaatgatgggtctggtcacggctgctggctggcggaaatggtttggatcggggtcgtttcagcggtgtcgattcgagttggataagctatctatccagcgccatcagcgttaccatggcaccagctacaaccttgaaccagacatcaaaagcagccctggcggcttgcgcgatatccacactctgcaatgggtggcccgccgtcattttggcgcaacatcgctggatgaaatggtcgggtttggcttcttaacctcagcggagcgggcggaattaaacgaatgtctgcatatattgtggcgtattcgctttgccctgcatctggtcgtcagccgttacgataatcgcctgttattcgatcgccagcttagcgtcgcccagcgtctgaattacagtggtgaagtgaactcaaccagatgctgctgcaactgttcgatgaaaccatcctcgccctttccgccgacaaaaaaccaccgtccaatcgacgatgagtttaagctacgcggtacgctaatcgacctgcgtgatgaaaccattattatgccgccagccggaagccatcttgcgtatgttctccaccatggggcacaacagggcgacaaccgcttttactccaccacgttggcccatttcgccatgcccgtggcctttggaaacaccgttgtgtatattccggaagcccaaaactgttttgagcatcttggtcaccccggtgagcgacttagctctaaagattttttctacgacgacggtgagtttgccgccattcttgaggatgtgcgcacggtccgcgaattaggttttcctggactggtgacgggcgttctcgatgttgacgggaatgtcgatatgccacgaatggaaaaaataatggctgctgccggtccgctggcagtgacttttcatcgcgccttcgatatgtgcgctaaccctttatatacactcaataatcttgcggaattgggcattgcccgggtactgacatcagggcaaaaatcagacgcactgcaaggtttatcaaaaattatggaacttattgcccatcgtgatgctccaatcattatggccggagcaggagtccgtgcagaaaacctgcaccacttcctcgatgccggagtgctggaagtccatagctccgcgggagcgtggcaagcctcaccgatgcgttatcgtaatcaaagattgtccatgtcatcagatgaacacgcggaccagtattcgcgttatatccctgcgtctgacatctacgaagacgaaggcattttaatgatcaccccagcggcaaccgcgccggagctgaccgcccgtggctatcagctgatcctgcgcaccaccggcctggactccgaccaggggccgacggcggcgaaatatattcttgagaaagtgaaaccgcagcgtattgctatcgttcacgacaaacagcaatacggcgaaggtctggcgcgagcggtgcaggacggcctgaagaaaggcaatgcaaacgtggtgttctttgatggcatcaccgccggggaaaaagatttctcaacgctggtggcgcgtctgaaaaaagagaatatcgacttcgtttactacggcggttatcacccggaaaggggcaaatcctgcagccggcaacaaccgtcatttccattgagcccgccaatcctgatgtggtctatattcccaactacaacccaaccgtggtttacgggaactgggccaatactgcgtatccgtcggtttatctgccaccaccagcctgagaaccgtttgttgacagctttgtacgcggattcggctatagcatgggcgttgctaccacgtacgcactattcagcagcatcgactgggacgacgacaatcatgaccatcatcatcatgacaatgatgattatcatcaccacgatggcggtcatcgtgacagtcatggctggcaacacaacaggcgacaacattaaaatcgacatcaaccaaattcaacccgatcaccccgggaaccatcttactcgaaaagaaatatggcattggcgggacaaatccaaactaaccgcaatgggg

SEQ ID NO: 17743 - DNA, 901 bp, Homo sapiens
  SIMILAR (248)..(835): 891254mologous to Escherichia coli K12 putative oxidoreductase,accession number AE000459,Smith-Waterman Score=928.
atgccatcaaagaacaccacgtttgcattgcctttttcaggccgtcctgcaccgctcgcgccagaccttcgccgtattgctgttgtcgtgaacgatagcaatacgctgcggtttcactttctcaagaatatattcgccgccgtcggcccctggtcggagtccaggccggtggtgcgcaggatagctgatagccacgggcgcatcgcaaagagaacgccgtataatgggcgcagattaagaggctacaatggacgccatgaaatataacgatttacgcgacttcttgacgctgcttgaacagcagggtgagctaaaacgtatcacgctcccggtggatccgcatctggaaatcactgaaattgctgaccgcactttgcgtgccggtgggcctgcgctgttgttcgaaaaccctaaaggctactcaatgccggtgctgtgcaacctgttcggtacgccaaagcgcgtggcgatgggcatggggcaggaagatgtttcggcgctgcgtgaagttggtaaattattggcgtttctgacagagccggagccgacaaaaggtttccgcgacctgtttgataaactgccgcagtttaagcaagtattgaacatgccgacaaagcggctgcgtggtgagccctgccaacaaaaaatcgtctctggcgatgacgtcgatctcaatcgcattcccattatgacctgctggccggaagatgccgcgccgctgattacctgggggctgacagtgacgcgcggcccacatagagagcggcagaatgtgggccagtttagagaacatcttcaggctcgaaagtgtgacttacccgggatcacacacaggctggcagtgaagaatccaggggtacgtagccagggttcgtacgagggggtaatcaaggcggattaa

SEQ ID NO: 17744 - DNA, 323 bp, Homo sapiens
ttacgctcccgggtgtcatgggcgagggaatttcggttctacgatttcgataacggtttgcgtttatgaatttcatacagaattatcgcaatccctactacaaatatcaggccacagagaaaaccaagccagttggaggtgatgtgcggtgtaatgtatgcgccgaaaaacagcgttaacgggtggtgaaccagatagataaacagcgatgcgttaacacaataagtcacccgcgctgactggaagttaagcacacggtggccaaaggagaagaccacattcaccatccacagaccgaggaccatggtgatcaccgactcggt

SEQ ID NO: 17745 - DNA, 1329 bp, Homo sapiens
  SIMILAR (292)..(819): 971254mologous to Escherichia coli O-SUCCINYLBENZOATE-COA SYNTHASE (OSB SYNTHASE) (4-(2'-CARBOXYPHENYL)- 4-OXYBUTYRIC ACID SYNTHASE),accession number D90857,Smith-Waterman Score=866.
atgacccgtgacacactgaaccgcgcaattgcacgtggtgtgggcggtgatgatgatgcaaacatggaaaccatcatctacgaaggttacggtcctggcggcacggcaatcatgattgaatgtctgtctgacaaccgcaaccgtaccgttgctgaatggaaggaaggggagttgtcttttggagccgtgagctgtgcagcctgggtttacaagaggggtgatgccaatttttccttagccaccctgtgtgtgtctcaatatgccaggcgagaaagtggcgaaggtcaaagtgggatgtacgaagcggtgcgcgacggcatggtggtgaatctgttgctggaggcaattccggatctgcatttgcgtcttgacgcaaatcgcgcctggacaccgctgaaaggtcagcagtttgccaaatacgttaacccggattatcgcgaccgcatcgcgtttctcgaagagccgtgcaaaacccgcgatgattcgcgagcgtttgcccgtgaaaccggcattgccattgcctgggatgaaagcctgcgcgagccggattttgcctttgtggctgaagagggcgtgcgcgcggtagttatcaaacccacgctcacgggcagtctggaaaaagtacgcgagcaggtacaggcggcgcacgcgctggggctgacggcggtgatcagttcttccattgaatcgagcttaggcttaacgcaactggcgcggattgccgcctggttaacgccggacaccattccagggctggacacgctggatctgatgcaggcgcagcaggtacgtcgctggccggtgcggggagaaaccatcgccttacgtcttaatgacgagcaactcaactggcgcgagctttgtgctcgcgtcgatgaattagcctccggatttgcggtgcagggggtggttgagggcagcggcgtgatgttgcgggcgtggaatacgccgcaaacgctgctcgcctggctggcgttactgcaatgcggggcgcgggtgttgcccgtgaaccctcagctgccgcaaccgttgcttgaagaattgctgcccaatctgacgctgcaatttgctctggtgccggatggggaaaacacgtttccggcattaacgtcgctgcacattcagctggttgaaggcgcacatgccgctacgtggcagccgacgcgtctgtgctcaatgacgatcatggtcttcatcacggatattagctcagattcagcagttatcttgtctgctcatcccattcgtcccaccctgccagccattgcgttattatctgtccttgagattctatttgtcctagtggatgtgaagtgtatctccttgtag

SEQ ID NO: 17746 - DNA, 1394 bp, Homo sapiens
  SIMILAR (784)..(1380): 971254mologous to Escherichia coli ugpC protein (AA 1- 356),accession number X13141,Smith-Waterman Score=973.
atgaacgacgcctcccccgtttcgctggcctgcgccgtgctgacggtcagcgacacccgcagcgccggcgacgacacgtccggcaacctgctggccaacagcctggcgcaggccggccaccaatgcgtgcggcgcgacatctccaaggacaacgtggtgctcgggccgatgcagcatgccaatgccgctgttggggtgcctgacaattgcgatgcccgtagtcgttatgcgttccggatgacctatgtcattctagtcgtcgcgtcttggctctctgtgtacaacacgtcagcattggcgtttgtcgcttatttactcaaccagcgctatggcagtggcgatgcctggatgtacgaaaccgagtcggtgatcaccatggtcctcggtctgtggatggtgaatgtggtcttctcctttggccaccgtttgcttaacttccagtcagcgcggccgcaaaagcaacgaatcccctgctcgcgcgcctgttccgtcaactcgaccgggatagccgcgccgccaagtaacaccgctttcagggaaacggaactacggttaaccagcaaacgccagagttgtgttggcaccagtgaagctaacgccagccaggcgagcagcgtttgcggcgtattccacgcccgcaacatcacgccgctgccctcaaccaccccctgcaccgcaaatccggaagctaattcatcgacgcgagcacaaagctcgcgccagttgagttgctcgtcattaagaccaagtcgcgcacagagccgggcgggtacgtgccaggcgtctggctgcgggaaatcgacgctgctgcgcatggttgccgggctggagcgggtgacagaaggcgatatctggatcaacgaccagcgcgtgactgaaatggagccaaaagatcgcgggattgcgatggtgttccagaactacgcgctttatccgcatatgagtgtcgaagaaaacatggcgtgggggctgaaaattcgcggcatgggcaagcagcaaattgccgagcgcgttaaagaagcggcgcgcattctggagctggacggtctgctcaaacgtcgcccgcgcgagctttccggcggtcagcgccagcgtgtggcgatgggccgcgcgattgtgcgcgatccggcggtgttcctgtttgatgagccgctctctaacctcgatgccaagctgcgcgtgcagatgcgtcttgaactgcaacagttgcaccgtcgcctgaaaacgacttcactctacgttactcacgatcaggttgaagcgatgacgctcgcccagcgagtaatggtgatgaacggcggtgttgccgaacagaattgcacaccagttgaagtctacgaaaagcccgccagcctgtttgtagcgagtttactcgcatccgcgataaccgctga

SEQ ID NO: 17747 - DNA, 744 bp, Homo sapiens
  SIMILAR (73)..(399): 971254mologous to Escherichia coli elongation factor Tu,accession number J01717,Smith-Waterman Score=560.
ctaaaggatcccgggtatgtgggacgagctggaagaagattctgaagaataagtgtgatctacgtcactcataacgttggtactatcggccacgttgaccacggtaaaactactctgaccgctgcaatcaccaccgtactggctaaaacctacggcggtgctgctcgtgcattcgaccagatcgataacgcgccggaagaaaaagctcgtggtatcaccatcaacacttctcacgttgaatacgacaccccgacccgtcactacgcacacgtagactgcccggggcacgccgactatgttaaaaacatgatcaccggtgctgctcagatggacggcgcgatcctggtagttgctgcgactgacggcccgatgccgcagactcgtgagcaggtctatcttgttgagcacaataatcggctcaatctgcaaggtttcgcaggccaccaggtaacggtcgataatattgagcgacagctccggcaaaatggcggagacaatgacaatctggtcgatgttggcggcaataggttttacgccgtcgtagaaatccggacgcgtcaacaccgaggtacgctcatgcaccgcttccacgatccctttgacatttacgccttccgccgccggtttacccggacgccagacgcaaacatacaggttccagcctttttcagtggcgataatacccacgtctttaccctgagcttctgaacattcacgggtacagccggagacaccgaacttcat

SEQ ID NO: 17748 - DNA, 488 bp, Homo sapiens
  SIMILAR (475)..(14): 931254mologous to Escherichia coli glucose 6-phosphate dehydrogenase,accession number U13783,Smith-Waterman Score=752.
gccacgaaagtttctgtatatggtggttttggtccgcgccttctctttcaagatatcccggcacttttttgccatgggcgaagcccgcagtatattgcccgcgtacggttttttcgcgtacgttggagcggtcgatgcggcgcagagacttcagtactttcactttttcatcgcggatgctgtctgcgctcaggtcagacggcggagacatcgcaatcatgcaaagaatttgcagcaggtggttctggatcatgtcgcgcatctgaccggctttatcaaaatagccccagcgcccttcgatccccacttcttctgccacggtaatctcaacatgatcaatggtgcgattgtcccagttattcacaaacagggagttagcaaaacgcagcgccaacaggttcagccccgtttctttaccaagatagtggtcgatacggtaaacctggcactcctcgaagtattcgccaacctgatccccgggtaccgag

SEQ ID NO: 17749 - DNA, 701 bp, Homo sapiens
  SIMILAR (1)..(414): 971254mologous to Escherichia coli K12 putative transport protein,accession number AE000402,Smith-Waterman Score=661.
atgggctatgtgatcctgaaaaactacaaacctcaggtggtgctggctgccgcaggtatcttcctgatgatgtgcggtgtctggttagggttcggtggtgtactcgatcccaccaaaagcagcggctacttgatcgtcgatatttataatgaaatcctgcgcatgctgtccaaccgcattgccggattggggctgtcgattatggcgttgggcgtttatgcccgctacatggagcgcataggggccagtcgcgcgatggtgagcttgttaagccgcccgttaaaactcattcgctcgccgtatattattctgtcggcaacttacgtcatcggccaaatcatggcgcagtttattaccagcgcctccggtctgggtatgttgctgatggtcaccttatttccgacgctgcagagcagccagaatcaggttgattccagctccatcttcaacggcattgaaggcgctgagatgagcaacaaaggcaaagatcagggcgtggtagtgaacaacgtgaaaacgggcactccggctgcgcagatcggcctgaagaaaggtgatgtgattattggcgcgaaccagcaggcagtgaaaaacatcgctgaactgcgtaaacaaactgtgaatgccgtcgggccaatgggcggtattacttctgccagtatgccgatgctggtggttgagaacgtgaccgacggcaaccg

SEQ ID NO: 17750 - DNA, 1951 bp, Homo sapiens
  SIMILAR (787)..(1341): 941254mologous to Escherichia coli glutamine synthetase (AA 1 -470),accession number X05173,Smith-Waterman Score=923.
atgtcaggagaacacacgttaaaagcggtacgaggcagttttattgatgtcacccgtacgatcgataacccggaagagattgcctctgcgctgcggtttattgaggatggtttattactcattaaacagggaaaagtggaatggtttggcgaatgggaaaacggaaagcatcaaattcctgacaccattcgcgtgcgcgactatcgcggcaaactgatagtaccgggctttgtcgatacacatatccattatccgcaaagtgaaatggtgggggcctatggtgagcaattgctggagtggttgaataaacacaccttccctactgaacgtcgttatgaggatttagagtacgcccgcgaaatgtcggcgttcttcatcaagcagcttttacgtaacggaaccaccacggcgctggtgtttggcactgttcatccgcaatctgttgatgcgctgtttgaagccgccagtcatatcaatatgcgtatgattgccgaggatcctccagtacccgagcatgcatgcatgcctgcaggtcgacgtgtattcaccactgcggtgcatgcctccctggacaagttccgtcgacacttttacgctatctgccggaaaaatcaccccagtctggcggcggatctcggtcagcagtttggcggtgatgcgactgaccgccagccctggatgatccaccagatgctcatccaccagggtagcgaacagctctgcttcgtagagcatggtattaatatgctgcggctgggtgagatcctgcatttggctgccacgcggcacgaagtgaagtttgttgatttgcgcttcaccgatactaaaggtaaagaacagcacgtcactatccctgctcatcaggtgaatgctgaattcttcgaagaaggcaaaatgtttgacggctcctcgattggcggctggaaaggcattaacgagtccgacatggtgctgatgccagacgcatccaccgcagtgattgacccgttcttcgccgactccaccctgattatccgttgcgacatccttgaacctggcaccctgcaaggctatgaccgtgacccgcgctccattgcgaagcgcgccgaagattacctgcgttccactggcattgccgacaccgtactgttcgggccagaacctgaattcttcctgttcgatgacatccgtttcggatcatctatctccggttcccacgttgctatcgacgatatcgaaggcgcatggaactcctccacccaatacgaaggtggtaacaaaggtcaccgtccggcagtgaaaggcggttacttcccggttccaccggagtaccctcaccctaaccccagcaaagcatgtctagggtctcacaataacagcaggtctcagaaagatggctggcccttgatgttcaggaagcccacggattctcgaccatcgatcagacggtgatcgtaggacagcgccaggtacatcatcggcaggatctcaacctgaccattcaccgccatcggacgatctttgatagcgtgcatacccagaattgcgctctgcggcgggttgatgatcggcgtaaacatcagggaaccgaacacaccaccgttggtgatggtgaagttaccaccggtcagatcttcaacggtcagcttgccgtcacggcctttgactgccagctgtttgattttcttctcgatgtctgccgtgccgagggtatcgacagtcacgcagaaccgggcgtcaccaggccgcgcggcgtagaaaccgacatgctgagcgtcgaaatagttgtggtaaaccacgtcatcgccgtcgatagaagcgttcacttccggggtaacgtttcagggcttcaaccaccgttttcacgtagaaggacataaagcccagacggatgccgtggcgtttttcaaacgcttcaccgtactgcttacgcagatccataatcggtttcatgttgacttcgttgaacgtg

SEQ ID NO: 17751 - DNA, 1037 bp, Homo sapiens
  SIMILAR (10)..(381): 721254mologous to Escherichia coli glucose-6-phosphate dehydrogenase,accession number M55005,Smith-Waterman Score=458.
atgatgtacctggcgctgtcctacgatcaccgtctgatcgatggtcgcgaatccgtgggcttcctggtaacgatcaaagagttgctggaagatccgacgcgtctgctgctggacgtgtacacttttggcgcaatttgcaaagggcttggcgaggcaaaactgaatgctaaaccggcacgcgtagtcatggagaaaccgctggggacgtcgctggcgacctcgcaggaaatcaatgatcaggttggcgaatacttcgaggagtgccaggtttaccgtatcgaccactatcttggtaaagaaacggtgctgaacctgttggcgctgcgttttgctaactccctgtttgtgaataactgggacaatcgcaccattgatcatgttttccctattgaatcgcgcttattccacaaactctcgacgcgccatcggctggcctatgtcgaggctcagagcagccagaatcaggttgattccagctccatcttcaacggcattgaaggcgctgagatgagcaacaaaggcaaagatcagggcgtggtagtgaacaacgtgaaaacgggcactccggctgcgcagatcggcctgaagaaagccgtgcataacggaggacttatggctggctggcatcttgataccaaaatggcgcaggatatcgtggcacgtaccatgcgcatcatcgataccaatatcaacgtaatggatgcccgtgggcgaattatcggcagcggcgatcgtgagcgtattggtgaattgcacgaaggtgcattgctggtactttcacagggacgagtcgtcgatatcgatgacgcggtagcacgtcatctgcacggtgtgcggcaggggattaatctaccgttacggctggaaggtgaaattgtcggcgtaattggcctgacaggtgatccagagaatctgcgtaaatatggcgaactggtctgcatgacggctgaaatgatgctggaccagtcccggttgatgcacttgttggcgcaggatagccgtttgcgggaagaactggtcatgaacctgttgcggtc

SEQ ID NO: 17752 - DNA, 1463 bp, Homo sapiens; identical to SEQ ID NO: 17725
  SIMILAR (561)..(728): 961254mologous to Homo sapiens KB07 protein,accession number AF064606,Smith-Waterman Score=325.

SEQ ID NO: 17753 - DNA, 1290 bp, Homo sapiens; identical to SEQ ID NO: 17726
  SIMILAR (527)..(589): 851254mologous to Escherichia coli Tail fiber protein GP37,accession number D90774,Smith-Waterman Score=104.

SEQ ID NO: 17754 - DNA, 2980 bp, Homo sapiens; identical to SEQ ID NO: 17727
  SIMILAR (593)..(1306): 951254mologous to Drosophila melanogaster Sog,accession number U18774,Smith-Waterman Score=1158.

SEQ ID NO: 17755 - DNA, 786 bp, Homo sapiens
  SIMILAR (786)..(364): 871254mologous to Escherichia coli rhamnulokinase,accession number L19201,Smith-Waterman Score=637.
ttatttgtggtgcactgcaagttgctcaatgatgtccgtatttatttctgactgtttttcaaatggctcaattttgtctttcatccctccattggaaataaggctttgacttccattcattttgtttggggggaaggtattgtggggaaaatgtggcttttctattgcactgaagcccactttgtcagggatccaagtggctatagcaactaagtctcctgttgaatcttcctctagactcaatccatcatcgccttgccagcagtgcattgaaacgggtaaacgatcaagttggcgcagcgcctcctcgacatcaatccccaccgccgcgaaacgctgtttcgctagctcccaggcctgttccagttgagtggtcatgcgcaaagctcctttgtctgtcgtgtagagtgaattgtcaggattaggggtaaaggtggtcagattcacggtggtgctgacgacctgacggaaatcatccacattgttgagttcatccagcgtcattaactggatgccgatattgccgagcgtcgaggcttcaacaggcccggcgatcacccgaataccgcaggcatcggcgcatagctggttgagcagcgtgttctggcagcctccgccgacaatatgcagttgcgagaaatcttcaccgcgcagatgcgccagctcatgcaacacatcggcatacaccagcgccagactgtcgaaaatgcagcgcgccagttcagcatcactttccgggatcggttgcgccgtttcccgacacgcagcttgaatttcgctgcacat

SEQ ID NO: 17756 - DNA, 769 bp, Homo sapiens; identical to SEQ ID NO: 17729
  SIMILAR (122)..(766): 991254mologous to Escherichia coli rpiR,accession number X82203,Smith-Waterman Score=1082.

SEQ ID NO: 17757 - DNA, 4809 bp, Homo sapiens; identical to SEQ ID NO: 17730
  SIMILAR (3834)..(3652): 1001254mologous to Escherichia coli L-rhamnose isomerase,accession number L19201,Smith-Waterman Score=323.

SEQ ID NO: 17758 - DNA, 895 bp, Homo sapiens; identical to SEQ ID NO: 17731
  SIMILAR (461)..(895): 1001254mologous to Escherichia coli OUTER MEMBRANE USHER PROTEIN PAPC PRECURSOR,accession number D90864,Smith-Waterman Score =744.

SEQ ID NO: 17759 - DNA, 1150 bp, Homo sapiens
  SIMILAR (85)..(2142): 971254mologous to Homo sapiens putative p150,accession number U93563,Smith-Waterman Score=3485.
ccagctataggcatcgcccatgcggtcgatggttgccatcattgaagcgtaggtatcggaaattgcgccgttaatgccgtagacttcggacattttcgccaccaccggtttgaaggtgctggtgaggatgccggaccctgcctgcaacaacatgaaaccaattatggttttaatcgtgcctttaataataacgctgacacttttgcgcagtaggatgtagcccagacaggtcacaatacccagcaacaacggggcattggtcatgacctggttaaaaaacacggtaaagatgttgtagaggatctccataacgatctctctagaggatcccccctggtagttgctgcgactgacggcccgatgccgcagactcgtgagcacatcctgctgggtcgtcaggtaggcgttccgtacatcatcgtgttcctgaacaaatgcgacatggttgatgacgaagagctgctggaactggttgaaatggaagttcgtgaacttctgtctcagtacgacttcccgggcgacgacactccgatcgttcgtggttctgctctgaaagcgctggaaggcgacgcagagtgggaagcgaaaatcctggaactggctggcttcctggattcttatattccggaaccagagcgtgcgattgacaagccgttcctgctgccgatcgaagacgtattctccatctccggtcgtggtaccgttgttaccggtcgtgtagaacgcggtatcatcaaagttggtgaagaagttgaaatcgttggtatcaaagagactcagaagtctacctgtactggcgttgaaatgttccgcaaactgctggacgaaggccgtgctggtgagaacgtatgtgttctgctgcgtggtatcaaacgtgaagaaatcgaacgtggtcaggtactggcttagccgggcaccattcagccgcacaccaaagttgaaatctgaagtgtacattctgtccaaagatgaaggcgggcgtcatactccggtcttcaaaggctaccggccgccagtttacttccgtactactggcgggactgggaccattcaactgccggaaggcgtaaagaggggaatggccgggcgaaaacatcaaaaagggtggtaccctgaacctctagaaggcacccttgcggcatgccaacct

SEQ ID NO: 17760 - DNA, 2760 bp, Homo sapiens
  SIMILAR (2107)..(2733): 1001254mologous to unidentified RECT,accession number A95099,Smith-Waterman Score=1063.
atggaaggtcagtcgatcgtcaacgttgatgagatccaccgtgccgcccgctttttctatcaggccagacagcgggatttgtacggtgccggaggatcaaatgctatctgtgctgatgtacagcacaagttcttgcgcattggcgtacgctgtcaggcctatcctgatgctcacatcatgatgatgtccgcttcgttgttacaggaaggagatgttgtgctggtagtgacccattccgggcgaaccagtgatgtaaaagcggccgtagaactggcaaaaaagaacggggcaaagattatttgtataacccatagctaccattcaccgatagcgaaactggccgattatattatttgctcaccagccccggaaacgccgttattaggtccccagaactttagcaacaacgcccgcgccaacggtacggccgccttcacggattgcgaaacgcagaccgtcgtccatcgcgatcgggtggatcagggtaacaaccattttgatgttgtcgcccggcattaccatctctacgccttccggcagttcgatggtaccagtcacgtcagtagtacggaagtagaactgcggacggtagcctttgaagaacggagtatgacggccgccttcatctttggacagaatgtacacttcagattcgaacttggtgtgcggcttgatggtgcccggcttagccagtacctgaccacgttcgatttcttcacgtttgataccacgcagcagaacacctacgttctcaccagcacggccttcgtccagcagtttgcggaacatttcaacgccagtacagaactaaacataaagttagatcttgtctttgaatcaatggctaggcatttcgggttcccgttcaatgaccatccccagggcgttggctttttgattctggagacgatgtgcagcgaaattcaggctgcgtgtcgggaaacggcgcaacggatcccggaaagtgatgctgaactggcgcgctgcattttcgacagtctggcgctgctgtatgccgatgtgttgcatgagctggcgcagctgcgcggtgaagatttctcgcaactgcatattgtcggcggaggctgccagaacacgctgctcaaccagctatgcgccgatgcctgcggtattcgggtgatcgccgggcctgttgaagcctcgacgctcggcaatatcggcatccagttaatgacgctggatgaactcaacaatgtggatgatttccgtcaggtcgtcagctccttccgcgaatctgaccacctttacccctaatcctgacagtgaaattgcccactatgtggcgcagattcactctacacgacagacaaaggagctttgcgcatgaccactcaactggaacaggcctgggagctagcgaaacagcgtttcgcggcggtggggattgatgtcgaggaggcgctgcgccaacttgatcgtttacccgtttcaatgcactgctggcagggcgatgatgtttccggttttgaaaacccggaaggttcgctgaccggggggattcaggccacaggcaattatccgggcaaagcgcgtaatgccagtgagctacgtgccgatctggaacaggctatgcggctgattccggggccgaaacggcgtaatttacatgccatctatggatcaaaggttttcgcggtagcgggatgcgtcgtgttgatgacgaccatgcccgacagttgcaattcgtggcaaaaatgcaggaataaaacaatgaacaagaagattcattccctggccttgttggtcaatctggggatttatggggtagcgcaggcacaagagccgaccgatactcctgtttcacatgacgatactattgtcgttaccgccgccgagcagaacttacaggcgcctggcgtttcgaccatcaccgcagatgaaatccgcaaaaacccggttgcccgcgatgtgtcgaagatcatccgtaccatgccaggcgttaacctgaccggtaactccaccagtggtcagcgtgggaataaccgacagattgatattcgcggtcggtttgatgggattgtgggtatttttgctctcatcggtgattggtacccggcaatgtatggtaccgagctgaatatgcaaatgactaagcaaccaccaatcgcaaaagccgatctgcaaaaaactcagggaaaccgtgcaccagcagcagttaaaaatagcgacgtgattagttttattaaccagccatcaatgaaagagcaactggcagcagctcttccacgccatatgacggctgaacgtatgatccgtatcgccaccacagaaattcgtaaagttccggcgttaggaaactgtgacactatgagttttgtcagtgcgatcgtacagtgttcacagctcggacttgagccaggtagcgccctcggtcatgcatatttactgccttttggtaataaaaacgaaaagagcggtaaaaagaacgttcagctaatcattggctatcgcggcatgattgatctggctcgccgttctggtcaaatcgccagcctgtcagcccgtgttgtccgtgaaggtgacgagtttagcttcgaatttggccttgatgaaaagttaatacaccgcccgggagaaaacgaagatgccccggttacccacgtctatgctgtcgcaagactgaaagacggaggtactcagtttgaagttatgacgcgcaaacagattgagctggtgcgcagcctgagtaaagctggtaataacgggccgtggtactcactggaagaggtaccgagctga

SEQ ID NO: 17761 - DNA, 882 bp, Homo sapiens
  SIMILAR (1447)..(3276): 981254mologous to Homo sapiens putative p150,accession number U93574,Smith-Waterman Score=3162.
atggataaattcctggacacatacactctcccaagactaaaccaggaagaagttgaatctctgaatagaccaataacaggagctgaaattgtggcaataatcaatagcttaccaaccaaaaagagtccaggaccagatggattcacagctgaattctaccagaggtacaaggaggagctgatagggtggcttagagaaagtgtgtcaaaaatatgtctaaaatttgatcaccaggttcaggtgatcactggccgcctgataatccgcttccagatcgccttcggcaccgttgtgctctgccagctcacgcgccatatcgacgtgtttgtaggcaagcggcttgcgaatgcacgatttgcgccatcgctgggtggtgcgcccgacctgttcactctcaaaccatgttttgtggcagtggaaactcagggcgatttacctcaagccacgacggtggttgatatcgacggttgcctgggcaagccagccaatgtacaggtggcattggatctggatgtgaaaggcttccagcagtgggtggctgagagaatagctatgcatgatgcaaacatccgcgttgccatcgcgggagccggggggcgtatgggccgccagttgattcaggcggcgctggcattagagggcgtgcagttgggcgctgcgctggagcgtgaaggatcttctttactgggcagcgacgccggtgagctggccggagccgggaaaacaggcgttaccgtgcaaagcagcctcgatgcggtaaaagatgattttgatgtgtttatcgattttacccgtccggaaggtacgctgaaccatcttctgccccgaattacacttaaaacgactcaacagcttaacgttggcttgccacgcattacttga

SEQ ID NO: 17762 - DNA, 1628 bp, Homo sapiens
  SIMILAR (781)..(1350): 971254mologous to Escherichia coli penicillin-binding protein 4 (PBP4),accession number X59460,Smith-Waterman Score=948.
cttcgaagcgaaaatgcaggaactggcacaggtttccaagaaactgatggagatcgcccatcagcatcatgcccagcagcagacagccggtgtgatggcttctgccatcaacgcgaaagatggcaatgttgtcggcgctgaatttgaagaagtcaaagacaaaaaataatcgccctataaacgggtatattatactgacacgggcgaaggggaatttcctctccgcccgtgcattcatctaggggcaatttaaaaaagatgggtaagcaagattattgcgagattttaggcgtttccaaaacagcggaagagcgtgaaatcagaaaggcctacaaacgcctggccatgaaataccacccggaccgtaaccagggtgacaaagaggccgaggcgaaatttaaagagatcaaggaagcttatgaagttctgaccgactcgcaaaaacgtgcggcatacgatcagtatggtcatgctgcgtttgagcaaggtggcatgggcggcggcggttttggcggcggcgcagacttcagcgatatttttggtgacgttttcggcgatatttttggcggcggacgtggtcgtcaacgtgcggcgcgcggtgctgatttacgctataacatggagctcaccctcgaagaagctgtacgtggcgtgaccaaagagatccgcattccgactctggaagagtgtgacgtttgccacggtagcggtgcaaaaccaggtgcagatgcgccagggattcttcgctgtacagcagacctgtccacactgtcagggccgcgatttatcatcggattgaccagctgtatagcgttcagtgttcaggccgcaaatgttgatgagtacattactcaactccccgctggtgccaaccttgccctgatggtgcaaaaagtcggcgcgtcggcccccgctattgattaccacagtcagcagatggcgctgcctgccagtacccagaaagtgattactgcgctggcggcgttgattcaactcggccccgattttcgttttaccacgacgcttgaaaccaaaggcaatgtggaaaacggcgtacttaagggtgacttagtggcgcgatttggtgccgatccgacgttaaaacgtcaggatattcgcaatatggtcgcgactttgaaaaaatctggcgtcaaccaaatcgatggcaatgtgttgatagatacctccattttcgccagccacgataaagcccccggctggccatggaatgacatgacacaatgctttagcgctccgcctgccgccgccatagttgaccgcaactgtttctccgtctcgctctacagtgccccaaagcctggtgatatggctaaagtgagaactgtcgctgtaccccgctcttcagacggatctgcagctcatcgagatccgcttcgtagcgttcgatcttctcctgctgacgcagtgcggtttgcaccaggttcaggtgatcactggccgcctgataatccgcttccagatcgccttcggcaccgttgtgctctgccagctcacgcgccatatcgacgtgtttgtactgctcagccgccagttgctgacgcgaagtatgtagctcgcgacgaaactccagggctttgtcgagatggacacggcgctcgttggcgtga

SEQ ID NO: 17763 - DNA, 1326 bp, Homo sapiens
  SIMILAR (1324)..(1253): 1001254mologous to Escherichia coli histidine-tRNA synthetase,accession number M11843,Smith-Waterman Score=120.
  misc_feature (1)...(1326): n = a,t,c or g
ttaatatccctgctcgaaatagctttcgagaataataaccgcagaggcagagtcaactttgcctttgttgagcgcccgatagccgccctgttcaaacagaccggaacgggcttccacagtgctaagacgctcgtcatggagctttacttcaacaccgaaacggccatgaatacggttggcaaatttacgcgctctggcagtcaatggttgctcggtgccgtccatattcagcggcaaaccgacgatgatttcgtccggctgccactctttcagtaaacgctcgataatgttccagtccggcgtaccgtccgtgttgtctgaaatgcgaatgctggaagcaaaattggagggcggagtatgcaaaataaacccgcgatcttcagccagcggaccgccgagcataaccggtttatccagacggattgattcatcacgcggctccggcgtgatcttcagcttttccagaatcccttcaattttgagattttccagcggcttgttgacgatgatccccattgcaccattggtattatgttcgcaaatgtagaccacggaacgacggaaaatcggatcccagacgtacttgtaggtcagtagatgattatttggtttctcttttgctggggcaaaggttaaaactggattgttctcaataaataagtaaatattgggttttttgaagagatcntttgatgggttatcaagggttttcagcgcggcatcagcctgcttgagctgtacctgaacgcgagcaagacgcagatttatcacggctttgagattttcatcgctcgtgtctgccagcccctgttgtaactgggcggcagctttctctagttcatttttgtcaacaaattgtgcggtaaccgcattttgataggcaagagaagcggagcgtgcagaatcaacctgatggctgttccagtagcgccagccaatcagtgcgccaacgcccaaaatcaccccaacagccagtgcagagcgcaaatccttcactactgctgtgccgttagccacttcagactcacccagcaccacagcaacgcgggcaccccatttatcagcacgggcaaactgtttcttaaagttgccgccgccgtggttggtcatcaatttcacgcccggtaattcatcacgcagacgctcagctaatgccatagccgcagattgtgtatcagcacctgaagccaccaggtatatatcgacaacaggatcggctttaaattccggattaacggcctgtactaacatacagacgttcgaggcccatagcaaaaccgacagccggtgttgcacgaccgcccagttgttccacaagaccgtcat

SEQ ID NO: 17764 - DNA, 331 bp, Homo sapiens
  SIMILAR (274)..(47): 501254mologous to Escherichia coli (p)ppGpp 3'- pyrophosphohydrolase,accession number L10328,Smith-Waterman Score= 150.
ctcggcgagcttttaccaaaaagctgttccatatcctgatcctggtagttggcgggatatcttcaatcacgtcatgcagcagcgccgccatcagcgtttcatagtcagtttcatctcggccagaatgcaggcaaccgctaccgggtgcgtgatatgggttcaccgcttgaacgtgtttgcccctcgtgagcatcacgtgcaacggatacgcctgccgcagacgcttgatttggtcttccggcagcggctcctgctcttgctgttcctggcgttcgcgaacgtcgaggatctggttgctgatcagaccttcttcgatttcgcacagcgcgag

SEQ ID NO: 17765 - DNA, 594 bp, Homo sapiens
  SIMILAR (1)..(591): 1001254mologous to Escherichia coli K12 orf, hypothetical protein,accession number AE000331,Smith-Waterman Score=1072.
atgagcctgatccgcactgaaaccagagacacaaaacgcgcagctgacccactgcacgacctgcgtagcaagccgttttctgagtggggcgaagatgaaatcaggcgttttaatctgatagacgcgcttcttgagtttgtctacacagacacatccagcccgttcggtatcggcatgaccttcgattacacggagtgctgggaaattggtgttcgtgacgactgcctggtaatgacacgcgttaagccggtgcatccagaatatgcgaagcactggaacatgaaaggcgtcatgaatgacaaaacccgcttccacgccgacaagtgggtagggtacagcaaggtgcttgcctgggtgagcttatcgcacaaagacaccttcacgggtgcgaaacggtttcaatacttccaaacgatgtacgacatggaacggcaaatcaacgcaaacctgccggttggcggccttcccaacgttgacacagagcgaactggcaaactgttccaacgcgatgacttttctgaggatagccatgccaacgatccgaagttggttggtgatgattacgtcccccaggcaccggagcaaatcaactga

SEQ ID NO: 17766 - DNA, 1197 bp, Homo sapiens
  SIMILAR (1)..(486): 941254mologous to Escherichia coli Protease II (EC 3.4.21.83) (Oligopeptidase B),accession number D90827,Smith-Waterman Score= 814.
atgacgcttcatggcgatacgcgcatcgataattactactggctgcgggacgatacgcgttctcagccagaagtcctggactacctgcaacaagaaaatagttacggtcatcgggtgatggcctcacaacaagccttgcaggatcgcatcttaaaggaaatcatcgaccgcattccgcaacgagaagtttctgcgccctacatcaaaaatggctaccgctatcggcatatttatgaaccaggctgtgaatatgctatctaccagcgtcaatcggcattcagtgaagagtgggatgagtgggaaacattgctcgatgccaataagcgcgcagctcatagtgagttttattcgatgggcggaatggcgattacgcccgataacaccattatggcgctggcagaagattttctttcccgacgccagtacggaattcgttttcgtaatctggaaactgaacgtttcccaaatgacgtggatccgatcgaaactcgcgactggctccaggcgatcgaatcggtcatccgtgaagaaggtgttgagcgtgctcagtatctgatcgaccaactgcttgctgaagcccgcaaaggcggtgtaaacgtagccgcaggcacaggtatcagcaactacatcaacaccatccccgttgaagaacaaccggagtatccgggtaatctggaactggaacgccgtattcgttcagctatccgctggaacgccatcatgacggtgctgcgtgcgtcgaaaaaagacctcgaactgggcggccatatggcgtccttccagtcttccgcaaccatttatgatgtgtgctttaaccacttcttccgtgcacgcaacggggtaccgacataccaccttattgaagcagtggtcttcagatttcttactgctggttttcctctacttctaaagaaagcttcaggtgtgttttggaatgcggaatttggtcatcagctcatcgctggcgatcactttttccaccactttcaggcacatctggtgcagttcggcggtgacttcttccagcttttcaacctgggcgagggtcaacttgtagtaagcatcttcacaccagtacggctcgccgtacatggtgtgaaaattgaaaccgtattcgtgggctttctcacgccagtccgggcgctcggtaatactgactctttccatcggtatcagccacccattgaacgagaagag

SEQ ID NO: 17767 - DNA, 3405 bp, Homo sapiens
  SIMILAR (648)..(713): 771254mologous to Escherichia coli K12 pyruvate dehydrogenase (decarboxylase component),accession number AE000120,Smith-Waterman Score=84.
  misc_feature (1)...(3405): n = a,t,c or g
atgctgctccagacgccgcaacttactgctgtgacgcctgctgaaacaggttttcccacatatcggtcaccagcgcctgtggctggtaccacatccccgttgaagaacaccggagtatcgggtaatctggaactggaacgccgtattcgttcagctatccgctggaacgccatcatgacggtgctgcgtgcgtcgaaaaaagacctcgaactgggcggccatatggcgtccttccagtcttccgcaaccatttatgatgtgtgctttaaccacttcttccgtgcacgcaacgagcaggatggcggcgacctggtttacttccagggccacatctccccgggcgtgtacgctcgtgctttcctggaaggtcgtctgactcaggagcagctggataacttccgtcaggaagttcacggcaatggcctctcttcctatccgcacccgaaactgatgccggaattctggcagttcccgaccgtatctatgggtctgggtccgattggtgctatttaccaggctaaattcctgaaatatctggaacaccgtggcctgaaagatacctctaaacaaaccgtttacgcgttcctcggtgacggtgaaatggacgaaccggaatccaaaggtgcgatcaccatcgctacccgtgaaaaactggatacctggtcttcgttatcaactgtaacctgcagcgtcttgacggnccgccgttgggatgaactgctgcgtaaggataccagcggtaaactgatccagctgatgaacgaaaccgttgacggcgactaccagaccttcaaatcgaaagatggtgcgtacgttcgtgaacacttcttcggtaaatatcctgaaaccgcagcactggttgcagactggactgacgagcagatctgggcactgaaccgtggtggtcacgatccgaagaaaatctacgctgcattcaagaaagcgcaggaaaccaaaggcaaagcgacagtaatccttgctcataccattaaaggttacggcatgggcgacgcggctgaaggtaaaaacatcgcgcaccaggttaagaaaatgaacatggacggtgtgcgtcatatccgcgaccgtttcaatgtgccggtgtctgatgcagatatcgaaaaactgccgtacatcaccttcccggaaggttctgaagagcatacctatctgcacgctcagcgtcagaaactgcacggttatctgccaagccgtcagccgaacttcaccgagaagcttgagctgccgagcctgcaagacttcggcgcgctgttggaagagcagagcaaagagatctctaccactatcgctttcgttcgtgctctgaacgtgatgctgaagaacaagtcgatcaaagatcgtctggtaccgatcatcgccgacgaagcgcgtactttcggtatggaagggtctgtccgccagattgtcttaaggaactggaaaagtggcgatgtaccggagatcagccatgaaaacgagagcttaatcgtcaccttcagtgacagagttccgttacccagactggcgaacggtcatgcactgaaagaggctcagcgcagttgcggggccaacggtatgtgccggcatcgcgatgatgctggtgttaagttatcaacgactttgtgccaccacttcagtctacggaaaaagaagaagagtgggatccggcaatctggctggaagaactggctacccttcccgatgactacccgcaaacgcgcacaggcgctggtcgctaaaggcatcaccattgagttgttctgtgcgccgggtgaaattccctctgcccgcttaccgatgagcgatgtgcgtttttattcccgcagcagtattcgtttcgcccgttgtgattgtattgaaggcacactttgcgaacatgtcgtactggcggtacaggccttcgtcgaggccaaagcgcagcaagcagaatttaaccatttaatctggcagatgcgcagcgaacacgtcacatcatctgacgatccgtttgccagcgaagaaggcaacgcgtgtcgtcaatatgttcagcaattaagccagacattatggcttggcggcatcagccagccgctcatccattacgaggcagcattcaaccgcgcattgcaggcggcagagacctgcaactggcgctgggtgagtgaatcgctacggcaactgcgcgccagcgttgatgccttccacgcccgcgccagccactataatgccggagaatgcttacatcagcttgcggcattaaacagtcgattaaattgcgcacaagagatggcccggcgcgacagtattggtgaagttcctcctgtgccgtggcgcacggtcgttggctctggcattgccggagaagcaaagcttgatcatctgcggctggtgtctttaggtatgcgttgctggcaggatattgagcattatggtttacgcatctggtttaccgatcccgacaccggcagtattttgcacctttcgcgcagttggccgcgaagtgaacaggaaaactcaccggcagctacgcgtcggctgtttagttttcaggctggcgcactggcgggcgggcaaattgtttcacaagcagcaaaacgcagtgccgatggcgagctgctgttagctacccgcaaccgcttaagcagcgttgtgccgctgtcgcctgcggcggcgatcaaaaattcaaaatatcctaactcagtcacacgaagtgactatgtgcctatagaaccttcagttaaaaacctttttgccgtaaatgaattttatagaaataatgatgatttcataaaccctgatctacaagaacggttagtgatcggggattatagcatttcaatatttacttatgacattaaaggtgctaccagtggcttctgtttctatcagctgtccctcctgattcagctactgacggggtggtgcgtaacggcaaaagcaccgccggacatcagcgctatctctgctctcactgccgtaaaacatggcaactgcagttcacttacaccgcttctcaacccgccgggcagtgacgtcatcgtctgcgcggaaatggacgaacagtggggatacgtcggggctaaatcgcgccagcgctggctgttttacgcgtatgacaggctccggaagacggttgttgcgcacgtattcggtgaacgcactatggcgacgctggggcgtcttatgagcctgctgtcaccctttgacgtggtgatatggatgacggatggctggccgctgtatgaatcccgcctgaagggaaagctgcacgtaatcagcaagcgatatacgcagcgaattgagcggcataacctgaatctgaggcagcacctggcacggctgggacggaagtcgctgtcgttctcaaaatcggtggagcagcatgacaaagtcatcgggcattatctgaacataaaacactatcaataa

SEQ ID NO: 17768 - DNA, 1398 bp, Homo sapiens
  SIMILAR (916)..(1395): 1001254mologous to Escherichia coli similar to,accession number D90888,Smith-Waterman Score=821.
atgtgtcacgtacgagttaacttgattctcttcgttggagatgccggtctaggcggtcgttatgacggtcttgtggaacaactgggcggtcgtgcaacaccggctgtcggttttgctatgggcctcgaacgtcttgtattgttagtacaggccgttaatccggaatttaaagccgatcctgttgtcgatatatacctggtggcttcaggtgctgatacacaatctgcggctatggcattagctgagcgtctgcgtgatgaattaccgggcgtgaaattgatgaccaaccacggcggcggcaactttaagaaacagtttgcccgtgctgataaatggggtgcccgcgttgctgtggtgctgggtgagtctgaagtggctaacggcacagcagtagtgaaggatttgcgctctgcactggctgttggggtgattttgggcgttggcgcactgattggctggcgctactggaacagccatcaggttgattctgcacgctccgcttctcttgcctatcaaaatgcggttaccgcagtgagcgaaggcaaaccggatagcatcccggcggcggaaaaatttgctgctgaaaataaaaatacttatggtgcgctggcttctttggaacttgcgcagcaatttgttgacaaaaatgaactagagaaagctgccgcccagttacaacaggggctggcagacacgagcgatgaaaatctcaaagccgtgataaatctgcgtcttgctcgcgttcaggtacagctcaagcaggctgatgccgcgctgaaaacccttgataccatcaaaggtgaagggtgggctgccattgttgccgacctgcgtggtgaagcattgctgagcaaaggtgataagcaaggcaaacaccagcgtgccgaaaactgtgagatacaaggatatatcgatatgataaagcacctggtagcacccctggttttcacctcactaatactgactggctgccagtcccctcagggaaagtttactcctgagcaagtcgccgctatgcaatcttatggatttactgaatccgccggcgactggtcgctgggcttatcagatgccattctgttcgcaaaaaatgactacaaattgctcccggaaagccagcaacagatccaaaccatggcagctaaattggcctcgacagggctaacacatgcccgtatggatggacacaccgataactatggtgaagacagttacaacgaaggcttatcattgaaacgggcgaatgtcgtggccgatgcatgggctatgggtggacaaattccacgcagcaatctcaccacacagggtttaggaaaaaaatatcccatagccagtaacaagaccgcccagggccgcgccgagaaccgccgcgtcgcagtggtgattactaccccttaa

SEQ ID NO: 17769 - DNA, 1579 bp, Homo sapiens
  SIMILAR (778)..(1086): 1001254mologous to Escherichia coli histidine-tRNA synthetase,accession number M11843,Smith-Waterman Score=513.
atgcctgatgaagaaaaccgatttaatgccctgaaagcggtttttagccagttaatgacagatgcgacgctgacgccgctgttcaactatcactatcgcattagtgcccctcccggcgtgaacggattatctatgaaacgtgctgtcgttgtgttcagtggaggtcaggattccaccacctgtctggtgcaggcattacaacaatatgatgaagtccattgcgtgacgttcgattacggtcagcggcatcgcgcagaaatcgacgtggcacgcgaactggcgctgaaactgggggcacgcgcgcataaggtgctggatgtcaccctgctcaacgagctggcggtcagtagcctgacgcgtgacagcattccggtgcctgattatgaacctgaagccgatggtatcccgaatacgtttgtcccagggcgtaatattttgttcctgacgctggcggcaatatatgcgtatcaggtaaaagcagaagccgtaattactggcgtctgcgaaacggatttctccggctacccggattgccgcgatgagtttgtgaaagcactaaaccatgcccataaagaaaagctggacgaagactgcaaacgccgcatgtacactaacccgctgcgcgtgctggattcaaaaaatccggaagtgcaggcgcttctcaacgacgctccggcattaggtgactatctggacgaggaatctcgtgagcattttgccggtctgtgcaaactgctggagagcgcggggatcgcttacaccgtaaaccagcgtctggccgttaatccggaatttaaagccgatcctgttgtcgatatatacctggtggcttcaggtgctgatacacaatctgcggctatggcattagctgagcgtctgcgtgatgaattaccgggcgtgaaattgatgaccaaccacggcggcggcaactttaagaaacagtttgcccgtgctgataaatggggtgcccgcgttgctgtggtgctgggtgagtctgaagtggctaacggcacagcagtagtgaaggatttgcgctctggtgagcaaacggcagttgcgcaggatagcgtagccgcgcatttgcgacgttactgggttaaggaaggagaaggacagcgtggaaatttacgagaacgaaaacgaccaggtagaagcggttaaacgcttttttgctgaaaatggcaaagcactggctgttggggtgattttgggcgttggcgcactgattggctggcgctactggaacagccatcaggttgattctgcacgctccgcttctcttgcctatcaaaatgcggttaccgcagtgagcgaaggcaaaccggatagcatcccggcggcggaaaaatttgctgctgaaaataaaaatacttatggtgcgctggcttctttggaacttgcgcagcaatttgttgacaaaaatgaactagagaaagctgccgcccagttacaacaggggctggcagacacgagcgatgaaaatctcaaagccgtgataaatctgcgtcttgctcgcgttcaggtacagctcaagcaggctgatgccgcgctgaaaacccttgataccatcaaacggtga

SEQ ID NO: 17770 - DNA, 2071 bp, Homo sapiens
  SIMILAR (458)..(1045): 981254mologous to Escherichia coli K12 pyruvate dehydrogenase (decarboxylase component),accession number AE000120,Smith-Waterman Score=1019.
ttaagtatggcacgcgtaactgttcaggacgctgtagagaaaattggtaaccgttttgacctggtactggtcgccgcgcgtcgcgctcgtcagatgcaggtaggcggaaaggatccgctggtaccggaagaaaacgataaaaccactgtaatcgcgctgcgcgaaatcgaagaaggtctgatcaacaaccagatcctcgacgttcgcgaacgccaggaacagcaagagcaggaagccgctgaattacaagccgttaccgctattgctgaaggtcgtcgttaatcacaaagcgggtcgcccttgtatctgtttgaaagccttgaaattgatgaccaaccacggcggcggcaactttaagaaacagtttgcccgtgctgataaatggggtgcccgcgttgctgtggtgctgggtgagtctgaagtggctaacggcacagcagtagtgaaggatttgcgctctgaacgtttcccaaatgacgtggatccgatcgaaactcgcgactggctccaggcgatcgaatcggtcatccgtgaagaaggtgttgagcgtgctcagtatctgatcgaccaactgcttgctgaagcccgcaaaggcggtgtaaacgtagccgcaggcacaggtatcagcaactacatcaacaccatccccgttgaagaacaaccggagtatccgggtaatctggaactggaacgccgtattcgttcagctatccgctggaacgccatcatgacggtgctgcgtgcgtcgaaaaaagacctcgaactgggcggccatatggcgtccttccagtcttccgcaaccatttatgatgtgtgctttaaccacttcttccgtgcacgcaacgagcaggatggcggcgacctgttttacttccagggccacatctacccgggcgtgtacgctcgtgctttcctggaaggtcgtctgactcaggagcagctggataacttccgtcaggaagttcacggcaatggcctctcttcctatccgcacccgaaactgatgccggaattctggcagttcccgaccgtatctatgggtctggcgagcaccctgaaacgtcgcgagcgcatctcggcccgtctgggggatattttaagccatctctacctcgcctctgtcgtgctgaagcgttatgactacgaaggccgtaatgaagccgacctggcgatagtgcactggggcgtacaacatgcgctgtatcacgctgaacaggcgatggatgatttactgcaaaacttccccaaccgcgtggttgccgggctgctgaatgtggtgatcttacctaccggacgtcattatctggcaccttctgacaagctggatcataaagtggcgaacattttacaagtgccgaacgccacccgttcccgcattggtcgcgggcagtacctgacgccgagcgagcataatccggttggcttgctggaacaaactctagtggatgtgattgccgacgacccaattcatcaaccggatctgaaaagagctggggaaaaacctgccgttacccgtctggatgaactggcgcacaacgcgcgaggatccccatccgcattgaaaccagagacacaaaacgcgcagctgacccactgcacgacctgcgtagcaagccgttttctgaacacatccagcccgttcggtatcggcatgaccttcgattacacggagtgctgggaaattggtgttcgtgacgactgcctggtaatgacacgcgttaagccggtgcatccagaatatgcgaagcactggaacatgaaaggcgtcatgaatgacaaaacccgcttccacgccgacaagtgggtagggtacagcaaggtgcttgcctgggtgagcttatcgcacaaagacaccttcacgggtgcgaaacggtttcaatacttccaaacgatgtacgacatggaacggcaaatcaacgcaaacctgccggttggcggcctttccaacgttgacacagagcgaactggcaaactgttccaacgcgatgacttttctgaggatagtcatgccaacgatccgaagttggttggtgatgattacgttccccaagcaccggagcaaaataactga

SEQ ID NO: 17771 - DNA, 2388 bp, Homo sapiens
  SIMILAR (1)..(1056): 991254mologous to Escherichia coli PUTATIVE MALATE OXIDOREDUCTASE (NAD) (EC 1.1.1.38) (MALIC ENZYME),accession number D90874,Smith-Waterman Score=1767.
atggagtcgggcgtggcgactcgtccgattgctgatttcgacgtctacatcgacaagctgactgagttcgtttacaaaaccaacctgtttatgaagccgattttctcccaggctcgcaaagcgccgaagcgcgttgttctgccggaaggggaagaggcgcgcgttctgcatgccactcaggaactggtaacgctgggactggcgaaaccgatccttatcggtcgtccgaacgtgatcgaaatgcgcattcagaaactgggcttgcagatcaaagcgggcgttgattttgagatcgtcaataacgaatccgatccgcgctttaaagagtactggaccgaatacttccagatcatgaagcgtcgcggcgtcactcaggaacaggcgcagcgggcgctgatcagtaacccgacagtgatcggcgcgatcatggttcagcgtggggaagccgatgcaatgatttgcggtacggtgggtgattatcatgaacattttagcgtggtgaaaaatgtctttggttatcgcgatggcgttcacaccgcaggtgccatgaacgcgctgctgctgccgagtggtaacacctttattgccgatacatatgttaatgatgaaccggatgcagaagagctggcggagatcaccttgatggcggcagaaactgtccgtcgttttggtattgagccgcgcgttgctttgttgtcgcactccaactttggttcttctgactgcccgtcgtcgagcaaaatgcgtcaggcgctggaactggtcagggaacgtgcaccagaactgatgattgatggtgaaatgcacggcgatgcagcgctggtggaagcgattcgcaacgaccgtatgccggacagctctttgaaaggttccgccaatattctggtgatgccgaacatggaagctgcccgcattagttacaacttactgcgtgtttccagctcggaaggtgtgactgtcggcccggtgctgatgggtgtggcgaaaccggttcacgtgttaacgccgatcgcatcggtgcgtcgtatcgtcaacatggtggcgctggccgtgctgtttgtcaacgcggatgaaaccacggtcgtcaacttccacgcctgctttgcctgcgtcgaggtttttaccgttcggcacacgaccaatcgctaccagcacggcgtcgtaacgctgcggttcagcgggtgcttttttgccttccatcgtcacataaatgccgtcttctttcgcttcaacatacaggcggtgtttgttgcgctgcgcccggaagtgatcgccatcatgcataaactgcgtgagcaggggcatcgcgtggtggtgctttccaataccaaccgcctgcataccaccttctggccggaagaatacccggaaattcgtgatgctgctgaccatatctatctgtcgcaagatctggggatgcgcaaacctgaagcacgaatttaccagcatgttttgcaggcggaaggtttttcacccagcgatacggtctttttcgacgataacgccgataatatagaaggagccaatcagctgggcattaccagtattctggtgaaagataaaaccaccatcccggactatttcgcgaaggacaaagccaggcaccgtacccgtccactatgggcctggctaaaactactctggcaacgcattgatgaggacaacatgacaaccctggcaggtaaccttgcctatgtgtcgttgctctcattagtgccgctggttgccgttgtttttgcgcttttcgccgcttttcccatgttttccgacgtcagcattcagttacgtcactttatttttgccaactttctgcctgctactggcgatgttattcagcggtatatcgaacaatttgttgccaattccaacaagatgaccgccgttggggcgggccagtctggcgatcagttcctatttgctctctttaattgccaatgttttgatgctgatgagctgaagcgtattaagaatgagctggaacccaaaatgggcatggagctcaatctggtacagctgattgcctataccgactggaatgaaacgcagcagaaacagccggatggaagctgggttaattacaactacgactggatgtttaagccgggtgccatgaaacaggtggcggaatatgcagatggtattggtccggattaccatatgttgattgaggagacatcgcagccgggtaatatcaaactcactggcatggtgcaagatgctcagcagaataaactggtagtgcatccttataccgtgcggtcagataaactgcctgaatacactcctgatgtgaatcagttatatgatgctctgtataacaaagcgggtgtaaatgggctgtttactgatttccctgataaggcagtaaaatttcttaataaagagtaa

SEQ ID NO: 17772 - DNA, 837 bp, Homo sapiens
  SIMILAR (837)..(268): 991254mologous to Escherichia coli K12 putative 2-component sensor protein,accession number AE000301,Smith-Waterman Score=931.
tcatgcttcggcggcggttgaaattggtaacgtggcacaggtcactgcgctctttaccgacgagctgccgcccgctgcgctaaaatcacgcttacaacattcataagcctcttttctagctattttgtaatatacaatattttgctgttgatctacctgatatttgcggcatcgttttgcttgctggtcgtctgatgcattattacggttttcatcaccgtctgttccgctggcgacgtttcgggcatgagcgccacctggtgtgcgttcgttgccatcagcgtagaccacttcaccggtttcaatcgcttttaaagtataagttgaagaaatcggtttgccgggtaaatggtggtcgtcaccaattccggtaaaggccatcaatttctctcgatcggtaatcgcgactgcaccaatatccagttcctgatacagcacctgagccactttcatgctgttcacttcgttaaacccctggcgcaaaatgccttccgtcgaggctgccactttcagcgcagtggcagaaaaagccgaagtgtatttttcaaacatcgcgcgtttatcgagcaatatacgcataaacagcgccgcgccgacggtattggtgaccatcattggcgcagcaatattactcaccagacgcaccgcatcttcataaggtcgggcgatcgcaaggatgatcagcatttgcaccatttcagcgacgaacgtgacggcaccggcggtaatggggttaaagactttatcagtgcgcccgcggcggatcaggatgctgtgtaccaggccaccgagtaatccttcaacgatggtcgagatcatgcaacttaacgcggtcat

SEQ ID NO: 17773 - DNA, 1101 bp, Homo sapiens
  SIMILAR (664)..(1077): 891254mologous to Escherichia coli K12 tRNA processing exoribonuclease BN,accession number AE000464,Smith-Waterman Score= 619.
atgatctctgcgattacgctaagagcgtcggtgtccgggattatgaccggtatcctgctggcgattgcccgtattgctggtgaaaccgcgccgctgctgtttaccgcgctctccaaccagttctggagcacggacatgatgcagccgatcgccaacctgccggtgacgatctttaagtttgcgatgagcccgtttgcggaatggcagcaattggcctgggccggggttcgtaatttgaacttctactacggcaaattccatgccctgaaaaacatcaacctggatatcgctaaaaaccagccggaagcgctggcgtttggtaaattccgcgaagtggttgagcaggaatatcgtgtcaagggtaaagatccggcaacgcttgactacgtggtgccgttcaaagtattcgaaggtaacggcccgaccaactccatcctgctgcgtgaaatcactccgttcagcctgggtgcgttgattgcgctgtatgagcacaaaatctttactcagggcgtgatcctgaacatcttcaccttcgaccagtggggcgtggaactgggtaaacagctggcgaaccgtattctgccagagctgaaagatgataaagaaatcagcagccacgatagctcgaccaatggtctgattaaccgctataaagcgtggcgcgtgccgctggttgccgttgtttttgcgcttttcgccgcttttcccatgttttccgacgtcagcattcagttacgtcactttatttttgccaactttctgcctgctactggcgatgttattcagcggtatatcgaacaatttgttgccaattccaacaagatgaccgccgttggggcgtgcgggctgatcgtcaccgcgttattgttgatgtactccatcgatagcgcgttgaataccatctggcgcagtaaacgagcgcgaccaaaaatttactcgttcgccgtgtactggatgattttaacgctggggccgctgctggcaggggccagtctggcgatcagttcctatttgctatccaagcaatgggctatcgatatcgattccgtcaatagattaggtgccattatcctaacggcactcattacaggtgacacataa

SEQ ID NO: 17774 - DNA, 1393 bp, Homo sapiens
  SIMILAR (1)..(699): 931254mologous to Escherichia coli lipoate-protein ligase A,accession number L27665,Smith-Waterman Score=1109.
atggctggcaagccggagtacgataaaactatctccacgtcgattgtgctcaatgcgctgaacgcgctcggcgtcagcgccgaagcgtccggacgtaacgatctggtggtgaaaaccgtcgaaggcgaccgcaaagtctcaggctcggcctatcgcgaaaccaaagatcgcggcttccaccacggcaccttgctactcaatgccgacctcagccgcctggcaaactatctcaatccggataaaaagaaactggcggcgaaaggcattacgtcggtacgttcccgcgtgaccaacctcaccgagctgttgccggggatcacccatgagcaggtttgcgaggccataaccgaggcctttttcgcccattatggcgagcgcgtggaagcggaaatcatctccccgaacaaaacgccagacttgccaaacttcgccgaaacctttgcccgccagagtagctgggaatggaacttcggtcaggctccggcattctcgcatctgctggatgaacgctttacctggggcggcgtggaactgcatttcgacgttgaaaaaggccatatcacccgcgcccaggtgtttaccgacagcctcaaccccgcgccgctggaagccctcgccggacgactgcaaggctgccttttctctctctacaatagcgatctcaatactgtcatcgacaacgtgctgcgtatttttccgttgctgttgtcgtggatctccttctggttgctgtacagcattgttcctaccatccgcgtacctaaccgcgacgcgattgtcggcgcgtttgtcgccgcactcctgttcgaagcaggaaagaaaggtttcgcgctttatatcaccatgttcccgtcatatcagctcatttatggtgtgctggcggtgatccccattctctttgtttgggtctactggacatggtgtatcgtcttgcttggcgcggaaattactgtcactctcggggaataccgcaaactaaaacaagcagctgaacaagaagaagacgacgaaccatgattgcattaattcaacgcgtaacccgtgccagcgtcaccgtggagggagaagtgacgggcgaaattggcgcgggacttttggtgttattgggtgtcgaaaaggatgacgacgaacagaaagcaaaccgtctgtgcgagcgtgtgctcggctaccggatctttagcgatgccgaaggcaagatgaatctcaacgtgcaccaggcggccggcagtgtgctgggtgttccccatttaccctcgccgcaaaaaccacacggcgcaaggccccccagttctcccagggggggctcccgggcccctctagagccctatgcggacctggtcaccctggccctgccctccgtcttgcgcgcacggtcttggccactcgctgcccg

SEQ ID NO: 17775 - DNA, 1954 bp, Homo sapiens
  SIMILAR (1179)..(1901): 991254mologous to Plasmid R100 transposase of Tn10,accession number AP000342,Smith-Waterman Score=1260.
atgttcccggcacaggttcgcgcattaggcgttggtctgtcatatgcggtcgctaatgctatatttggtggttcggcggagtacgtagcgttgtcgctgaaatcaataggaatggaaacagccttcttctggtatgtgaccttgatggccgtgagaacatcaatccaaacatggcactgcgatcccggctttgagcctgatggtgaaggtgagcatattctggttagaatcctcaaaaacggctgcaatacccgttttgtggcggatgcactggcgaaattcctgaaaattcatgcccgtgaagtcagcttcgctgggcaaaaagacaaacatgctgttacggaacagtggttatgcgctcgcgtgccgggcaagggaatggcccgatcttggagcgccctttttcacctgggccagggcttggccaggttggctggaggtattccgcggggacaaagcaatatagaaggagccaatcagctgggcattaccagtattctggtgaaagataaaaccaccatcccggactatttcgcgaaggtgttatgctaaaaaccattcaggacaaagccaggcaccgtacccgtccactatgggcctggctaaaactactctggcaacgcattgatgaggacaacatgacaaccctggcaggtaaccttgcctatgtgtcgttgctctcattagtgccgctggttgccgttgtttttgcgcttttcgccgcttttcccatgttttccgacgtcagcattcagttacgtcactttatttttgccaactttctgcctgctactggcgatgttattcagcggtatatcgaacaatttgttgccaattccaacaagatgaccgccgttggggcgtgcgggctgatcgtcaccgcgttattgttgatgtactccatcgatagcgcgttgaataccatctggcgcagtaaacgagcgcgaccaaaaatttactcgttcgccgtgtactggatgattttaacgctggggccgctgctggcaggggccagtctggcgatcagttcctatttgctctccctgcgctgggcgagcgatctcaatactgtcatcgacaacgtgctgcgtatttttccgttgctgttgtcgtggatctccttctggttgctgtacagcattgttcctaccatccgcgtacctaaccgcgacgcgattaaagctcatgaccaatttctagccgaccttgcgagcattctaccgagtaacaccacaccgctcattgtcagtgatgctggctttaaagtgccatggtataaatccgttgagaagctgggttggtactggttaagtcgagtaagaggaaaagtacaatatgcagacctaggagcggaaaactggaaacctatcagcaacttacatgatatgtcatctagtcactcaaagactttaggctataagaggctgactaaaagcaatccaatctcatgccaaattctattgtataaatctcgctctaaaggccgaaaaaatcagcgctcgacacggactcattgtcaccacccgtcacctaaaatctactcagcgtcggcaaaggagccatggattctagcaactaacttacctgttgaaattcgaacacccaaacaacttgttaatatctattcgaagcgaatgcagattgaagaaaccttccgagacttgaaaagtcctgcctacggactaggcctacgccatagccgaacgagcagctcagagcgttttgatatcatgctgctaatcgccctgatgcttcaactaacatgttggcttgcgggcgttcatgctcagaaacaaggttgggacaagcacttccaggctaacacagtcagaaatcgaaacgtactctcaacagttcgcttaggcatggcaagtttgcggcattctggctacaccataaccacgggaagactcactcgtgggttggacccgcttatcccaatctttctcacatg

SEQ ID NO: 17776 - DNA, 1776 bp, Homo sapiens
  SIMILAR (1003)..(1764): 991254mologous to Escherichia coli K12 tRNA processing exoribonuclease BN,accession number AE000464,Smith-Waterman Score= 1298.
gggccttcagcggcgtccttgtggctgattttcgtgctgattatcggtaccaagcgttggggcgattaagagcgatggcgcggtgatggagtttgatgtaaacgaagctaacgtggtaaaaccgaaaatggcgcacgcgagaaatattgtggctggtcgccggtcacactaagtatcatccttgggcggcggttgaaattggtaacgtggcccaggtcattgcgctctttaccgacgagctgccggcccgctgcgctaaaatcacgcttacaagacagccaaattgaaatcattcttccccaggaagacgcgtagatttttgtgaccgttaacctggcttcataccttgccacatagccaaacccatcctttcccgctacagttaatttcttgtggcgcgaaaggaggcaaaaatgctctatatctttgatttaggtaatgtgattgtcgatatcgactttaaccgtgtgctgggagcctggagcgatttaacgcgtattccgctggcatcgcttaagaagagttttcatatgggggaggcgtttcatcagcatgagcgtggggaaattagcgacgaagcgttcgcagaggcgctgtgtcatgagatggctctaccgttaagctacgagcaagttctctcacgggctggcagccgtgtgtttgtcgcgctgcgcccgaaagtgatcgccatcatgcataacctgcgtgagcaggggcatcgcgtggtggtgctttccaataccaaccgcctgcataccaccttctggccggaagaatacccggaaattcgtgatgctgctgaccatatctatctgtcgcaagatctggggatgcgcaaacctgaagcacgaatttaccagcatgttttgcaggcggaaggtttttcacccagcgatacggtctttttcgacgataacgccgataatatagaagggagcaaatcagttgggcattaccagtatcttggtgaaagataaaaccaccatcccggactatttcgcgaaggacaaagccaggcaccgtacccgtccactatgggcctggctaaaactactctggcaacgcattgatgaggacaacatgacaaccctggcaggtaaccttgcctatgtgtcgttgctctcattagtgccgctggttgccgttgtttttgcgcttttcgccgcttttcccatgttttccgacgtcagcattcagttacgtcactttatttttgccaactttctgcctgctactggcgatgttattcagcggtatatcgaacaatttgttgccaattccaacaagatgaccgccgttggggcgtgcgggctgatcgtcaccgcgttattgttgatgtactccatcgatagcgcgttgaataccatctggcgcagtaaacgagcgcgaccaaaaatttactcgttcgccgtgtactggatgattttaacgctggggccgctgctggcaggggccagtctggcgatcagttcctatttgctctccctgcgctgggcgagcgatctcaatactgtcatcgacaacgtgctgcgtatttttccgttgctgttgtcgtggatctccttctggttgctgtacagcattgttcctaccatccgcgtacctaaccgcgacgcgattgtcggcgcgtttgtcgccgcactcctgttcgaagcaggaaagaaaggtttcgcgctttatatcaccatgttcccgtcatatcagctcatttatggtgtgctggcggtgatccccattctctttgtttggtgctactggacatgggtaccgagctga

SEQ ID NO: 17777 - DNA, 1087 bp, Homo sapiens
  SIMILAR (604)..(1086): 981254mologous to Escherichia coli gidA protein,accession number X01631,Smith-Waterman Score=791.
  misc_feature (1)...(1087): n = a,t,c or g
agatatantctcaaagagcaagacgggacgggggggaacggaacgagataaccgacccacggagggacacgggactaagaggagagcgcgtcagggatgagggaggtagataatagggatcctcacgtaaggtggtgagcagcggaaagcggagcgggagaggaggcgggacgacgagggaggagtcggagtggacgaggacgctagggacgcattcgatcgggccgggcggccattcgtcatatcaactgggagaaggagcgagggaaggggagcgagtgcgggagcgcgggcgaccgttgaggcaggtctggaaagagaaagcgtgactggagctggggtcagtggagggtgctaccgtcgcgtaagaggcgcgctaggcgggggcggcgccagcggagtagaagatgtagacgtcagtggaaaccaggggtgaaattccgaggatgtgtgcagtgcgcaggcgcgtaaagaagcctgaagtaaggggatgttcataggagagcgcgaataccaggtctgtggtgaagccgacaaagggaagtagagtcccggggcggggcttcaatccattttcatgccgcgttatgcgaggcaatcaccatgttttatccggatccttttggcgtcatcatcattggcgggggtcatgcaggcaccgaggccgcgatggccgcggcgcgtatgggtcaacagactctgcttttgacacacaatatcgacactctggggcagatgagctgcaacccggcgatcggcggtattgggaagggacatctggtaaaagaagtggatgcactcggcggtctgatggcgaaagcgatcgatcaggcgggtatccagtttaggatactaaacgcaagcaaaggaccggcggttcgcgctacccgagctcaggcggatcgtgtgctctaccgtcaggcggtacgtacggcgctggagaaccaaccgaacctgatgatcttccagcaggcggttgaagatcttattgtcgaaaacgatcgcgtggtcggtgctgttacccaaatgggactgaagttccgtgccaaagccgtcgtgctcaccgttgggacgttccttgtcggta

SEQ ID NO: 17778 - DNA, 384 bp, Homo sapiens
  SIMILAR (384)..(235): 1001254mologous to Escherichia coli probable copper- transporting atpase,accession number U58330,Smith-Waterman Score= 246.
  misc_feature (1)...(384): n = a,t,c or g
atgtggatggtgctgttacaagaaaggggtccagatccagacaccaagagggggttcttggatctcacacaagaaagaattcagggnccgatcgacatggtgatgccgctgaccaccccgagaatgaacatcgccgccgagaacagcgccaggctgtggctgaaccgtaggccggataaggcgtttacgccgcatccggcatccgagcaccattgcctgatgcgacgcttacgccaaccggttggcgttactcactacggtaatcgacgagagcgccattgccgctccggcaactaccgggttaagcagtgttccagtgaacggccacaaaataccggcggcgaccggaataccgatactgttgtagataaacgcaccgagcag

SEQ ID NO: 17779 - DNA, 1385 bp, Homo sapiens
  SIMILAR (181)..(327): 911254mologous to Homo sapiens Human secreted protein clone cw1475_2 protein sequence SEQ ID NO:102,accession number Y94948,Smith-Waterman Score=229.
atgagggatcgacttggatccccgcagttcggtatatccggtgttcgcgcgggtggtactaatagacgcatggcgcggatgatatccatcccgcctgccagcagcagttccagcatgttatccatacgaactggagtcagagccggtttcgttgacgaacggtgcggcgtcgtgcaggtcagggataagcggtgtctggaatttataagtacgcgcacgcgcccattggcggttaccggtgatggtgttgatttcaccgttatgcgccagatagcggaacggttgcgccagcggccagcgcggtacggtgttagtggagaagcgctggtggaacaggcaaatggccgattccagacgcaggtccgcaagatcccgcactatacgcggcctgaggtgttagaagggatggaagttccgccagtgttactgtcgggcaaccatgccgagatacgtcgctggcgtttgaaacagtcgctgggccgtacctggcttagaagacctgaacttctggaaaacctggctctgactgaagagcaagcaaggttgctggcggagttcaaaacggaacacgcacaacagcaacataaacatgatgggatggccaacattattaagcaacttgaacaagagcagatgaagcaggacgtaccttccttccgtccgggtgataccgtggaagtgaaagtatgggttgttgaaggttccaaaaaacgtctgcaggcattcgagggcgtggttatcgctattcgtaaccgcggtctgcactctgcattcactgttcgtaaaatttccaacggcgaaggcgttgagcgtgtcttccagactcacctgcgttgccggattatcaataatggcattgatatggcaactgaagcgattctggcggacttgcctccggtgcgcgaaacccagggcaagccgaaaatcgcggtggtggcgcatgatctgcgttacgacggcaaaactaaccagcaactggtacgcgagatgatggcgctgggcgacaaaattgaactgcatacctttggtaagttctcgccgttcaccgctggcaacgtggttaatcacggctttgaaaccgacaaacgtaagctgatgagcgcgctcaatcagatggatgcgctggtattcagttctcgcgtcgataactacccgctgattttgtgtgaggcgctatcgattggcgtgccggtgattgccacccatagcgatgcggcgcgggaagtgttgcaaaaatccggcggtaaaaccgtcagcgaagaagaggtgctgcaactggtgcagttaagcaaaccggaaatcgcgcaggcgatatttggtaccacgctggctgagttcagccaacgcagccgcgccgcctacagtggacaacagatgctggagga

SEQ ID NO: 17780 - DNA, 1821 bp, Homo sapiens
  SIMILAR (279)..(398): 751254mologous to Homo sapiens ribosomal protein S26,accession number X77770,Smith-Waterman Score=169.
tcagagagccttgggccagagttccaggggctctgggagtggctgccaggtgagttggacagtccaatctccagtggggtcccgcacagatgggatgcggcttaggaggaatcctgggctgcaggtactccttggtctggtgaccagatttctggcacttgcagcaagctccattgtcaggtccggcagataattctttttgacgtcgttttcgacgtactggccggagtacaccacgattgccacatcgccaaacatccccttgtatgaaacagccatacccaggtctttcacggcagtttccagctcagagttagaaccacgacgcgtatccagcttcttctcaacagccttgaaggaacggaacagcgcccagcctttcggatcgaacacaatgatgttgaccacaccgctggcgttgagcgcgtaggcttcaatgtcatcggtcgggtcatacgtttctttgtcgcgggttgaccatgcagccgcaccggcctggacaatgttgttaccagcgctgcggcccatatcgacttcaacaggctcgaacgcttccccggtcatggtgtatttaccgctgagcaccgccgaaacagcctgtttctcttcgacctgagcaatcgccagctcttcatccttcatgttctgaaggataatgcggcgacggcgatagaccgggtcagcgagattctgcggatcctcatccggcaggcggcggagagtcatcagtgggttaacttcgtgtttcggcttcacataacccggcgtgaattcagacgtgctgccgccacgggagcggatcactttgccggagacaatcggcgagacgtaaagcgccatattgaccaggccaggaatttgcgacaggtaaaccttctctgtactgaagggataggtttcgcggaaaaagatacgcaggaaaagcggatcgaatttgaatttcttctcattgaccgccagcagttgggcagtggtgtaaacggacatagatttttcccgtaaaaaaagccgcgcaagcgggatgctgattgcagtaccggcgaacgcgttacgtttaatgttgtcgtcggtgacggcagatggccagaggacatcttcaatacggaaagagccagatttgtaatatgccagttccgcgctgttctggtctgcggttacagccaggatgcccattgccgcgccagcatgagcaccatcccagacggtcagcttgccagaagtggcatccagcatgagcggcgtcatggctggagtggaagccgtcagttcgccaggaccatacgcagtgtgcgccgggtcgctgttaccgagcggctggttatgtgtgaaaacttcagtaattgccatgatagcctctgcttggagtgcaccgggtgctgtttccatcaaacgatccagcgccgtatcggtacgcatctgggcactttgcggtgcagcagccagaatgcgctgtgcgctctctaccgtcatacccggcgtttcggcaagtgttggcgcctgtgactcacgccctttagcctcgtcgcagttcaggatgcccatgatgcgactattctctgcagctactgctgcagtaacctgcgcactgacatctacaggggctgctacggaagcaattgtcgtgtcaacggtagtggcctgttcagctgatgcagttgtctgagttgctgcctggtcaacatgtactcctctaagttttgccagcgcggtccttccgccccgtggtgaagactctactctaccggttgggtgaccaactctcccagttctattattgacatccccagtgggtagtctcaggcaactcgttgaactgctcat

SEQ ID NO: 17781 - DNA, 2502 bp, Homo sapiens
  SIMILAR (112)..(1713): 1001254mologous to Homo sapiens WDR1 protein,accession number AF020260,Smith-Waterman Score=2840.
atggggccaggccttgcacaaagatactccttcagagctcatctcataaaaatccctggggcaggccctacttcaccagagcccaacgtacagcggcagctggcagagaaagtgcagcccacatggatgctctcgcaggttagagttgagagcctgcagattttccatgctgaaattgcaaactgctggtggttctaccattctcaggtctggagacttccttcccacagctccactcagcagggccctgagtccggccgggaggactgcgggcagctgggacagaagtgtttggagaccgccgagtgcatccacttcttttaccagatgtcccttcccaataccgccgatcgccgggttgcagctcatctgccccagagtgtcgatattgtgtgtcaaaagcagagtctgttgacccattacgtcgcgcgccatcgcggcctcggtgcctgcatgacccccgccaatgatgatgacgtcaaaaggatccggataaaacatgaaagctgctgctccaccatgccgcccatggtcatcacctgcgtgcggatactttccagttcggcgtttatcgggccgtccggctgcggtaaatcgacgctgctgcgtaccttcaacaaaatgtttgaactgtacccggagcagcacggcaatggcaccaaaaccggcgaccagattatcgctgccactcaccagaatctcgaacagcgagtgcaggaaggtaagttccgtgaggatctgttccaccgcctgaacgttatccgcgttcatctgccgccgctgcgcgaacgtcgggaagatattccccgtctggcgcgccattttttacaggttgccgcgcgcgaactgggcgtagaagcgaagttactgcatccggaaaccgaagctgctctgacgcgtctggcggccatcaccgttagccagcggcaggctgttgagaagaagctggatacgcgtcgtggttctaactctgagctggaaactgccgtgaaagacctgggtatggctgtttcatacaaggggaatcactctaccgggagcgaaatcatgatcaagattggcgttatcgtcgatgattttaccggcgcgacggatatcgccagttttctggtggaaaacggtctaccaacggtaaaagtgagtctggaagacacgctcaacgccttcgccgttggaaattttacgaacagtgaatgcagagtgcagaccgcggttacgaatagcgataaccacgccctcgaatgcctgcagacgttttttggaaccttcaacaacccatactttcacttccacggtatcacccggacggaaggaagcgggaatatttatcagcattaccttaatgaatataaagttaagccagtaattcacaacaaagattggcgattcaagcggtttgccgtagaattaccgccctcattaagagtcatcaaggtggttaaccacaaaccccgcatcggtctggaaactgttgattccggacgcatcatgctggataacgaggacatcacccacgttccggcggaaaacagctatgtgaacactgttttccaaagctacgcacttttcccccacatgaccgtgttcgaaaatgtggcatttgtacaacttatggcacaggtttgcaggcctgataagacgcgtaagcgttgcatcaggcaatggtgctcggatgcaggatgcggggtaaacgccttatccggcctacggttcaggcacaagtttgtaggcctgataagacggatgaagcgatgttttggccttacgcgaccttttttgcacgctattcacggcgtgccaaatattcatggtcgctaccagcagttcgatgataatccgttcaagcaggtagcgcaaaatccgttggcgacgtttagtcttgacgttgacactgcgagttatgcgactgtaaggcgtttcttcaatcaagtgctgttacgtccgccagacgctgtgcgggtggaggaaatagtcaattatttcccgtctgattgggatatcaaagacagacaatttattccggcctctaagccaatacctttcgctatgcgctacgaattggcacctgcaccatggaatgaacagcgaacattgctgaaagttgatatcctggcgaaagatcgcaaaagtgaagagttaccagcttctactctggtctttcttatcgacacttctggttcaatgatttctgatgaacgtttgccacttatccagtcttcgttgaaattattggtcaaagaacttcgtgagcaggataacattgccatcgtgacctacgctggcgactcccgtattgcattgccttctatctccgggagtcataaggcggaaattaatgccgcaattgattcgctggatgccgaaggcagtaccaatggaggtgccgggctggaactggattatcagcaggcgacgaaagggtttattaagggcggcatcaatcgcattttactagacagtgaggggtcctctaaagtggacccgcaggcatgcatgcattag

SEQ ID NO: 17782 - DNA, 1698 bp, Homo sapiens
  SIMILAR (679)..(1692): 961254mologous to Escherichia coli hycE,accession number X17506,Smith-Waterman Score=1743.
ttattcgtggcgcgcagtatgtcgcatcctggggcacatagtagcgacaaagcggtatacacggcagtgtgccccatacgatttttcttttcgccttttctttacaccatttacaccggtctgatggctgcgggagcctgccacaatccggtcatagtccattgcctgtgtcagcatggaggcatacagggggacttctgcacgataagcattttcactgcgcagataccagctctcatcactgtcccggttgagggagtagttaaaggcaccggcctgcagcctgttcccccttgttttggcatcttcagcagaaacgttgattcctgaaataccctgcagggctttaaaatccactttttccatatcgatagtcacgttttcctgcgcgtaggtatcggtataggttaatttttcttcaacacccgcgatgtttttgtatttggcgcttaacggctcaagtgtcttggcagcatcttctttggtggttgcaccaatggaggcaaattgaattttggtttcagaagattgcttaagcaccttgtcacctttgtagacataggtaatggcaatttcagtgccgttcagattggcgctgaatttcttcgattcttctttgtcaccgcagccagcaagagagaaaccagacagatgcaacaacgagggaaacagcgggctttccgtctgttcgtcgatggcgaaaacattatcgacgccgactaccgtctgttctacgtccatcgcggcatggaaaaactggcggaaacccgtatgggttataacgaagtgaccttcctctctgaccgtgtgtgcgggatctgcggctttgcccacagcaccgcctacaccacgtcggtggaaaacgcgatgggtattcaggtgccagaacgtgcgcagatgatccgcgccattctgctggaggtagaacgcttgcactcgcatctgctcaaccttggcctggcctgtcactttaccggcttcgactccggctttatgcagttcttccgcgtgcgtgaaacctccatgaaaatggcagagatccttaccggtgcgcgtaaaacctacggcctgaacttgatcggcgggattcgtcgcgatctgctgaaagacgacatgatccagacccgccagctggcacaacagatgcgtcgtgaagtgcaggagctggtggatgtgctgctgagcactccgaacatggaacagcgcactgtcggcattggtcgtctggacccggaaatcgctcgcgacttcagtaacgtcggcccgatggtccgtgccagcggtcacgcccgtgatacccgcgccgatcacccgtttgtcggctatggcctgctgccaatggaagtccacagcgagcagggctgcgacgttatttcccgtctgaaagtgcgtatcaacgaagtctataccgcgctgaacatgatcgactacggtctggataacattccgcaccgctttgcgctgggctttgccgaagcgccgcgcggcgatgatatccactggagcatgaccggcgacaaccagaagctgtaccgctggcgctgccgtgccgcgacctacgcgaactggccgaccctgcgctacatgctgcgcggcaacaccgtttccgatgcgccgctgattatcggtagcctcgacccttgctactcctgtaccgaccgcatgaccgtggtcgatgtgcgtaagaagaagagacat

SEQ ID NO: 17783 - DNA, 1668 bp, Homo sapiens
  SIMILAR (540)..(650): 601254mologous to Escherichia coli RIBONUCLEOSIDE-DIPHOSPHATE REDUCTASE 2 ALPHA CHAIN (EC 1.17.4.1) (RIBONUCLEOTIDE REDUCTASE 2),accession number D90891,Smith-Waterman Score=104.
atggattaccacgcgctgaatgcgatgcttaacctctacgatagcgcaggtcgcattcagttcgataaagaccgccaggccgttgacgcctttattgcgacgcatgtgcgtccgaacagtgtgaccttcagtagccagcagcagcgcctgaactggctggtcaacgaaggttactatgatgaaagcgttcttaatcgctactctcgcgactttgtcattacgctgtttacccacgcacacaccagcggttttcgtttccagacattcctcggggcatggaagttttacaccagctatacgttgaagacattcgacggtaaacgttatctggaagattttgccgatcgagtaacgatggtggcgctgacgctggcacaaagcgatgagacgctggcgttgcaactgaccgatgaaatgctgtcaggacgctttcagccagccacgccaacattcctcaactgcggtaagcagcagcgcggcgaactggtttcctgttttttgctgcgtattgaagacaatatggagtcgattggtcgggcggtaaattccgcactgcagctgtcgaaacgcggcggcggcgtacatttttgctgtcgaatctgcgaaaagcgggcgcgccaattaaacgtattgaaaatcaatcttctggcgcgcgcctgcggattgcgaaccgcagttcgtcagtcagcaaaagttcagttcggcgactatcaggctaacggcatgatggcagttgctaaaaaactgggtatggcaccgcgacaattagcagagcaggtgctgactcatctggatcttaacggtatcgccagcaaagttgagatcgccggtccaggctttatcaacattttccttgatccggcattcctggctgaacatgttcagcaggcgctggcgtccgatcgtctcggtgttgctacgccagaaaaacagaccattgtggttgactactctgcgccaaaccgggggttttttggggggggggccccgctaggtacgaccctccaagatctcactcgcccaacaaaggaagacggacttcaggcaaaaccaatcagcttttgggccagctttgctttgcagtttgtgaacgtcaaaatcattttgtacggtgttacggcactgtcgacgtttgttctgccgcaaacacaggcgttaagctgggtagttggcgtcagcgttttgctggcgatgattgggacgtttggcaatgtgtgctgggcgctggcggggcatctgtttcagcgattgtttcgccagtatggtcgccagttaaatatcgtgcttgccctgttgctggtctattgcgcggctttcagtaaaggtacgagcgataacgtcgcgctgctgttccggagtcagagagttaaagcgaactgcataaccggatacacggatggtcagctgcggatatttttccggatgcttaactgcatcttccagagtttcgcgacgcagaacgttaacgttcaggtgttgaccaccttcaacgcgaacttctggtttcacttctactggaacttcacggtattcaatgtcacccagtttgcttactgcaaccacttcatcttctgcataacctgcttttgcaacgatgcaacgccgttcgcctttttcgctgtccagcagccagaaagagttcaccgaaagacagcgatactgttgtag

SEQ ID NO: 17784 - DNA, 1202 bp, Homo sapiens
  SIMILAR (516)..(16): 991254mologous to Escherichia coli K12 orf, hypothetical protein,accession number AE000508,Smith-Waterman Score=854.
ctagaggatccccaaaccgttgagcggcatatccggcgcgtcggtttccagcaataacgatgccagcggtaattttgcgatgacatcgcgggttttactggcgcgtggataggtgatagtaccgcctacgccaattttgtagcccagctgtacaaaccgttcggcctgttgcaggctgccggaaaaaccgtgaaccacgccagtgcgcggtaaatcgtggcgtttaagatgcatcgccagtttgtcgtgcgtgcgccgtgaatgcaggatcaccggcagatcgtagcgtttcgccagtttcagttgttcgtcgagtaaccactgctgcctctcaaattgcggatcgtcgccaaagagatccagaccgatctcccccaccgccaccaccttcgccggacgcctttccagcgcctgctgtagctgctcaagagacacatcgctatgtttttccaacataccaggatgcaagcccaatgcggcatacagcggttgataattttccgctaatgccaacacacgggcaaaattttccgcctctgttgccggaacaatgatcttgcctacgcccgcttgtgccgcgcgttgcaggctggcctcttcatcgccaggagcgtcggttcacttgggcaaccagcgtatcgttggcgactggcgcaggcggaatgacaatcgattccggcgtcaccactggcaccagatggcgggtaagcggcgctttttcagttaatagcttgccaaccgtggcgaggaaataacgaccgcataaacgcccaagtttatagtcttcacgcagcgccggaatccgactgccaagcgcgatactatgtaatggcttcggcggataaatttcgaatatccgcagcttgcccggtggtttctcaataaattgctgaatgtcacgatagctggtttcatgatgctgcaccagattgaccagcggctgcaggctactgtcacccagccagcgttccatgcgtttgaaccactggggcgtgtaatacatttgtgacggcacagtgcgaatgacgaccaacgttttagcgccctgccttgccgcctctttaaccggaatcgcatcacctgatcccgccatccaagtaggtaatcgcctttccacgaccctccgctacgaataaagcccggtatccgcactggaagccccaatcacatccacccagttacggtccggacgcaaaacaacc

SEQ ID NO: 17785 - DNA, 2866 bp, Homo sapiens
  SIMILAR (1772)..(2350): 951254mologous to Escherichia coli K12 putative kinase,accession number AE000393,Smith-Waterman Score=926.
atgttaggggccgcagaggccctgctcttccggctacagacagcacttcaagcccagaaccgcaggcccttcctgcctcatgagggcctgggccttgcagagctgtcccagtgctgggcagggctggagtgggcagaggctgcaaggagccaggccctgcagcagaggctactgcagctgcagcggctagaaaccctggcccggcgcttccagcacaaggcagccctccgggagagtttccttaaggatgcagagcaggtgctagaccaggccagagccccgccagccagcctggccacagtggaggcagccgtccagaggctgggcatgctggaggctggcatcctgccccaggaggggcgcttccaggccctggctgagatcgcagacatcctccggcaggagcagtaccacagctgggcagatgtggcccgcagggtcgaggagccaggctacgcagagagccagcctctgcaaggacaggtggagacactgcaggggctgctgaagcaagtacaggaacaagtggcccaacgggcccggcgccaggctgagactcaggcccggcagagcttcctgcaagagagccagcaactgctactgtgggcagagagtgtccaggctcagctgcgcagcaaggaggtgtcagtggatgtggcctcggctcagcggctgctgagggagcaccaagacctgctggaggagatccacctgtggcaggagagaggtttccagctggtaaagcaacaccccaaagatcccgtgacagtttatggctgcgaccctcactggctagggagtcttccttgctgcaaagccaacgttccatcttctccactgagctcagaaacagctgagaacaaaggaaaaggcaagagacagtcggtggagggtccagccactgcagttggagtgactgttccagtggcacagactggagatggagtgcagttcacacggacacaccacgtggtgctgaagacgaccctctatgacatggatgtggagcccagctggaagtacacggctatcggctgccaggaccgaaatattcggatatttaacatcagcagtggaaagcagaagaagctgtttaaagggtcacagggtgaggacggcacactcattaaggagaaagccacgagcctccccaacaatgtggcacgggacctgtgtgggctggaggcgcagctgataagccaccaggggctggagcgagaactcgtgggcaccgagcggcagagtgggcacatgcctgccgtgcgggtttgggacgtggcagagcacagccaggtggccgagctgcaggagcacaagtatggtgtggcttgtgtggccttctctcctagcgccaagtacattgtctctgtgggctaccagcatgacatgatcgtcaacgtgtgggcctggaaggaattaggccaaacaagcccggggacaccctttaaacccagccccaaattaaatgacagtgtggccttaattggccaccgcatcgctcacggcggcagtatttttaccgagtccgtcattattaccgatgaagtcattgataatatccgtcgcgtttctccactggcacccctgcataattacgccaatttaagtggtattgaatcggcgcagcaattatttccgggcgtaactcaggtggcggtatttgataccagtttccaccagacgatggctccggaagcttatttatacggcctgccgtggaaatattatgaagagttaggtgtacgccgttatggtttccacggcacgtccgcaccgctatgtttcccagcgcgcacattcgctgctgaatctgacggaagatgactccggcctggttgtggcgcatcttggcaatggcgcgtcaatctgcgcggttcgcaacggtcagagtgttgatacctcaatgggaatgacgccgctggaaggcttgatgatgggtacccgcagtggcgatgtcgactttggtgcgatgtcctgggtcgccagccaaaccaaccagagcctgggtgacctggaacgcgtagtgaataaagagtcgggattattaggtatttccggtctttcttcggatttacgtgttctggaaaaagcctggcatgaaggtcacgaacgcgcgcaactggcaattaaaacctttgttcaccgaattgcccgtcatattgccggacacgcagcttcattacgtcgcctggatggaattatattcaccggcggaataggagagaattcaagcttaattcgtcgtctggtcatggaacatttggctgtattaggcttagagattgatacagaaatgaataatcgctctaactcctgtggtacggactggaaaaacgaaattaatgtccgcgattttattcaacataactatacaccgtatgaaggcgatgaatctttcctcgccgaagcgacgcctgccaccacggaattgtgggaaaaagtaatggaaggcatccgtatcgaaaatgcaacccacgcgccggttgatttcgataccaatattgccaccacaattaccgctcatgatgcgggatatattaaccagccgctggaaaaaattgttggcctggcaacggatgcgccgttgaaacgtgcgctacacccgttcggtggcattaatatgattaaaagttcattccacgcctatggccgagaaatggacagtgaatttgaatatctgtttaccgatctgcgtaaaacccataaccagggcgtatttgatgtttactcaccggatatgctgcgctgccgtaaatctggcgtgctgaccggtttaacaagatggctatgggccgtgggcgcattatcggggactaatcgccgggaaaagtttgctgaccactgttctgatgaattccttggttga

SEQ ID NO: 17786 - DNA, 1479 bp, Homo sapiens
  SIMILAR (394)..(936): 981254mologous to Escherichia coli arginyl-tRNA-synthetase (AA 1-577),accession number X15320,Smith-Waterman Score=894.
atgggtacccgcagtggcgatgtcgactttggtgcgatgtcctgggtcgccagccaaaccaaccagagcctgggtgacctggaacgcgtagtgaataaagagtcgggattattaggtatttccggtctttcttcggatttacgtgttctggaaaaagcctggcatgaaggtcacgaacgcgcgcaactggcaattaaaacctttgttcaccgaattgcccgtcatattgccggacacgcagcttcattacgtcgcctggatggaattatattcaccggcggaataggagagaattcaagcttaattcgtcgtctggtcatggaacatttggctgtattaggcttagagattgatacagaaatgaataatcgctctaactcctgtggtattccggtgaatattcaggctcttctctcagaaaaagtccgtcaggccatgattgcggcaggcgcgcctgcggattgcgaaccgcaggttcgtcagtcagcaaaagttcagttcggcgactatcaggctaacggcatgatggcagttgctaaaaaactgggtatggcaccgcgacaattagcagagcaggtgctgactcatctggatcttaacggtatcgccagcaaagttgagatcgccggtccaggctttatcaacattttccttgatccggcattcctggctgaacatgttcagcaggcgctggcgtccgatcgtctcggtgttgctacgccagaaaaacagaccattgtggttgactactctgcgccaaacgtggcgaaagagatgcatgtcggtcacctgcgctcctacattattggtgacgcagcagtgcgtactctggagttcctcggtcacaaagtgattcgggcaaaccacgtcggcgactggggcactcagttcggtatgctgattgcattgctggaaaagcagcagcaggaaaacgcccgcagcgcgagttcccggtgggcgtgggctccgcggaccccgcactcggagcctgcggctggtccccagcggcctgggcatgaaatcaaaatggcagtgggtgtcgataaaacggcaaatcaagccagatcctcattgttaaatgtcgggtcgttcgcctgcggagcgtcgctcacttcggcaaccagcgtatcgttggcgactggcgcaggcggaatgacaatcgattccggcgtcaccactggcaccagatggcggaacttgaggcctattacttttttaccaacgctgaccctccggatcgtcttatggcatctgccacctcgcacttcgttccgtagagctcgagctgacacaaatttataccggcttatatcacccttatacgattcgttacgtccagtccgaattcaatctaacattaccccggccactcgaaataatatgccccgcaaaatctccccactcattttgtacctggaccaagactggatcagcccaatgtcatcaatgatagactggattagaaaatgtggcacataa

SEQ ID NO: 17787 - DNA, 846 bp, Homo sapiens
  SIMILAR (388)..(843): 911254mologous to synthetic construct InsB peptide,accession number Z37515,Smith-Waterman Score=720.
atgcgcgatcgtgcgacgcgtgaaaaactgtttattgcgggctggacgcgagcggaaaaaaatgatgccaatgatacccgcgctatcattcaacgtctggtggagatccgtgcacaacaggcaacactacttggttttcctcattatgccgcatggaaaatcgccgcagtcatcgcaaaaaagacgctggtaacgcggagaaatgcaaatcaaaaccacaatgagataccaccttactcctgcaagaatggccatagtcaaaacataatagttgctggcaaggattcggtgaaaagggaacacttttacactgctgatgagaagctactgacggggtggtgcgtaacggcaaaagcaccgccggacatcagcgctatctctgctctcactgccgtaaaacatggcaactgcagttcacttacaccgcttctcaacccgccgggcagtgacgtcatcgtctgcgcggaaatggacgaacagtggggctatgtcggggctaaatcgcgccagcgctggctgttttacgcgtatgacagtctccggaagacggttgttgcgcacgtattcggtgaacgcactatggcgacgctggggcgtcttatgagcctgctgtcaccctttgacgtggtgatatggatgacggatggctggccgctgtatgaatcccgcctgaagggaaagctgcacgtaatcagcaagcgatatacgcagcgaattgagcggcataacctgaatctgaggcagcacctggcacggctgggacggaagtcgctgtcgttctcaaaatcggtggagctgcatgacaaagtcatcgggcattatctgaacataaaacactatcaataa

SEQ ID NO: 17788 - DNA, 443 bp, Homo sapiens
  SIMILAR (441)..(49): 961254mologous to Escherichia coli D-serine permease,accession number X86379,Smith-Waterman Score=642.
ccggtccgtcttgtgggtagattctctcaggaaggctccggtccgacttgtgggtacaggtttaaagggcaggcgctgacccagaaatttaaggaaaagtgggccaccgatcagtgatgccatcagcccaaccagcaaaccgtagacgatcaccgaaccgatatctgcgcccagcttattggcaacatataaagcagccggatgtggaggaaccacgcagtgcactgccatcaatgcggtacatagcggaatggcaagctttaataatgaggtattggtttttttggcaattgaaaaagccagaggaatcaatagcacgacgcccacttcaacaaacagcgtgatgccacaaatcaggccaaccagcaccataatgacatcaactgaaagccaacggcagcgttgaagtgtcagaccaattctctcaggaaggccgccaatca

SEQ ID NO: 17789 - DNA, 1395 bp, Homo sapiens
  SIMILAR (793)..(1389): 1001254mologous to Escherichia coli L-serine dehydratase 2 (L -serine deaminase 2),accession number U29581,Smith-Waterman Score= 1036.
atggtgctggttggcctgatttgtggcatcacgctgtttgttgaagtgggcgtcgtgctattgattcctctggctttttcaattgccaaaaaaaccaatacctcattattaaagcttgccattccgctatgtaccgcattgatggcagtgcactgcgtggttcctccacatccggctgctttatatgttgccaataagctgggcgcagatatcggttcggtgatcgtctacggtttgctggtgattcatcaacgttttgtccttgccggagccaaacttgcgcaagctgataaagcaaaattaaaagtactgaatacagaagctgcgaccctgaccagccagtttaaccagcgattactggcagcaaataaatccggcggtctggttgtgaacgatatcgcgcagctggcaggaatgagtgagcaagagattgcgctggcggcagaggcggctcgcgagaaaggtctggataacaaatggctgattccgctgctgaataccacccaacaaccggcgcttgccgaaatgcgcgatcgtgcgacgcgtgaaaaactgtttattgcgggctggacgcgagcggaaaaaaatgatgccaatgatacccgcgctatcattcaacgtctggtggagatccgtgcacaacaggcaacactacttggttttcctcattatgccgcatggaaaatcggcgatcagatagcaaaaacacctgaagcagcacttaactttatgcgggaaattgttccagcggcgcgtcaacgtgcgcaccccagctggaagactgccaggaacagcgtattcgatattttcaaaatcggcattggcccttccagttctcataccgttggaccaatgaaagcgggtaaacaatttaccgacgatctgattgcccgtaacctgcttaaagacgtgacccgcgtggtggttgacgtgtacggctcgctctctctgaccggtaaaggccaccacactgatatcgccattattatgggcctggcgggtaacctgccggataccgtggatatcgattccatccccagttttattcaggatgtgaatactcatggtcgcctgatgctggcaaacggtcagcatgaagtggagttcccggttgatcagtgcatgaacttccacgccgacaacctttctctgcatgaaaacggtatgcgcattaccgcgctggcgggcgataaagtcgtttacagccagacttactactctattggcggtggctttatcgttgatgaagagcattttggccagcaggatagcgcaccggttgaagttccttatccgtacagttcagcagccgatctgcaaaaacattgtcaggaaaccgggctgtcactctctggcctgatgatgaaaaacgagctggcgctgcacagcaattaa

SEQ ID NO: 17790 - DNA, 1377 bp, Homo sapiens
  SIMILAR (769)..(1212): 791254mologous to Escherichia coli histidine-tRNA synthetase,accession number M11843,Smith-Waterman Score=571.
atggcattgggaaaagacttggagcagggtcctcaccacattggttctcaccatttacaaatgaagaagtcaggtcgtcccagacgtttcgctcctgagcaggcaatctctgcggcaaaagtgctttttcaccaaaaaggtttcgatgctgtcagtgttgctgaagttactgattatcttggtattaaccccccgagcctctacgcggcttttggcagtaaagctgggttatttagccgtgtactcaatgaatacgtcggtacggaagctattccgcttgccgatattcttcgtgatgatcgtccgcatcgacattttgccgaagcgaccatcatgccaaccgttattacgcacgccgccgttcccctatgcattggtttagggttgggttcgaaagtcatccctccgcgtctgttatttgccggaatcatcctggcgatgctgcccgacgccgacgtattgtcgtttaaatttggcgttgcttacggcaatgtttttggtcatcgcgggtttacccattcgctggtgtttgcgtttgttgtcccgctgttatgtgtgtttattggacgccgatggttcagggctgggctgattcgctgctggctgtttttaaccgtctcgttgctatcgcacagcttgctggattcggtaaccactggcgaaaaaagcaccgttattgaagtcggcgttgatgtgcctaacgccagtctgatgattatcgaaaacccggagcgtctgggtctggcgcagttacaccagctgcgcgggcgcaatcagcagttaaagaaaggggaaccgacagcgcagtaccgaaaacttcgcagcccaactgatggaactgacgataacgccctttctgcggacgctcgtgacggaacatcggcccgctggtggcgcgcgctgggtatttccgagcacgtaactcttgagctgaactctatcggttcgctggaagcacgcgccaattaccgcgatgcgctggtggcattccttgagcagcataaagaaaagctggacgaagactgcaaacgccgcatgtacactaacccgctgcgcgtgctggattcaaaaaatccggaagtgcaggcgcttctcaacgacgctccggcattaggtgactatctggacgaggaatctcgtgagcattttgccggtctgtgcaaactgctggagagcgcggggatcgcttacaccgtaaaccagcgtctgctaaattaccgcctttcagccaatttgatcgagaacaatttatctctttttgatggagaaggtatctatcggttttatcaccccaagccaacaaaaaacgccgagcgagagaaccgccagtgccgcaacgatctgtttttccgatgtggatttttctgcccaccatga

SEQ ID NO: 17791 - DNA, 3519 bp, Homo sapiens
  SIMILAR (2070)..(1972): 361254mologous to Homo sapiens MTG16,accession number AB013286,Smith-Waterman Score=41.
ttttttatttggcaaacatctcgtttattaccatcatgaatatcatttggacctctgcaaagactatatacattcacattaacgtacacgctcagcttcaggcctctggcgggctgttcgtggctggttcagtagctgggtcactcccgtattgcactgagttcctagaactcctgatagccacgcacacagatgccaggccacgggccacgccacgcacacagatgccaggccacgggccacgccacacacacagatgccaggccacgggccacgccacgcacacagatgccaggccacgggccacaccacgcacacagatgccaagccacgggccacgccacacgcacagatgccaggctgcgggccgtgcctgctgtctgtccttgtactcggtgcaagcatgaatttctttatccctttatttccttcttgaaatcgctgaggcagttgagaggagtggagggagggtgggcagggctggaggatgggagggagcacgtctgatagaaaacgtcaccgagacacaccccagggccagaggcgaacgcatctgaggggtggctgggcaggagcaccagggctatgtacacggtcagggtcttccctggggaggaggcagagggctgcttttgtttgtagtttttttgttttttctgcaaaagtttggaagaaaggggagtagctgcggtggggcgatggggccgagaggttggagttggggcgatggggctgagagaggtcggagctggggtgagggggccgagagaggtcggagggcgcggagaggagagaggtagaggaggacgggctggccgagaagcagtgtttcagggaggcctgctggctccgcatgctcgaaaagcagtcgagaatcaacccaaaagattgtcacagttttgtttcggaattatgctctctctgggaagaaaactttagcactttttttccacaagtggaaaacggaaatatgaaaagtcacagggggcgtgaggacagacggcgtgtcctttcctacacatatggagacgcaggccggagcaacggcacacggaccacgcacacgcggcggacgcaccaacgcctacgcagaagagaacaaaagtcgcttctaactgggcacaaaccctctgcacccaaatatcccgacacccacaaacaaaatcagaacagaagagaaaaagacccacatccaaacaaacccaagagcaagtgaaacagtgaaaaaaatactttggcagtgacaaacaaattttggattttgatttcttgtgtttgcttttttggatttcctttggagcagaggtgtgtccggtatccttggctggctagctagcaaggtagttcacaagtatgcttcctttgcttttttaaaaaaactttttggatttttacttaaagccaaagagtttaacattacaggaaaaaaaaatctgaaaccaaaaatgcatcttgagtcagaaatcgaaatctttcctcccgtcttcgctgatcagcctcacgcccctgggggaggggcacagctgggttcagatctccagctataaaatcgcagttttctttctccctttttaatcaggagggggagaacccccccgttttctttgtccatttctgagtagctcttttgccaacacacaaaaccccccaaaattctttgctgaaaatataagccaccaattcgattttttcattgaagagaaagtgtgtgatagtcatagagagagagaggatagagaagacagagggggagagacagacagagaggaaaagagaggtgggcagagccgccgcgcctgcggcatctgctctgctgtctaaagctcagtcgaggcttctgaggatgcttgaagagacgttgtcaggaggtctccgcgcggaatcattaggtagctgaggcaggtgcactgaatgcggttttgttggttctgtgtcttctttcggagaggggcagtagcagcagtgactaattggtcggctcccacaggtcaggcggggcgcagtgtctggcaggccaggcatcggaggccaggcacagcatccggtgggcctggagctgggtggggttggcacggtgctgtgtccggcaggccaggggccagtggggtcagcggggcacggtgtccagtgggccaggtgggctgggggagccggggcgagaaggccccgcagagccggcttcgctggggctggcagcacccacaggcagggaggggcccaggctgtgggcggcttcgggcggtccaggcaccgggtcggccaccacggctgtggggccctgcaggctctggccacacacgtggtgatgcttctcccagtcccgatgctggcagaaggacccgcagtagcgtgccgcgttgcagccgctgcacgtctcactggctttccgcccgcagttccagcagctctcgctggagtcctcctgctggttgatgaccgtcagggcgtcctcggaggcctgccgcttcgcctcggccagggcccgctccatcttggcacgctccgtggtgatgagctcgtgcgctttgcgctccgcgtccgacacggctttctgcagctccgacatggcctgccgcttcacctcattcacggcctcttcagccttcctccagatgtcctcaggcacgtagccggtgagggtcctcggcaggaactcgcgaggcacgtctagctgaggcccttcgggaccggcggagctgctgcggggccgggccgcggcgggagcggggcccttctttgtgtcctcggcgtcgctgtagcgccgcgcccagtggttgagctccccgcggtcggcctcctggcacctgcgcagcaccgtgagcgagcgccgcgtcttctccaccatgtccatgatgcagttcaggaggttgttgaggtgcttccactcttctgcccactcacgctctgtgagcttgtggtcgatcacttcttcctgccgggacccaggcaccagctgggccaagtactgggcgggcgtctgcttggccaggcgtgcacagtgcaggagctcccgctgcagcaagggcaggtttgccttcaggaagggaatgacaaacggccgcagagggaagttggtggcctcctgaagcttggaatgaaactcctcgatcgtcaatgtcgagttcaccaggcccagcaccagtgtgcgcacgcgctccccaatctctggggagatgtcgctgccaaactgctgcagtgtggtgaggaagcgcttgagcttgctgagctgccgggccccgcaggctgggggcaggtgctgtgtggacaaggaggctgtggacgaggtggccgggccattgctgaagccgttgggtgtgcacggtgcaccattgatggctgttggtgagtggctgctgccgttcatcagtgtgtgtggcgtgaaggagggggggcgtgtggccccctgggatgcggcaggcggtgggggcggcatgctggggggtgtggaccggggctgcgtcttcacctccgctggggagtccggcatcgctgaggccttagctttcctgtccactgggg

SEQ ID NO: 17792 - DNA, 460 bp, Homo sapiens
  SIMILAR (91)..(186): 381254mologous to Homo sapiens dJ1137F22.1.1 (core-binding factor, runt domain, alpha subunit 2; translocated to, 2 (MTGR1, MTG8/ETO/CDR family protein) (isoform 1)),accession number AL034421,Smith-Waterman Score=53.
  misc_feature (1)...(460): n = a,t,c or g
tgctgccccttcgtcctctcgccttctccagaccacgccatgggagggagctgggtgcggtgggaaagccccaccctgggagtccaggatctgggctcaagtcccacatgccccacatcgccgtgtggcccaggtgaggcactcctgcgaagctctgtgcccaccctcccacgccaccctcccatggcactgctaggaaggaacttgaggcccagagaggtcgagcaccttgacctttgaggcccgaggtcaagttgagctttcggccacccagcccaggccccctctgctcggacctgagcagggctgtgcacccctgcatgctacccaggccctccttccccaccccacaggcaaacctgcccttgctgcagcgggagctcctgcactgtgcacgcctggccaagcagacgcccgccgaattccaccacacggactacgatctcgaannccccccatc

SEQ ID NO: 17793 - DNA, 240 bp, Homo sapiens
  SIMILAR (79)..(240): 941254mologous to Escherichia coli VisC,accession number D90281,Smith-Waterman Score=244.
atgaaaaagatcctgacaaccccgatcaaagctgaagatctgcaagatattcgcgtcggcgatgtgatctacctgaccggtacgctggggagcggcttacgcgttgccgtactggagcagcgcgtacaggaacctctggcggcgaatgcaccaccacaactgcgcgtttcggctatcaatgccgccagcgaaaaattactcacccgtcttggcgtctggcaggacattctctctcgtagg

SEQ ID NO: 17794 - DNA, 456 bp, Homo sapiens
  SIMILAR (1)..(171): 1001254mologous to Escherichia coli tartrate dehydratase,accession number L14781,Smith-Waterman Score=296.
atgaaaaagatcctgacaaccccgatcaaagctgaagatctgcaagatattcgcgtcggcgatgtgatctacctgaccggtacgctggtgacctgccgcgacgtttgtcaccgccgtttgatcgaactgaaacgtccgatcccttacgatctcaacggcaaagcgattttcgtccgctgcattcttgatgctgatgcccagcgcgaaggtatcaatgcctcgacacgctacccgaaaaactgggtgcagtcgggggatccggcgcgcgaatccaccatgattcagtcacaaattaaccgcaatattcgtcttgatcttgccgatgccattttgctcagcaaagctaaaaaagatctctcatttgccgagattgccgacggcaccggtctggcagaagcctttgtaaccgcggctttgctgggtcagcaggcgcttcctgccgacgccgcccgcctg

SEQ ID NO: 17795 - DNA, 4221 bp, Homo sapiens
  SIMILAR (159)..(2117): 1001254mologous to Homo sapiens MTG8-related protein MTG16a,accession number AB010419,Smith-Waterman Score=3484.
ggagggcctcggctttccagggacagaggcccaactccaggacgccccagctggcccagcccctcctctttccctcaaggctgcaggaggtcgggaaaggcagtcctggtagaggcctgtcctgggctccaggttggcccctgagggtggccctcctcatgccggcttcaagactgagggacagggcagccagttcagcctcgggatccacctgtggctccatgtcccagacgcaccctgtgctggagagcggcctcctggcatctgccggctgctccgcaccccggggtcccaggaagggcggcccagccccagtggacaggaaagctaaggcctcagcgatgccggactccccagcggaggtgaagacgcagccccggtccacaccccccagcatgccgcccccaccgcctgccgcatcccagggggccacacgccccccctccttcacgccacacacacatcgagaggacgggcctgcgacgctgccccacggccgttttcatggctgcttaaaatggtctatggtctgtctcttgatgaacggcagcagccactcaccaacagccatcaatggtgcaccgtgcacacccaacggcttcagcaatggcccggccacctcgtccacagcctccttgtccacacagcacctgcccccagcctgcggggcccggcagctcagcaagctcaagcgcttcctcaccacactgcagcagtttggcagcgacatctccccagagattggggagcgcgtgcgcacactggtgctgggcctggtgaactcgacattgacgatcgaggagtttcattccaagcttcaggaggccaccaacttccctctgcggccgtttgtcattcccttcctgaaggcaaacctgcccttgctgcagcgggagctcctgcactgtgcacgcctggccaagcagacgcccgcccagtacttggcccagcatgagcagctcctgctggacgccagcgcctcctcccccatcgactcctcagagctgctactggaagtcaacgagaacggcaagaggaggacgcccgacaggaccaaagagaacgggtcagaacgcgacccgctgcaccccgagcacctcagcaaacggccatgcaccctgaaccctgcccagcgctacagccccagcaacgggccaccgcagcccacaccgccgccgcactaccgcctggaggacatagccatggcccaccacttccgagatgcctaccgccacccagacccccgggagctacgagagcgccatcggccgcttgtggtgcctgggtcccggcaggaagaagtgatcgaccacaagctcacagagcgtgagtgggcagaagagtggaagcacctcaacaacctcctgaactgcatcatggacatggtggagaagacgcggcgctcgctcacggtgctgcgcaggtgccaggaggccgaccgcgaggagctcaaccactgggcgcggcgctacagcgacgccgaggacacaaagaagggccccgctcccgccgcggcccggccccgcagcagctccgccggtcccgaagggcctcagctagacgtgcctcgcgagttcctgccgaggaccctcaccggctacgtgcctgaggacatctggaggaaggctgaagaggccgtgaatgaggtgaagcggcaggccatgtcggagctgcagaaagccgtgtcggacgcggagcgcaaagcgcacgagctcatcaccacggagcgtgccaagatggagcgggccctggccgaggcgaagcggcaggcctccgaggacgccctgacggtcatcaaccagcaggaggactccagcgagagctgctggaactgcgggcggaaagccagtgagacgtgcagcggctgcaacgcggcacgctactgcgggtccttctgccagcatcgggactgggagaagcatcaccacgtgtgtggccagagcctgcagggccccacagccgtggtggccgacccggtgcctggaccgcccgaagccgcccacagcctgggcccctccctgcctgtgggtgctgccagccccagcgaagccggctctgcggggccttctcgccccggctcccccagcccacctggcccactggacaccgtgccccgctgaccccactggcccctggcctgccggacacagcaccgtgccaaccccacccagctccaggcccaccggatgctgtgcctggcctccgatgcctggcctgccagacactgcgccccgcctgacctgkgggagccgaccaattagtcactgctgctactgcccctctccgaaagaagacacagaaccaacaaaaccgcattcagtgcacctgcctcagctacctaatgattccgcgcggagacctcctgacaacgtctcttcaagcatcctcagaagcctcgactgagctttagacagcagagcagatgccgcaggcgcggcggctctgcccacctctcttttcctctctgtctgtctctccccctctgtcttctctatcctctctctctctatgactatcacacactttctcttcaatgaaaaaatcgaattggtggcttatattttcagcaaagaattttggggggttttgtgtgttggcaaaagagctactcagaaatggacaaagaaaacgggggggttctccccctcctgattaaaaagggagaaagaaaactgcgattttatagctggagatctgaacccagctgtgcccctcccccaggggcgtgaggctgatcagcgaagacgggaggaaagatttcgatttctgactcaagatgcatttttggtttcagatttttttttcctgtaatgttaaactctttggctttaagtaaaaatccaaaaagtttttttaaaaaagcaaaggaagcatacttgtgaactaccttgctagctagccagccaaggataccggacacacctctgctccaaaggaaatccaaaaaagcaaacacaagaaatcaaaatccaaaatttgtttgtcactgccaaagtatttttttcactgtttcacttgctcttgggtttgtttggatgtgggtctttttctcttctgttctgattttgtttgtgggtgtcgggatatttgggtgcagagggtttgtgcccagttagaagcgacttttgttctcttctgcgtaggcgttggtgcgtccgccgcgtgtgcgtggtccgtgtgccgttgctccggcctgcgtctccatatgtgtaggaaaggacacgccgtctgtcctcacgccccctgtgacttttcatatttccgttttccacttgtggaaaaaaagtgctaaagttttcttcccagagagagcataattccgaaacaaaactgtgacaatcttttgggttgattctcgactgcttttcgagcatgcggagccagcaggcctccctgaaacactgcttctcggccagcccgtcctcctctacctctctcctctccgcgccctccgacctctctcggccccctcaccccagctccgacctctctcagccccatcgccccaactccaacctctcggccccatcgccccaccgcagctactcccctttcttccaaacttttgcagaaaaaacaaaaaaactacaaacaaaagcagccctctgcctcctccccagggaagaccctgaccgtgtacatagccctggtgctcctgcccagccacccctcagatgcgttcgcctctggccctggggtgtgtctcggtgacgttttctatcagacgtgctccctcccatcctccagccctgcccaccctccctccactcctctcaactgcctcagcgatttcaagaaggaaataaagggataaagaaattcatgcttgcaccgagtacaaggacagacagcaggcacggcccgcagcctggcatctgtgcgtgtggcgtggcccgtggcttggcatctgtgtgcgtggtgtggcccgtggcctggcatctgtgtgcgtggcgtggcccgtggcctggcatctgtgtgtgtggcgtggcccgtggcctggcatctgtgtgcgtggcgtggcccgtggcctggcatctgtgtgcgtggctatcaggagttctaggaactcagtgcaatacgggagtgacccagctactgaaccagccacgaacagcccgccagaggcctgaagctgagcgtgtacgttaatgtgaatgtatatagtctttgcagaggtccaaatgatattcatgatggtaataaacgagatgtttgccaaat

SEQ ID NO: 17796 - DNA, 4034 bp, Homo sapiens
  SIMILAR (3287)..(2121): 1001254mologous to Homo sapiens MTG8-related protein MTG16b,accession number AB010420,Smith-Waterman Score=2095.
gcggtttctgttttttatttggcaaacatctcgtttattaccatcatgaatatcatttggacctctgcaaagactatatacattcacattaacgtacacgctcagcttcaggcctctggcgggctgttcgtggctggttcagtagctgggtcactcccgtattgcactgagttcctagaactcctgatagccacgcacacagatgccaggccacgggccacgccacgcgcacagatgccaggccacgggccacgccacacacacagatgccaggccacgggccacgccacgcacacagatgccaggccacgggccacaccacgcacacagatgccaagccacgggccacgccacacgcacagatgccaggctgcgggccgtgcctgctgtctgtccttgtactcggtgcaagcatgaatttctttatccctttatttccttcttgaaatcgctgaggcagttgagaggagtggagggagggtgggcagggctggaggatgggagggagcacgtctgatagaaaacgtcaccgagacacaccccagggccagaggcgaacgcatctgaggggtggctgggcaggagcaccagggctatgtacacggtcagggtcttccctggggaggaggcagagggctgcttttgtttgtagtttttttgttttttctgcaaaagtttggaagaaaggggagtagctgcggtggggcgatggggccgagaggttggagttggggcgatggggctgagagaggtcggagctggggtgagggggccgagagaggtcggagggcgcggagaggagagaggtagaggaggacgggctggccgagaagcagtgtttcagggaggcctgctggctccgcatgctcgaaaagcagtcgagaatcaacccaaaagattgtcacagttttgtttcggaattatgctctctctgggaagaaaactttagcactttttttccacaagtggaaaacggaaatatgaaaagtcacagggggcgtgaggacagacggcgtgtcctttcctacacatatggagacgcaggccggagcaacggcacacggaccacgcacacgcggcggacgcaccaacgcctacgcagaagagaacaaaagtcgcttctaactgggcacaaaccctctgcacccaaatatcccgacacccacaaacaaaatcagaacagaagagaaaaagacccacatccaaacaaacccaagagcaagtgaaacagtgaaaaaaatactttggcagtgacaaacaaattttggattttgatttcttgtgtttgcttttttggatttcctttggagcagaggtgtgtccggtatccttggctggctagctagcaaggtagttcacaagtatgcttcctttgcttttttaaaaaaactttttggatttttacttaaagccaaagagtttaacattacaggaaaaaaaaatctgaaaccaaaaatgcatcttgagtcagaaatcgaaatctttcctcccgtcttcgctgatcagcctcacgcccctgggggaggggcacagctgggttcagatctccagctataaaatcgcagttttctttctccctttttaatcaggagggggagaacccccccgttttctttgtccatttctgagtagctcttttgccaacacacaaaaccccccaaaattctttgctgaaaatataagccaccaattcgattttttcattgaagagaaagtgtgtgatagtcatagagagagagaggatagagaagacagagggggagagacagacagagaggaaaagagaggtgggcagagccgccgcgcctgcggcatctgctctgctgtctaaagctcagtcgaggcttctgaggatgcttgaagagacgttgtcaggaggtctccgcgcggaatcattaggtagctgaggcaggtgcactgaatgcggttttgttggttctgtgtcttctttcggagaggggcagtagcagcagtgactaattggtcggctccckcaggtcaggcggggcgcagtgtctggcaggccaggcatcggaggccaggcacagcatccggtgggcctggagctgggtggggttggcacggtgctgtgtccggcaggccaggggccagtggggtcagcggggcacggtgtccagtgggccaggtgggctgggggagccggggcgagaaggccccgcagagccggcttcgctggggctggcagcacccacaggcagggaggggcccaggctgtgggcggcttcgggcggtccaggcaccgggtcggccaccacggctgtggggccctgcaggctctggccacacacgtggtgatgcttctcccagtcccgatgctggcagaaggacccgcagtagcgtgccgcgttgcagccgctgcacgtctcactggctttccgcccgcagttccagcagctctcgctggagtcctcctgctggttgatgaccgtcagggcgtcctcggaggcctgccgcttcgcctcggccagggcccgctccatcttggcacgctccgtggtgatgagctcgtgcgctttgcgctccgcgtccgacacggctttctgcagctccgacatggcctgccgcttcacctcattcacggcctcttcagccttcctccagatgtcctcaggcacgtagccggtgagggtcctcggcaggaactcgcgaggcacgtctagctgaggcccttcgggaccggcggagctgctgcggggccgggccgcggcgggagcggggcccttctttgtgtcctcggcgtcgctgtagcgccgcgcccagtggttgagctcctcgcggtcggcctcctggcacctgcgcagcaccgtgagcgagcgccgcgtcttctccaccatgtccatgatgcagttcaggaggttgttgaggtgcttccactcttctgcccactcacgctctgtgagcttgtggtcgatcacttcttcctgccgggacccaggcaccacaagcggccgatggcgctctcgtagctcccgggggtctgggtggcggtaggcatctcggaagtggtgggccatggctatgtcctccaggcggtagtgcggcggcggtgtgggctgcggtggcccgttgctggggctgtagcgctgggcagggttcagggtgcatggccgtttgctgaggtgctcggggtgcagcgggtcgcggtctgacccgttctctttggtcctgtcgggcgtcctcctcttgccgttctcgttgacttccagtagcagctctgaggagtcgatgggggaggaggcgctggcgtccagcaggagctgctcatgctgggccaagtactgggcgggcgtctgcttggccaggcgtgcacagtgcaggagctcccgctgcagcaagggcaggtttgccttcaggaagggaatgacaaacggccgcagagggaagttggtggcctcctgaagcttggaatgaaactcctcgatcgtcaatgtcgagttcaccaggcccagcaccagtgtgcgcacgcgctccccaatctctggggagatgtcgctgccaaactgctgcagtgtggtgaggaagcgcttgagcttgctgagctgccgggccccgcaggctgggggcaggtgctgtgtggacaaggaggctgtggacgaggtggccgggccattgctgaagccgttgggtgtgcacggtgcaccattgatggctgttggtgagtggctgctgccgttcatcagtgtgtgtggcgtgaaggagggggggcgtgtggccccctgggatgcggcaggcggtgggggcggcatgctggggggtgtggaccggggctgcgtcttcacctccgctggggagtccggcatcgctgaggccttagctttcctgtccactggggggtcggggggtccgggggatccggcgggcggcggacggcgcacactcgcgactcggtccgggagtcgctgctccttccagcttggtccccgcctccacgactcaggggcggctgcgcgctgtcttctggcgccgcaccgggctcaggcgcgcggcggggctggggcgcgcgcggggcggcc

SEQ ID NO: 17797 - DNA, 455 bp, Homo sapiens
  SIMILAR (453)..(4): 981254mologous to Homo sapiens N-acetylgalactosamine 6- sulfate sulfatase (GALNS),accession number D17629,Smith-Waterman Score=808.
tctcaggtggaagatcaggggcagcttcgtgtggtcttccagattgtgagttgtgacccctgaaacgttctgcccagggcagaaatcaatgccctgtctgaagttctcccaggagttggtccaggtccagaagtgagccttgtgctgcccgagggtggccgccatcagcgtgtcgccacggtaatagaagataggcctgtccatcagccggccctgcaggagggtggggaggaggttgaggccatcaatggccctgtcgctgggcggcgtcaggcccgcaagggccaggctggtggtgaagaggtccatgatgctgcccagctggtggctcacctggcctgcagtgacgtgccctggccaccatgcgagggcaggctccctcatccctccttcaaacgtggtctgcttcccacacagaaaggggccgttgctgccaccgaattccaccgcactga

SEQ ID NO: 17798 - DNA, 2712 bp, Homo sapiens
  SIMILAR (799)..(1434): 921254mologous to Escherichia coli transposase,accession number X60200,Smith-Waterman Score=1026.
atggattcgatgatcaaccgttataccgccgatcgccgtatacgtcatgacgatgcatacacgccggataacgtcgcgtgtaagcgcgcggatcgcgccacactggtttatacccagcgttgtaaagaggcgtggaaagatgtaccggtgatcctcggcggtattgaggctagtatgcgccgtaccgcgcattatgattactggtccgataccgtgcgccgttccgtgatggtggattcgaaagccgacatgctgatgtttggtaacggtgagcgtccgatggtggaagtggcgcatcgtctggcgatgggcgagccaattagtgaaatccgcgatgtgcgtaataccgcgattatcgtgaaagaggcgctgcctggctggagcggcgtggattccacccgtcttgatacccctggaaaaatcgacccaatcccgcatccgtatggtgaagatttgccgtgcgcggataacaaaccggtggcaccgaaaaagcaggaagccaaagccgtaaccgtgcagccaccgcgcccgaaaccgtgggaaaaaacctacgtgttgctgccttctttcgagaaagtgaagggcgataaagtgctgtacgcccatgcttcgcgtattctgcaccacgaaaccaacccaggctgtgcccgcgcattgatgcaaaaacacggcgaccgctatgtgtggatcaacccgcctgctattccgctttctaccgaagagatggacagcgtttttgcgctgccatacaagcgcgtgccacatccggcctatggcaatgcccgtattccggcttacgaaatgaattacggttgttatgctgcagaacctaatgacgtgcaactggcgcgctattttcatcttgatgaacgggatctgggcttcattaaccaacgacggggcaaacataataggctgggcattgcgcttcagctcaccacagcccgttttctgggaacatttctgacggatttaactcaggttctgcctggtgttcaacattttgtcgcggtacagcttaatatccaccgtccagaagttctctcccgctatgctgaacgggacactacccttagagaacatactgcattaattaaggaatattacggctatcatgaatttggtgattttccatggtctttccgcctgaagcgtctgctatatacccgggcgtggctcagtaatgagcgaccgggtctgatgtttgattttgccactgcatggttgcttcaaaataaggtattactgcccggagcaaccacactagtacgtctcatcagtgaaattcgtgaaagggcaaatcagcggctgtggaaaaagctggccgcactgccgaacaaatggcaggcagctcaagtgatggagcttctggtcattccggaaggctgttccactctggagcgagtggtttcccgtcctgacatcacccaggggaactatctgaccgctaacgacgtatccaaaatacgtgttggcatgacgcaacaacaagttgcgtacgcattgggtacaccgctgatgtccgatccatttggtacgaatacctggttctatgtcttccgccagcaaccaggtcatgaaggtgtaactcagcaaacgctgacgctgacctttaacagtagcggtgtgttgaccaatattgataacaaacctgcgctgagtgcattgcttatcagagatatgcccccatatgttgaggcatatcctaacgagaatctgacaaccgttatgcctgaacaatatcgttatacgctgcccgtcaaagcgggtgagcagcgtctgctgggcgagttaaccggcgcagcctgtgcaacgctggtagcggaaattgccgaacgtcacgccggtccggtggtactcattgcaccagatatgcaaaatgctctgcgtttgcatgatgaaatcagccagtttaccgatcaaatggtgatgaatctggcggactgggaaactcttccctacgacagtttttcgcctcatcaggacattatctcctcgcgcctttccaccctttaccagctaccgacgatgcagcgtggcgtactgattgttccggtgaatacgcttatgcagcgcgtttgcccacacagttttctccacggtcatgcgctggtgatgaaaaaaggtcagcgcctgtcacgagatgcattacgaacccaactggacagcgccggttatcgccatgttgaccagccagcgcacgctggcggcaaagtgctggagatgatcgtggtggggatcgccacctggctggggttcttgctcttcgggctgaactattcgctgctgctggcagtgctggtcggcttctcggttcttattccgtacattggcgcatttgtggtgaccattccggtggttggcgtggcgctattccagtttggcgcaggtactgaattctggagctgcttcgcggtgtatctgattattcaggcgctggacggcaacctgttagtgccggtgttgttctccgaagcggttaacctgcatccgctgcatcaccgggagcagattggcggtaataaaatggctgaccgtcagtgccggaaaattgtctgcgctactgtgcgccagctgccagaaggggggaggggcgaaatggcgaatggcaatggcgaacggaatcacaaacaaattggcgatacagtgctcaaagccactgggagcaaacagggtgatgggcaaaatcatggcgacgattttgtcgcgtaa

SEQ ID NO: 17799 - DNA, 2097 bp, Homo sapiens
  SIMILAR (1540)..(2097): 951254mologous to Escherichia coli tartrate dehydratse,accession number U28379,Smith-Waterman Score=929.
atgaccctcaagactcctgatgcccggcaatcagtaggagccaacagcctaagggatattccctgcacccgccgggccggccttgcatcagagagtcgggacgccgcactcacgattttgcaggtcctgggggacggcgggcccagcgtgcaggtcctggctctgcggagctggccacggttcctagtgagaggctggctgggctttttctcacatgtccttgtcacacggcgatgtggccgggctgggatcacccttccctctcttcggaagagccctccggtctggtgtggagcagaaagtcccacagacaaccccagacacacactgattgcagtcggtagatcgactctgaggatccccgactgtgcccgagtggtgcacgttaaggtggctgtcatggtcaattttacgttctgtgtattttacaataaaaaccccaagcaggaggacggaagtccaatggcttctaaggatataaccctcaccttcgttctaccagctacaagcagaccatcatcatccctcccacggtccctgtccccacacgtcccacggggctacgttggtgcggtcaccgtccccacgcgttcccacggggcaagaccacgccatgggagggagctgggtgcggtgggaaagccccaccctgggagtccaggatctgggtcactgaaagaccttgagcgggcttacaaaaacttcttccggaagcgggctgcttttccccgattcaaaaagcggggacagaatgatgcattccgctacccgcagctggggtggggcgttggtgggatcgaagcagaagccgcaatgttaggccagccggtttccatgcttatcccggatgtagtgggcttcaaacttaccggaaaattacgtgaagctcccccagggaagctctgccctctccccagcgcagtttcgtcaggctgttccactctggagcgagtggtttaccgtcctgacatcaaccaggggaactatctgaccgctaacgacgtatccaaaatacgtgttggcatgacgcaacaacaagttgcgtacgcattgggtacaccgctgatgtccgatccatttggtacgaatacctggttctatgtcttccgccagcaaccaggtcatgaaggtgtaactcagcaaacgctgacgctgacctttaacagtagcggggacccgaagctgagagagcctcaagtggctcaggctacagcagcaggggtggcttttgtccctgacgtgggccccccacccccttcttccatgtctgggagtggcagcaacggcccctttctgtgtgggaagcagaccacgtttgaaggagggatgagggagcctgccctcgcatggtggccagggcacgtaactgcaggccaaagctgctggaactgcgggcggaaagccagtgagacgtgcagcggctgcaacgcggcacgctactgcgggtccttctgccagcatcgggactgggagaagcatcaccacgtgtgtggccagagcctgcagggccccacagccgtggtggccgacccgcgcgttatgaaaaagatcctgacaaccccgatcaaagctgaagatctgcaagatattcgcgtcggcgatgtgatctacctgaccggtacgctggtgacctgccgcgacgtttgtcaccgccgtttgatcgaactgaaacgtccgatcccttacgatctcaacggcaaagcgattttccacgctggccccatcgtgcccaaaaacggcgacaaatgggagatggtctccgtcggcccgacacccagtatgcgtatggaaagttttgaccgtgaatttattgagcagtccggcgtgaacctggtggttggcaaaggtggtatggggccgctgaccgaagaaggctgccagaaattcaaggcgctacatgtgattttcccggcaggctgcgcggtgctggcggcaacccaggtggaagagattgaagaagtgcgctggacagagctcggaatgccggagtcactgtgggtctgccgggtcaaagagttcggcccgctgattgtctctattgatacccccggcaccaacctgatagccgaaaacaaaaagctgttcgccgaacgccgc

SEQ ID NO: 17800 - DNA, 2154 bp, Homo sapiens
  SIMILAR (472)..(1410): 981254mologous to Escherichia coli tyrosyl-tRNA synthetase (tyrS),accession number J01719,Smith-Waterman Score=1605.
atgacaccatcacgcttcgcgaagaagaacggatcgttggttaagcgttgccctatgggcattgacgccgaggtcaccatgataaagccaatcgccgcgaggccgaaggtcagccacagtaaggtgcgatcgtacatgatcaggctgtcggtatctttttcccgcgagcccatcacccagccctttagcgccgtggagatccagaccaggataagatacggtgtaagtggattctttttgcgccgggtcgataccgagcatcaccccgaccgccacgctgcgcgcgctttgcagtaccacatcaccggtagtaataggtgcgacgcgattaacgccgtccagtttgacacggctggcggtgagtgtaccaatcggcggatggctgaagaccacggtcggaatgttgctgtaatccagatgctcatccggcttgttattaaacaggcgttcagagaggtaccttcagagttgtggacaaatcgtaagcaggcttgcccgttcctcgatttcgactgtggagaaaactctgctatcgcggcgaacaactatgactggttcggcaatatgaatgtgctgaccttcctgcgcgatattggcaaacacttctccgttaaccagatgatcaacaaagaagcggttaagcagcgtctcaaccgtgaagatcaggggatttcgttcactgagttttcctacaacctgttgcagggttatgacttcgcctgtctgaacaaacagtacggtgtggtgctgcaaattggtggttctgaccagtggggtaacatcacttctggtatcgacctgacccgtcgtctgcatcagaatcaggtgtttggcctgaccgttccgctgatcactaaagcagatggcaccaaatttggtaaaactgaaggcggcgcagtctggttggatccgaagaaaaccagcccgtacaaattctaccagttctggatcaacactgcggatgccgacgtttaccgcttcctgaagttcttcacctttatgagcattgaagagatcaacgccctggaagaagaagataaaaacagcggtaaagcaccgcgcgcccagtatgtactggcggagcaggtgactcgtctggttcacggtgaagaaggtttacaggcggcaaaacgtattaccgaatgcctgttcagcggttctttgagtgcgctgagtgaagcggacttcgaacagctggcgcaggacggcgtaccgatggttgagatggaaaagggcgcagacctgatgcaggcactggtcgattctgaactgcaaccttcccgtggtcaggcacgtaaaactatcgcctccaatgccatcaccattaacggtgaaaaacagtccgatcctgaatacttctttaaagaagaagatcgtctgtttggtcgttttaccttactgcgtcgcggtatcggtaccaaactggcgcgcgtggcgcgtatgcactttgcccgtcaacgtctggctgccgtaggcccacgtttgcctgctcgtcaggatctgtttaataagctgctcgcctcccgcgccattgccaaagcggtagaagatgaagcgcgcagcaaaaaaatctcccatgaaaaagcgcagcagaacgcgattgcactgatggaagagattgcggcgaatttctcttacgagatgattcgcctgactgaccgtattctgggcttcacctggaaccgactttaccagggcatcaacgtccataacgctgagcgcgttcgccagctggcccacgacggtcatgagctggtatatgtgccttgccaccgcagtcacatggactacctgctgctttcttacgtgctgtatcaccaggggctggtgccgccgcatatcgccgccgggatcaacctgaatttctggcctgccgggccgattttccgccgtctgggggcgttctttattcgccgtacgtttaaaggcaataaactttattccaccgttttccgggagtatctcggcgaactgttcagccgtggttattccgtcgagtacttcgtggaaggcggtcgttcccgtacggggcgtttgctggatccgaaaactggtacgctgtcgatgaccattcaggcgatgctgcgtggcggcacgcgtccgattacggggataccttcagatcgacctgaagtcatgcagctgcctccctaa

SEQ ID NO: 17801 - DNA, 1127 bp, Homo sapiens
  SIMILAR (189)..(1127): 951254mologous to Escherichia coli sn-glycerol-3-phosphate acyltransferase,accession number K00127,Smith-Waterman Score=1573.
gcggtacgccctatgccagccaacccgtgatccgtccggtggaaggcagtaaaccgctgattaaacaagtcctggatattggcgcgcacggcacggataaaactatcgctcagaaactggcgcgcgtggcgcgtatgcactttgcccgtcaacgtctggctgccgtagccacgtttgcctgctccgcacagaacgcgattgcactgatggaagagattgcggcgaatttctcttacgagatgattcgcctgactgagtgtattctgggcttcacctggaaccgactttaccagggcatcaacgtccataacgctgagcgcgttcgccagctggcccacgacggtcatgagctggtatatgtgccttgccaccgcagtcacatggactacctgctgctttcttacgtgctgtatcaccaggggctggtgccgccgcatatcgccgccgggatcaacctgaatttctggcctgccgggccgattttccgccgtctgggggcgttctttattcgccgtacgtttaaaggcaataaactttattccaccgttttccgggagtatctcggcgaactgttcagccgtggttattccgtcgagtacttcgtggaaggcggtcgttcccgtacgggcgtttgctggatccgaaaactggcgatgctgcgtggcggcacgcgtccgattacgctgattccgatctatatcggttatgagcacgtcatggaagtgggtacttacgccaaagaactgcgcggcgcgacgaaagagaaagagagcctgccgcagatgctgcgcggtttaagcaagctgcgtaatctcggtcagggttacgtcaacttcggtgaaccaatgccgttgatgacctaccttaaccagcatgtacctgactggcgtgaatctatcgatcccatcgaagcggtgcgtccggcatggttaacgccgacggtcaataatattgctgccgatctgatggtacgcattaacaacgcaggcgcggcaaacgccatgaacctgtgctgtactgcgctactggcatcacgtcagcgctcactcacccgcgagcagttaaccgagcaactcaactgctacctggatctgatgcgcaacgtgccctactccacggactctacc

SEQ ID NO: 17802 - DNA, 1019 bp, Homo sapiens
  SIMILAR (777)..(547): 811254mologous to Escherichia coli pot. cell division protein (fic); putative,accession number M32354,Smith-Waterman Score=312.
tcagctgttgttttcctttgtttgtgtgattgttgtgttcgtgctgtctggtttgtctggttggtctgggttgggtgcgccctgtggtttctctagttgtgtggtgttgctacttgggtctgtctgttgtgtgtgtgtggtggctgtctgtgtgtgtcgcgtgcgctttctgtagtctgttgtggctttgacctgtgcttgtgtacctgtgggtgtctttctcttggttgtgtggtcgctcgttggtgtgtgatgcgtttggttgcgttttatgtgtgctgtgtttttggtgtggtgtttgctgggggtggttttccaggtgtttagtgcttgtccgtgtgttggattgcgtggcggtggcctgggtgtgtccgcttggtgtggggattggcctgtgggttgtgtgttgcccaccgggttggtcagtgccgtgccgtgttgttgtgacgtcttagcccggtttcgtgtggatctctgttggggttgatgattgtctgggttggtgttggttcgatcggtgttgatcggtaagtttttaatccatgtagtatcaccatgatagatatcaacttcacgcagttgccctgcccagtcgaaaatatcctgatacagctggcgatggatagttcgcaaatgcggtaaaccgcgcaccagcggaccaagctcaatggtcgcagcacgcagcgccgtcatttcgtaagcggcctgttccagccgctgctgctgatggaatactatgcagccattaaaaatgatgagttcatgtcctttgtagggacatggatgaaattggaaatcatcattttcagtaaacgcctcgcgaatcgggcaagccttgtgcgcctcaggtcgttcaggaacgagaccatcacgatgccgttcagcatggccacgccgaataccgcgatgaagccgatggctgacggcacggacaggtactggccactgatgaagagcccgacgatgccgccgatgatggcgaagggcacgttggcgatgatgataaagttctgcagaat

SEQ ID NO: 17803 - DNA, 2471 bp, Homo sapiens
  SIMILAR (1567)..(2001): 971254mologous to Escherichia coli sn-glycerol-3-phosphate acyltransferase,accession number K00127,Smith-Waterman Score=732.
  misc_feature (1)...(2471): n = a,t,c or g
atgttccagccttctgattccggtaaatcgttcatctttaatatgagcgtcggttacaacctcgaaggtattaagcaaccgccgatgcaacagttcatcgacaatatgatggacgcatctgaccatccgaaattcgctcaatatcgcgatacgctgaataaattactccaggatgacgcatttttagctcgccacggattgcaggaaaaacgcgaaagcttgcaagccttacccgctcgcatccccaccagtatggtgcatggcgtcaccctctccaccatgcacggctgtcctccgcatgaaatcgaagccatttgccgctacatgctggaagaaaaagggctcaacacctttgtgaaacttaacccgaccttactggggtacgcgcgtgttcgtgagatcctcgatgtctgcggtttcggttacataggcttaaaagaagagtcatttgatcacgacctcaagctgacgcaagcactggaaatgctggaacgcctgatggcactggcaaaagaaaaatcactcggctttggcgtaaaactgactaacactctcggcaccatcaacaataaaggcgcactgcctggtgactctacgagtggcgttctgcggacttacgagcggctcttgaccgcctggatgctgacatgcccatgcgctgatgagcatcaacgcggtgaaagcgtgaaattggcgacggctttgacgtggtggctgcgcggcagccagaaccgcgatgaaatcaccaaagacggtttccagagcaaccatgcgggcggcattctcggcggtatcagcagcgggcagcaaatcattgcccatatggcgctgaaaccgacctccagcattgacgtgccgggtcgtaccattaaccgctttggcgaagaagttgagatgatcaccaaaggccgtcacgatccctgtgtcgggatccgcgcagtgccgatcgcagaagcgatgctggcgatcgttttaatggatcacctgttacggcaacgggcgcaaaatgccgatgtgaagactgatattccacgctgcgcacaatcgataggcagtttttctaatggctgtattgtcggcgctgacacgctgccgatacagtccgaacattatcaggtcatgcgtaccgatcagcgtcgctatttcggtcacccggatctggtgatgtttatccagcgtctgagtagccaggtgagcaatctgggcatgggtacggtgctgattggcgatatggggatgcccgctggtgggcgtttcaacggcggtcatgccagccaccagaccggactggatgtcgatatctttctgcaactgccgaaaactcgctggacctccgcgcagctcttgcgcccgcaagcactggacttagtttcccgcgacggtaaacacgttgtctccacgctgtggaagccagaaattttcagcttgatcaaactcgccgcccaggacaaagacgtcacgcgcatttttgttaatccggcgattaaacaacaactttgccttgatgcgggcacgatcgcgactggttgcgcaaagtgcgaccctggtgtcagcatcggcgcatatgcatatttgctgacgttgcgcgcccagtgtctggcacatgacttgcctgacccgttagagccgctggaaatcgacggcacgctactgccgcgctatgtgttcattcacggcgggccgcgtgtgttcacctattacacgccgaaagaagagtctattaagctgttccacgactatctcgatttgcaccgtagcaacccaaatctggatgtgcagatggtgccagtgtcggtgatgtttggtcgcgcgccggggcgtgaaaaaggcgaagtgaacccgccgctgcgtatgcttaacggcgtacagaaatttttcgctgtactgtggctcggtcgcgacagttttgtgcgtttctcgccgtcagtttcgctgcgccgtatggcggatgaacacggcacggataaaactatcgctcagaaactgngcgcgcgtggcgcgtatgccactttgcccgtcaacgtctggctgccgtaggcccacgtttgcctgctcgtcaggatctgtttaataagctgctcgcctcccgcgccattgccaaagcggtagaagatgaagcgcgcagcaaaaaaatctcccatgaaaaagcgcagcagaacgcgattgcactgatggaagagattgcggcgaatttctcttacgagatgattcgcctgactgaccgtattctgggcttcacctggaaccgactttaccagggcatcaacgtccataacgctgagcgcgttcgccagctggcccacgacggtcatgagctggtatatgtgccttgccaccgcagtcacatggactacctgctgctttcttacgtgctgtatcaccaggggctggtgccgccgcatatcgccgccgggatcaacctgaatttctggcctgccgggccgattttccgccgtctgggggttatttag

SEQ ID NO: 17804 - DNA, 1460 bp, Homo sapiens
  SIMILAR (238)..(510): 921254mologous to Escherichia coli sn-glycerol-3-phosphate acyltransferase,accession number K00127,Smith-Waterman Score=449.
atgctaaagtcggttccaggtgaagcccagaatacggtcagtcaggcgaatcatctcgtaagagaaattcgccgcaatctcttccatcagtgcaatcgcgttctgctgcgctttttcatgggagatttttttgctgcgcgcttcatcttctaccgctttggcaatggcgcgggaggcgagcagcttattaaacagatcctgacgagcaggcaaacgtgggcctacggcagccagacgttgacgggcaaagtgcatacgcgctatgtgttcattcacggcgggccgcgtgtgttcacctattacacgccgaaagaagagtctattaagctgttccgcgactatctcgatttgcaccgtagcaacccaaatctggatgtgcagatggtgccagtgtcggtgatgtttggtcgcgcgccggggcgtgaaaaaggcgaagtgaacccgccgctgcgtatgcttaacggcgtacagaaatttttcgctgtactgtggctcggtcgcgacagtttttcagggattgtcggtgccgcgctactgatggcgggttgtagctccagcaacgaattgagtgctgccggtcagagtgtacgcattgtggacgagcagccaggcgcagagtgccagctgattggtactgcgacaggaggaacaatgtctcaggttcagagtggcattttgccagaacattcgccgcgcggcgatttggatcgaagccaacgtgaaaggggaagttgacgccctgcgtgcggccagtaaaacatttgccgacaaatctggcaacttttgaagcgaaattcccggacgcgcatcttggtcaacaatctgaggccagccttgatatcatgcgtaaccggctgaacatccgccagcagcagcggctggaacaggccgcttacgaaatgacggcgctgcgtgctgcgaccattgagcttggtccgctggtgcgcggtttaccgcatttgcgaactatccatcgccagctgtatcaggatattttcgactgggcagggcaacggcgtatcaccctgataaaccatgggtttgtgcccaagtcaacgacagttgtggaaacgaacggaccgagcgaccaaagcattgcaatgcgcaggccaggtcagactattagtaggatccaccaagtccagaaaaagctgggcatcgagctcaccaactgttatgaacacagcggcttaccagacattaaaaacgtcaccggtattttaatatgtcggcaaacccacgcccgccctgcgcgccttgccaggctcatcttcaccgccaataaaaccaatacgattaacgccctggttgatatagaagtcgatgatttctttactgatgcgtgccagatcgattgttgttttgagacagggtctcactccgttctcgccaggctcggaggggctagtgcgcaagatctccagctcgacgcaacctctgcctcccatggttcgaagtga

SEQ ID NO: 17805 - DNA, 962 bp, Homo sapiens
  SIMILAR (31)..(960): 981254mologous to Escherichia coli K12 putative colanic acid biosynthesis glycosyl transferase,accession number AE000295,Smith- Waterman Score=1546.
atggcgaatcacctgctgccggaccgctgttacaggacgacctacggccaagcgctcaacctcaaacgctatggtgccgagtcgcggaacctgattttgtctgccatttgcggccaggtcgcaacaccgtttcgcgccgatgtgttcatcgctcattttggtcccgcgggggtaaccgcagcaaaactccgcgaactgggtgtcattcgcggcaaaattgccactatcttccacggtattgatatctccagtcgggaagtgctcaaccactacactcccgaatatcagcaactgtttcgccgtggcgacctgatgttaccgataagcgatctgtgggccggaaggctgcaaaaaatgggctgcccgagggaaaaaatcgccgtatcgcgcatgggcgtagatatgacgcgctttagcccgcgtcccgtgaaagcgcccgcaacgccgctggagattatttccgtcgcacgcttaaccgagaaaaaaggcctgcatgtggcgatcgaagcctgccgtcagttgaaagagcagggcgtggcatttcgctatcgcatcctcggcattggcccgtgggaaagacgcctgcgcaccctcatcgaacaatatcaactggaagatgtggtggagatgccgggctttaaaccgagccatgaagtgaaagcgatgctcgacgacgcggatgtcttcctgttgccatcggttacaggtgcggatggtgatatggaaggtattccggtggcgctaatggaagcgatggcggtcggtattccggtggtttctactctgcatagtggaataccggaactggtggaggctgacaaatccggctggctggtgcctgagaacgatgctcgcgcactggcgcaacgactggcggcgtttagccaattggaccccgacgaattggctccggtcgtcaaacgcgcgcgcgaaaaagttgaacacgattttaaccagcaggt

SEQ ID NO: 17806 - DNA, 2633 bp, Homo sapiens
  SIMILAR (1705)..(2628): 971254mologous to Escherichia coli Succinoglycan biosynthesis transport protein ExoT,accession number D90842,Smith-Waterman Score=1472.
  misc_feature (1)...(2633): n = a,t,c or g
ttatacgacgcgtacgcccgcaggcatcatccgctccggcgttaacagcacgctttcactgccgtcatcggtttccgcacacaacagcatgcattccgacgtttcaccacgcattttcgctttttgcagattgcataagaccaccaccgttttccccatcagctcttcttcgctgtagtacggcaccaggctggtcacggtttgcagcgttttttgccccacatcaacctgtacgatgtacagcttgtcggcgttttcatggcgtttcacttccacaatctttccgacgcgcatttccagacgtgcaaaatcagcgtaagccacggtttccattgcttcctccctgcatatcccgacagcaaaagtaggccctgaattaacagtggcagcgaaacggcggtggacagcatcgtcgggctgaaactggactacgcaggtaaagacggctggagcgctagcgctacgctggaaggcgggccgaacctgagctacgcgaagagccagcgtacggcaagcctggcaggcgcaggcagtcagcactttaacgtcgatgacggtcagaagggcggcggcatcaatagcctgacaagcgtcggcgtgaagtacagcagcaaagaaagttcgctgaatctggatgcgtacaatctcggtacaaaatccgttaaccgtcttggttatggcgcgatgcaactggcaggtcctggagtttttgggcccccacgagatcggcacgtcgctataaacgtgctgcgtgaagcgctggcatgagcggtcatcatatggtacagcgactttatggtccgacgtatcaatagaatatcggaaagggttacntacgcccagcgcaatctgccagcagagagtaaatacggcgatcggcggcataaaacggatcgcataacgcgtcatcttgataacgcgattttcgacaaagaccggggcaaggcgtttttccagcggccacgtctttgagtaatgctgtccccggcgaaacaaggccgccagtcgttgcgccagtgcgcgagcatcgttctcaggcaccagccagccggatttgtcagcctccaccaggttccggtattccactgtaaccgatggcaacaggaagacatccgcgtcgtcgagcatcgctttcacttcatggctcggtttaaagcccggcatctccaccacatcttccagttgatattgttcgatgagggtgcgcaggcgtctttcccacgggccaatgccgaggatgcgatagcgaaatgccacgccctgctctttcaactgacggcaggcttcgatcgccacatgcaggccttttttctcggttaagcgcaggcgacgcagaacgatccgcgcgtcaccaaagtggggaactttctgcgccgtacctcgctggatgaattgccgcagtttatcaatgtgctgaccggggggatgtcgattgtcggtccacgtccgcacgcagtagcgcataacgaacagtatcgacagctcattgaaggctacatgctgcgccataaggtgaaaccgggcattaccggctgggcgcagattaacggctggcgcggcgaaaccgacacgctggagaaaatggaaaaacggggtggagttcgcccctgaagtccattcgcgaaatgaagcgtgtggttcggatatcaaaatcgttttcctgaccggtgttcaaaggtttcgttaccaaaccggcatattgatatgagcttacgtgaaaaaaccatcagcggcgcgaagtggtcggcgattgccacggtgatcatcatcggcctcgggctggtgcagatgaccgtgctggcgcggattatcgacaaccaccagttcggcctgcttaccgtgtcgctggtgattatcgcgctggcagatacgctttctgacttcggtatcgctaactcgattattcagcgaaaagaaatcagtcaccttgaactcaccacgttgtactggctgaacgtcgggctggggatcgtggtgtgcgtgccggtgtttttgttgagtgatctcattgacaccgtgctgaataaccagtacttggctccgttgattaaaacattatcgctggcgtttgtggtaatcccccacgggcaacagttccgcgcgttgatgcaaaaagagctggagttcaacaaaatcggcatgatcgaaaccagcgcggtgctggcgggcttcacttgtacggtggttagcgcccatttctggccgctggcgatgaccgcgatcctcggttatctggtcaatagtgcggtgagaacgctgctgtttggctactttgtccgcaaaatttatcgccccggtctgcatttctcgctggcgtcggtggcaccgaacttacgctttggtgcctggctgacggcggacagcatcatcaactatctcaataccaacctttcaacgctcgtgctggcgcgtattctcggcgcgggcgtggcagggggatacaacctggcgtacaacgtggccgttgtgccaccgatgaagctgaacccaatcatcacccgcgtgttgtttccggcattcgccaaaattcaggacgataccgaaaagctgcgtgttaacttctacaagctgctgtcggtagtggggattatcaacttttcggcgctgctcgggctaaaggtggtgaccaaaaa

SEQ ID NO: 17807 - DNA, 3472 bp, Homo sapiens
  SIMILAR (1371)..(1460): 931254mologous to Escherichia coli f772,accession number L10328,Smith-Waterman Score=167.
gagtgttttcatggaatttaccaccggattgatgtcgctcgacaccgcgcttaatgagatgctttctcgcgtcaccccactgaccgcccaggaaacgctgccactggtacagtgttttggtcgtattctggcgagcgatgtcgtttcgccgcttgatgttccggggtttgataactccgcaatggacggctacgcggtgcgtttagccgatattgcctccgggcaaccgctgcccgttgccggtaaatcctttgccggtcagccataccatggtgaatgggctgcgggtacctgcattcgtattatgaccggtgcgccggtgccggaaggctgcgaagcggtggtgatgcaggagcagactgaacaaatggacaatggcgtgcgttttactgctgaatgcgtagcgggcgaaatattcgccgtcgcggggaagatatctctgggggggcgggggtttccccgcgggaatcgcctgagtaacgcgaggtgccggaaatgggtcccgggggggccgcaaaccggggtaccaaaagggtttaaagcattgggtattgccggcccagatgcacggagcaaccttgctggatgctcagcaacgggtgttacgccctgccatttgtggaacgacgggcgctgtgcgcaagagtgcactttgctggaagcgcgagagcataaccattatgcgtacatctacaacgaactggtgtggaacgtgctcaaggacaccgttggtgaggaagaagctgtcttgtttgcccgctcggcctccgtcggtgcgcagaaattcccggtacactggggtggcgattgttacgctaactacgaatcaatggcggaaagcctgcgcggtggtttgtctattggcctttcaggttttggcttctggagccacgatatcggcggctttgaaaataccgctccggcgcacgtttacaaacgctggtgcgcgtttggtttgctctccagccatagccgtttacacggtagcaaatcttatcgtgtgccgtgggcctacgatgatgagtcctgtgatgtggtgcgcttcttcacgcaactgaaatgccgcatgatgccgtatctgtatcgtgaagctgcgcgtgcgaacgcgcggggtacgccgatgatgcgggccatgatgatggagttcccggacgatccggcttgtgattaccttgaccgtcaatacatgttaggcgacaacgtgatggttgcgccggtgttcactgaagcgggcgatgtgcagttctacctgccggaaggtcgctggacacacctgtggcacaacgatgaactcgacggtagtcgctggcataaacagcagcacggcttcctgagtctgcccgtttatgtgcgtgataacactctactgggcgctgggcaacaacgatcaacgtcccgattacgtgtggcacgaaggcacggcattccacctcttcaatctgcaagacgggcatgattctactgtgggcaaatgctctcaaacagcattgcttgctatcgagaaatcttccctgaaagggagagtcaatcaatgtagcaaactcattgttgtcttattttaatctcagaccacagtgcaatcaaactagaactcaggattaagaaactcactgaaaaccgctcaactacatggaaactgaacaacctgctcctgaatgactactgggtacataacaaaatgaaggcagaaataaagatgttgttcgaaaccaacgagaacaaagacacaacataccagaatctctgggacacattcaaagcagtgcgtagagggaaattgatagcactaattgcccacaagagaaagcaggaaagatccaaaattgacaccctaacatcacaattaaaagaactagaaaagcaagagcaaacacattcaaaagctagcagaaggcaagaaataactaaaatcagagcagaactgaaggaaatagagacacaaaaaaacccttcaaaaaattaagaacgtcatcagctaaagcaagccatagagaaaattggcagtcttgatcaggctgttaaggaacgtgataagtcaataatggatcttaaccagaccattgagacgatgaacaaagcagagcaacattttcacagccaggaagtgaaaaatgaatcagaacaagccaagtatgctgacaggcaaatggaacgaaaagctgaagttcagaaacaactggttgcggcgggtaatgttcgccagcgtattcctgctgacactcagcggttgctccgggagtcgatcagcgaatttaacgccgacgccgacaaagggatttttatgtctgataaagtaacagtaaagcaaactatcaacaaagcgacttcaatctacaaaattgagcaaatcactgttggcaagccaggatctgaacaataccgtcgtgctttcgagcttgccgatcagcttggtttaaaacacccggattgcattgagcatgtatttccgacctatgctgatgagcaatgtactcatgttcttaccgaagaggattttttcagcactgaagaacgagaaggcgttgatcgctgcattggtgtgatttgttcttcggtaagtgatgagttattccctaatgtgcctgaatatggtggtattggataccaattcctgtacgagggcgatgagcttaaatgctatgaacatgacattgaaagtaaggcaaaagaactaacagttaattcaaacaacactgtgcagcctgtagcgttgatgcgcttgggggtattcgtgccgaagccatcaaagagcaaaggagaaagtaaagagattgatgccaccaaagcgttttcccagctggagatagctaaagccgagggttacgatgatattaaaatcaccggtcctcgactcgatatggatactgatttcaaaacgtggatcggtgtcatctacgcgttcagcaaatacggcttgtcctcaaacaccatccagttatcgtttcaggaattcgctaaagcctgtggtttcccctcaaaacgtctggatgcgaaactgcgtttaaccattcatgaatcacttggacgcttgcgtaacaagggtatcgcttttaagcgcggaaaagatgctaaaggcggctatcagactggtctgctgaaggtcgggcgttttgatgctgaccttgatctgatagagctggaggctgattcgaagttgtgggagctgttccagcttgattatcgcgttctgttgcaacaccacgccttgcgtgcccttccgaagaaagaagctgcacaagccatttacactttcatcgaaagccttccgcagaacccgttgccgctatcgttcgcgcgaatccgtgagcgcctggctttgcagtcagctgttggcgagcaaaaccgtatcattaagaaagcgatagaacagcttaaaacaatcggctatctcgactgttctattgagaagaaaggccgggaaagttttgtaatcgtccattctcgcaatccaaagctgaaactccccgaataa

SEQ ID NO: 17808 - DNA, 816 bp, Homo sapiens
  SIMILAR (397)..(816): 921254mologous to coliphage phiX174 major coat protein,accession number V01128,Smith-Waterman Score=716.
atggaaggcgctgaatttacggaaaacattattaatggcgtcgagcgtccggttaaagccgctgaattgttcgcgtttaccttgcgtgtacgcgcaggaaacactgacgttcttactgacgcagaagaaaacaggctcacggtccgggtgtggggtttgggagaggatgcaggacagataaccagtacagtgcagtgcagtaattggcaagaggaggtgcttacagatgctgctgatgagatggttttggcttctggagccacgatatcggcggctttgaaaataccgctccggcgcacgtttacaaacgctggtgcgcgtttggtttgctctccagccatagccgtttacacggtagcaaatgttatcgtgtaccgtcgaaaatataccacggaactgggcactgtgcttcctggagataataggctttcagagggttatttgaatatctataacaactattttaaagcgccgtggatgcctgaccgtaccgaggctaaccctaatgagcttaatcaagatgatgctcgttatggtttccgttgctgccatctcaaaaacatttggactgctccgcttcctcctgagactgagctttctcgccaaatgacgacttctaccacatctattgacattatgggtctgcaagctgcttatgctaatttgcatactgaccaagaacgtgattacttcatgcagcgttaccatgatgttatttcttcatttggaggtaaaacctcttatgacgctgacaaccgtcctttacttgtcatgcgctctaatctctgggcatctggctacgatgttgatggaact

SEQ ID NO: 17809 - DNA, 4207 bp, Homo sapiens
  SIMILAR (1569)..(2153): 981254mologous to Escherichia coli glucose-1-phosphate adenylyltransferase,accession number U18997,Smith-Waterman Score= 1024.
gtgattggatcatgtgggtggatccctcgtgaaatcgtcgccgttcatccgcaacgtttaagcgaagtagaaggcgtgaataaccgcctgcaactctcccgtctggagcgtgtttatcagtccgaacaggctgaaaaactgctgttagcaggcgttatgctgcgcgatccagcgcgttttgatctgcatgcgaatctggcagcggcctgtaccattggcccgtttgcccgtttgcgtcctggtgctgagttgctggaaggtgctcacgtcggtaacttcgttgagatgaaaaaagcgcgtctgggtaaaggctcgaaagctggtcatctgacttacctgggcgatgcggaaattggcgataacgttaacatcggcgcgggaaccattacctgcaactacgatggtgcgaataaatttaagaccattatcggcgacgatgtgtttgttggttccgacactcagctggtggccccggtaacagtaggcaaaggcgcgaccattgctgcgggtacaactgtgacgcgtaatgtcggcgaaaatgcattagctatcagccgtgtgccgcagactcagaaagaaggctggcgtcgtccggtaaagaaaaagtgatgtggcagcatcattgagaaaaccacgctgtcatctcgcccgttttactggtgccctggctgccaacactatgccgaccgcttcggcgcataacaaaagcacgataacgacgatcggctgctggcgctgttattactgaatactttcactccccgtgcgcaactcgcctcggcgcttaatttgccagaaacgtgggtagcagagcgtctgccccggttaaaacagcgttatgaacgcacttgttgcctggccagccgccctggtttgggccatttcattgatgagacagaagagaaacgcgttatcttgctggcgaacttgctgcgcaaagatccgtttttaattccgctggcgggcataacacgagacaaccttcagcatttatccacggcctgcgacaaccaacaccgctggccgctcatgcagggtgattatctctccagcctgattctggcgatttacgccctgcgtaatcaactgaccgatgagtggccgcaatatcccggcatcgctcatgacctgcgggagttcttcgatatgtctgaccagatagttgtgtttggtgatggggatagagatgccgtaggtgtccacttcctggaaggcgtcggtgccgatcatcgaggcgggaacctgaccagtgatgcaaatcagcgggatggagtccagccgcgcatcggcaatggcggtcaccaggttagtcgcacccggtctctacggcagtttacgccacaaacaagcaacagtcactggatgaccaatgcccagttactgggcgatttcagtatcgataactaccagttgtatagcctgggccactatccaggcgcagttccggggaacggaacggtacacggtgaagtttatcgtattgacaacgccacgctggccgaacttgatgccttgcgcaccagggcggtgaatacgcgcgccagttgacgctcgggggtattccaaggggggatccccttaagcaagactactcgcgtatgcttatcgatcacgtcgaaaaaggcgcacgttgcaccgttgcttgtatgccagtaccgattgaagaagcctccgcatttggcgttatggcggttgatgagaacgataaaattatcgaattcgttgaaaaacctgctaacccgccgtcaatgccgaacgatccgagcaaatctctggcgagtatgggtatctacgtctttgacgccgactatctgtatgaactgctggaagaagacgatcgcgatgagaactccagccacgactttggcaaagatttgattcccaagatcaccgaagccggtctggcctatgcgcacccgttcccgctctcttgcgtacaatccgacccggatgccgagccgtactggcgcgatgtgggtacgctggaagcttactggaaagcgaacctcgatctggcctctgtggtgccggaactggatatgtacgatcgcaattggccaattcgcacctacaatgaatcattaccgccagcgaaattcgtgcaggatcgctccggtagccacgggatgacccttaactcactggtttccgggcgtgggccgacgcttgagtgtgacatcgaccgcgtgcgcgccatccgtaaaagtcggctggtggaagtggcagaagggcagcctgcgcagggcgatttcccagcctgcctggtcgccaatgaaaattatcaccatttccgcgtggtgctggtgcgtaccgatccggcaaccgagcgtttgattttaaccgccgcacaactggatgccctcaaatgccacgccggggatcgcgttcgtctggtgcgcctatggtgcgattcgccaggtgatgcgccagtgccagttgttgatgattatcgcaaagtggtgcgtaaagacaccaaagggttgatcgctcgttggaagtatttctggatgtcggtcattgcgctgggtgtcgccttcgccctgtaccttgccggcaaagacacgcccgcaacgcagctggtggtcccattctttaaagatgtgatgccgcagctggggctgttctacattctgctggcttacttcgtcattgtgggtactggcaacgcggtaaacctgaccgatggtctcgacggcctggcaattatgccgaccgtatttgtcgccggtggttttgcgctggtggcgtgggcgaccggcaatatgaactttgccagctacttgcatataccgtatctgcgacacgccggggaactggttattgtctgtaccgcgatagtcggggcaggactgggcttcctgtggtttaacacctatccggcgcaggtctttatgggcgatgtaggttcgctggcgttaggtggtgcgttaggcattatcgccgtactgctacgtcaggaattcctgctggtgattatggggggcgtgttcgtggtagaaaacaaacgctgacatctcaatattccagagaagaggatgagtgtgaagggtggtggcgattttaaacaaggtgatcaggaagaccttgtggataacttcgggtctgagcacactccatcaggctgcttccacttactccaatgggctgctggagcagtcagtcatggggccgccagcagcaatgggggcctgcacccgctcagccaagggagggcagaggagaggaatagccatgggacccgaatgcccggatgacgttacagccaaaaccgttctctcctgaaagctcagggggaaacagggagcaggtaaagctgctgagcagctctgttcaaggctcactaaaaaggggtttctcagcccacttccagatgtgggggagggatcatctgactgacttcatggtgcgggtccttctgctgtctggaagcctgagtgctaggccctgccccttggatgaacatgctgcactccccaaggacccctgtgaggcaaggcagaaatggcttcctaggggacccagcaagtccacagggcttttctcactgcttcctctactcctgtatttcggttggctttctaagttcactcagctccagaccttcaggttcctgactgagggtgtgtgtttggggatggaagattccccctttcccacctccacagtttgggcactcacagtatgtgggggtgtttcttggagcctgcaggagcaatccacttccttcagaggtggggtatctccagtgtctgtattagatgaaccagactttaagaattccacgccaccacatgactttgcttttacctcgtttcaccaacttaaaaccaaatcctttgttgaaaccctctctgggagctttgacaagctcagggggtacaagtctctgggccagcttgtttctcacatacccaaagatgagccctttgatcataagcacttcaaaaattttaccttcatgatagaattctttccaaaacgtgttgcatactttcctgccttgaccggaggactttacctcctaggagccgcagcttcctacagaagaccagtgggtgtgccagcgatgttagaatgggtccacgtgccccaggaaggcagccttttccgcagcacagaagtgggagagcatagctggaaggaatggaggacagcggagcagaactcaggaccagagggaggcctgaaggaagttgtcttagtgtag

SEQ ID NO: 17810 - DNA, 493 bp, Homo sapiens
  SIMILAR (423)..(1): 1001254mologous to Escherichia coli K12 putative amidase,accession number AE000167,Smith-Waterman Score=729.
atctataatccggctttgaccgatatttttgttcccgcactcccccgccgccaccatataacaggtggtatccagcgcacgagcggcaagcaacgttgaccagtgatgctctttgagcggcccgcgaacccaggcggcaggaagtaccaggatttcagctccctgtaatgcctgtgccagcgccagctctggaaagcgtaagtcataacaggtcatcagaccgaccttcatcccttccacctccagtaacggagcgatttcattaccagcatcaacacggcgtgattcctgaatggcaaatgcatcatagagatgcagtttggcataacgggcgacgatgtttcctgcctgaagtgccaccagcatattccatgcgcgccccggcgttgaaggaacatgaatcgtcagaattgtcgtcatcatgttacgtttactttctcgccgtaaagtccgaggaattcgccttccagcagctgtgctgatttagccgata

SEQ ID NO: 17811 - DNA, 1203 bp, Homo sapiens
  SIMILAR (643)..(867): 1001254mologous to Escherichia coli high affinity ribose transport protein,accession number M13169,Smith-Waterman Score=381.
atgacacggtacttttttccagtccgggcttctggcgcggccaaaaaaaccttctcgccagaaagcgaagattatctgaaaaatcctgtgttcgtattccagccagtagtctggcgactctttctggctaccgttaacgatgttctgcttgaacataccgtagtcatagcggatgccgtaaccgcgccccggcaacaatttccggcggacaaacgcaggataagatcccgcagtttggtcagcaaacgccgtatgaaacgtgcggggcaaccggcggaactggcccctgtatatgtttataaacgcatgaagattcaacatgttgcaatagattttgtaggcctgataagcgtagcgcatcaggcattgagcacctaatgccggatgcgtcgtgaacgccttatccggcttcgctttggcggtttcttcgccgaccagacctatcttcaggtaacccgcctgatgcagcgtatccattaccttcatcaacgtctcgtaatcgacggttttgtccgctcggaagaagatggtggtgtctttcttgccttcggttaacgcacacccggggatcctgtagagtcgttcatccgcaacgtttaagcgaagtagaaggcgtgaataaccgcctgcaactctcccgtcgggccaaaatcttcccaggaagccgggattgggattatccatcaggaactgaacctgatcccgcagttgaccattgccgaaaacattttcctcggtcgtgagtttgttaatcgctttggcaaaattgactggaaaaccatgtatgccgaagcggataaattgctggctaaacttaacctgcgctttaaaagcgacaagctggtgggcgatctttccatcggtgattatgcaggcgtggtgcacgcggtcaatgatgtcggtacggcgggtatcaggaatagcgaccgtagtcactggcgtgcggcctggcggcagctcatctatcaccgaggtatcgagatcggcatacgcagtcattgccagcgtgcgggggatcggcgtggcggtcatgatcaactgcaacaacataccgcctgcagccggtttgccgtctacgtcgccggtgcgaataaacaggcgcgtcggcagctgttcagaatttcctgcctgaagtgccaccagcatattccatgcgcgccccggcgttgaaggaacatgaatcgtcagaattgtcgtcatcat

SEQ ID NO: 17812 - DNA, 764 bp, Homo sapiens
  SIMILAR (602)..(694): 871254mologous to Escherichia coli K12 N-acetyl glucosamine-1 -phosphate uridyltransferase,accession number AE000450,Smith- Waterman Score=148.
gactcaggacaacagctggacgatgtccagcttgctcgctaccttttgtcgggtcaaaatcaacccaaatcagatcgcccatatcgggtacgtatcggcttaccattaccagacttccttatctttcggctctccccagtcgatattctcgtggaggttttcggcgggatgtctttgaccattcaacaagcagcccttcagatacaggcgatcaacaccggcattctgattgccaacggcgcagatatgaaacgctggctggcgaagctgaccaacaataatgctcagggcgaatactacatcaccgacattattgcgctggcgtatcaggaagggcgtgaaatcgtcgccgttcatccgcaacgtttaagcgaagtagaaggcgtgaataaccgcctgcaactctcccgtctggagcgtgtttatcagtccgaacaggctgaaaaactgctgttagcaggcgttatgctgcgcgatccagcgcgttttgatctgcgtggtacgctaactcacgggcgcgatgttgaaattgatactaacgttatcatcgagggcaacgtgactctcggtcatcgcgtgaaaattggcaccggttgcgtgattaaaaacagcggtgattggcgatgattgcgaaatcaatccgtataccgttgtggaagatgcgaatctggcagcggcctgtaccattgggcccgtttgcccgtttgcgtcctggtgctgagttgctggaaggtgctcacgtcgtctctagtcccacccgatga

SEQ ID NO: 17813 - DNA, 1463 bp, Homo sapiens; identical to SEQ ID NO: 17725
  SIMILAR (561)..(728): 961254mologous to Homo sapiens KB07 protein,accession number AF064606,Smith-Waterman Score=325.

SEQ ID NO: 17814 - DNA, 988 bp, Homo sapiens
  SIMILAR (988)..(530): 991254mologous to Escherichia coli alternate gene name yibK,accession number U00039,Smith-Waterman Score=805.
tggtcgaaaatgtcgcgtgccgttcgcccaagcgactgggagagctggacacagacgcgtgaggtggtgcgacaaaccgtccggtgtagaccagatccgccatctgcagcagtttgtctgactgccagttcgccagcgaattgcggtattcccattggctaatgaatgctggcagagattctggcttaacgcggaagaagttaacatcgacattattaacgttgagcgccattaccggcagcccttcaacgactttgccaggcagcagcgaaccacggctggcatgagcttctgcaaaacgccctggcgcagtagccagcgtggtgatcctcccatcgtcgttggtgaaacggcggtgattgaaaacgacgtatcgattctgcaatctgtgacgcttggcggtacgggtaaatctggtggtgaccgtcacccgaaaattcgtgaaggtgtgatgattggcgcgggcgcgaaaatcctcggcaatattgaagttgggcgcggcgcgaagattggcgcaggttccgtggtgcgctcccggataccccaactgccgccaggcttcatacaccactaccgagaccgcattggacagattcatgctgcggctgtccggcaccatcggaatgcgaatttttggttcagcgggcagggcatcaagaatgctcgctggcaggccgcgtgtttccgggccgaacatcagataatcgccatcctgatagcttacggcgctgtgagcaggtgtacctttcgtggtgagggcgaacaggcgctggggattttctgcttcgaggaacgcgcgatagtcatgatgacgcgtaacggcggtaaactcgtgatagtccagccccgcgcggcgcaggcgcttatcgtcccaggcaaatcccatcggttcgatgatatgcagacgaaagccggtattagcgcaaagacggatgatgttgccagtatttggcggaatttctggttcgtaaagtacgatgtttagcat

SEQ ID NO: 17815 - DNA, 1287 bp, Homo sapiens
  SIMILAR (1)..(531): 981254mologous to Escherichia coli No definition line found,accession number U00039,Smith-Waterman Score=866.
atggtggtggtcaaagtagggattattgtcgtgttcggttttgcgatgatcccgcactggaatttcgccaatataaccgccttcccgcaagcctccgtctttttccgcgatgtcttgcttaccattccattttgcttcttttctgcagtatttattcaggtacttaacccaatgaatattgcctatcgtaaacgggaagcggataaagtactggcaacccggctcgcgctgcgtacccaccgaattagttatatcacgctcatcgcggtgatcctgttttttgccttttcgtttaccttctcaattagccacgaagaagccgtttctgcctttgaacaaaatatctcagcactggcgctggccgcgcaggtgatccctgggcatatcattcatatcacctctacggtgcttaatatctttgccgtactgaccgcattctttggcatttatctcggtttccacgaggccattaaaggcattattctcaatctgttaagccgaattattgataccaagaaaattagggtacgagctagagttcgttcaggcggcacgaacataacgccatgggttgctggcatcattgcttttcgcatcacccggacagttagaagaggctacccaccaggcatttttatataccgcaccattaaagacgacataccaggtctgaccgccctgctgtttattccaggcaactacagaagaattagacggaacagtgccctgtgctggtgtagccgaaccgccattagccggcgtattggatgcaggcagtggaagcgaaggagtcaaaaaatgaaaggtgatactaaagttataaattatctcaacaaactgttgggaaatgagcttgtcgcaatcaatcagtactttctccatgcccgaatgtttaaaaactggggtctcaaacgtctcaatgatgtggagtatcatgaatccattgatgagatgaaacacgccgatcgttatattgagcgcattctttttctggaaggtcttccaaacttacaggacctgggcaaactgaacattggtgaagatgttgaggaaatgctgcgttctgatctggcacttgagctggatggcgcgaagaatttgcgtgaggcaattggttatgccgatagcgttcatgattacgtcagccgcgatatgatgatagaaattttgcgtgatgaagaaggccagatcgactggatggaaactccacttgatctgatgggtaccgagctacgagttcgtctatccctcgtgttttatgcagaaaatctgatagagaaacattaa

SEQ ID NO: 17816 - DNA, 958 bp, Homo sapiens
  SIMILAR (508)..(957): 981254mologous to synthetic construct cysE,accession number A31758,Smith-Waterman Score=758.
tcaaatacgcctgcatccaatacgccggctaatggcggttcggctacaccagcacagggcactgttccgtctaattcttctgtagttgcctggaataaacagcagggcgctcagacctggtatgtcgtctttaatggtgcggtatataaaaatgcctggtgggtagcctcttctaactgtccgggtgatgcgaaaagcaatgatgccagcaacccatggcgttatgttcgtgccggtagttctgaaaaacatgtccgacttaagcctggaaacgacgctgtttaatgagaaattgtcgatgccggtgggctggctccggtgggtttgtgtggcatgtatgcgcgtcgtggcgaagttcaggcagccaaagcggcggacgcgcatggtattccgtttactctctcgacggtttccgtttgcccgattgaagaagtcgcgccagcatgcaagcgcccaatgtggttccagctttatgtactgcgcgatcgcggctttatgcgtaacgcgctgaagggttttcatgccttgcaggcctatcgcatcggtcactggttgtggaatcaggggcgtcgcgcactggcaatctttctgcaaaaccaggtttctgtgacgttccaggtcgatattcacccggcagcaaaaattggtcgcggtatcatgcttgaccacgcgacaggcatcgtcgttggtgaaacggcggtgattgaaaccgacgtatcgattctgcaatctgtgacgcttggcggtacgggtaaatctggtggtgaccgtcacccgaaaattcgtgaaggtgtgatgattggcgcgggcgcgaaaatcctcggcaatattcaagttgggcgcggcgcgaagattggcgcaggttccgtggtgctgcaaccggtgccgccgcataccaccgccgctggcgttccggctcgtattgtcggtaaaccagacagcgataacccatcaatgt

SEQ ID NO: 17817 - DNA, 5082 bp, Homo sapiens
  SIMILAR (1984)..(2679): 981254mologous to Escherichia coli OUTER MEMBRANE USHER PROTEIN PAPC PRECURSOR,accession number D90864,Smith-Waterman Score =1238.
atgcaggttggcgatttctcgaccggggtagatcttaatggcaacaataacagcgtgacgctggcggcaaaagatctaaaagtggtcgggcagaaagcgacgggcataaacgtttctggcgatgcgaatacagtgaatatcactggtaacgttctggttgataaggataaaaccgcagacaatgcggcggaatatttcttcgatccatccgtgggtatcaacgtttacggcagtgataataacgtgacgctggatggaaagttaactgttgtatcagacagtgaggttacttctcgtcagagtaatttatttgatggcagcgcagagaaaacgacttttgttggcggtaactgtaccgtaagcctgatgttgatgtcgttgggtggtttattcgccaatgatcttgttgattgggtgtccgttgcaacctaccaggccgcttccggcggtggtgcgcgacatatgcgtgagttattaacccagatgggccatctgtatggccatgtggcagatgaactcgcgaccccgtcctctgctattctcgatatcgaacgcaaagtcacaaccttaacccgtagcggtgagctgccggtggataactttggcgtgccgctggcgggtagcctgattccgtggatcgacaaacagctcgataacggtcagagccgcgaagagtggaaagggcaggcggaaaccaacaagatcctcaacacatcttccgtaattccggtagatggtttatgtgtgcgtgtcggggcattgcgctgccacagccaggcattcactattaaattgaaaaaagatgtgtctattccgaccgtggaagaactgctggctgcgcacaatccgtgggcgaaagtcgttccgaacgatcgggaaatcactatgcgtgagctaaccccagctgccgttaccggcacgctgaccacgccggtaggccgcctgcgtaagctgaatatgggaccagagttcctgtcagcctttaccgtgggcgaccagctgctgtgggggccgcggagccgctgcgtcggatgcggcttttactgcaccaccagaaactggcgcatccagcatttccagatcgaatccagccagagcggtagcaatttcttgcgcatcagcactagcgatagtggaagaaaccattactgccgtaccgggtttcagatgttgtgcaacgcctgtttcaccaaacagcacctgtttaacctgggccgcattgaccaccagcaccagcagtgcgtccagtttttcggcaaacgtcgcggcgttatcagaaaccccgcaagcacctgcctctttcaacgtagcgcaggcattgctgttcaggtctgcgccccagtgatcggacatgattcggcgccacaaaatgccactcttagggatgatgaaacgctggcttcccgtcacgcgcaaattgtggcgcgtattgatacggtaaaacagcagtggcgcgacgcagtgggtgaactggatgcgctgatcgaatcttctggtattgatcgacgcaagtttaaccgtagcaatcaggctaaatggatcgacaagatcagcgcctgggcagaagaagagacaaacagttatcagttgccggagtcgctggaaaaattctcccagcgtttcttagaagatcgcacgaaggccgggggggaaaccccgcgacatccactgtttgaggcgatcgatcaactgcttgcagaaccattgtcgatccgcgatctggtgatcacccgcgcattggctgagatccgcgaaacagtagcgcgtgaaaaacgccgccgtggcgaattgggttttgatgacatgttaagtcggctcgattccgcgctgcgtagcgaaagcggtgaggtgttggcagcggcgatccgtacgcgattcccggtggcaatgatcgatgaatttcaggataccgacccccagcagtaccgaatttttcgccgtatctggcaccatcagccggaaaccgcattgttgctaattggcgaagaagacgtggcgaaaaatctgcaatggagccacgatggtaaatgcctgaagcccggtcaactggaaggcgtggaaattaaggctgatttaagccagtccgcattagtcatttcactaccgcaggcttacctcgaatatacctggcccgactgggatccaccttctcgttgggatgatggcatctccgggatcattgcggactacagcatcactgcgcaaacacgacacgaagaaaatggcggcgatgacagtaacgagatcagcggcaacgggacggtcggggttaacctggggccatggcgtatgcgcgctgactggcagaccaactatcaacatacgcgcagtaatgatgatgacgatgaatttggcggcgatgacacacaaaaaaaatgggagtggagtcgctattatgcctggcgggcgttaccgtcattaaaagccaaactggcgctgggcgaagattacctcaattccgatattttcgacggttttaattatgttggtggcagtgtcagcactgacgatcaaatgttgcctcccaatctgcgcggctacgcgccagacatttccggcgtggcacacaccagagcaaaagtgaccgtcagccagatggggcgtgtgatttacgaaacgcaggttccggctggaccgtttcgtattcaggatctcggtgattccgtctccgcatggctggtggcacataaggatgatatagagcgccattacggggaaccactgtacaaagttgttggtgttgtgacgccattttcggcgcaggttaatgctatcaaaatgtcattgcgtaagctggaaattaatggcaaagacgagcaggccttctatccgctcaatgagtcggtcgccattgcccgggcgcgtgacaaattgcgttccatgcaactgctggcgcgtcagggcatcgacctgcctgtcacgggcattgcgcattcgccggatgataccagcgatttaatcgacatggtcggtggtgcgccgctggtggtcaagttggttgaaggcacgcagggaattggcgtcgtgctggcggagacgcgtcaggcggcggaaagcgtgattgacgctttccgcggtctgaacgcgcatattctggtgcaggaatatatcaaagaggcgcaagggtgcgatatccgctgtctggttgttggcgatgaagtggtcgctgcgattgaacggcgggcgaaagagggcgattttcgttccaatttgcatcgtggcggcgcggcaagcgtcgccagtatcacaccacaggagcgtgaaatcgcgataaaagccgcgcgaacgatggcgctggacgttgctggtgtggatattctgcgtgctaatcgcgggccgttggtgatggaggtgaatgcgtcgccggggctggaaggaatagaaaaaaccaccggtatcgacatcgcggatttgtcagaagtggcgctgcgccagcgtattctgaaaaacatgtccgacttaagcctggaaacgacgctgtttaatgagaaattgtcgatgccggtggcactggctccggtgggtttgtgtggcatgtatgcgcgtcgtggcgaagttcaggcagccaaagcggcggacgcgcatggtattccgtttactctctcgacggtttccgtttgcccgattgaagaagtcgcgccagccatcaagcgcccaatgtggttccagctttatgtactgcgcgatcgcggctttatgcgtaacgcgctggagcgagcaaaagcagcgggttgttcgacgctggttttcaccgtggatatgccgacaccgggcgcacgctaccgtgatgcgcattcaggtatgagcggcccgaacgcggcaatgcgccgctacttgcaagcggtgacacatccgcaatgggcgtgggatgtgggcctgaacggtcgtccacatgatttagtggttgtcgtactggtggtgacatttgcgaacgtcttcaccatcattcaacctgtggttgaagccggagactgggacagcacattgtggatgattggcggccctgtcttcttctcgctgttagcgatggcgatttaccagaactattgcagcagagtggcaaaaaatccgcagtgggcgggcgtaaagacaggaaatgttatggatgacaccagccgggacccggcaataaccgaagatgaaatcagggcgctgcaattttctgccggggatgtagcggaaatagagcagacgattctctcttttgtcgatgcctgccacacccgtaaagtggcgatggtggtgggtagcaccattaacaccctcaaagatcgcgatgcgaaattaagcgagcggttaccttatgagtgcgcgcatgtttgtcttatgctgcatctggtttatggtggcgttcctcttctggagcaccagttacaactgttgcaagaagcggtaaacagcaagcgcctgactttaaccgaaaaaacggcgcaggaagccgtctccccggatgaagccgcgcgtattcaggctaatccgctggtgaagcaggaactggaaattaaccagcagttaagtcagcgtctgattaccgcgactgaaaacggtaatcagttgatgcagcaaaacattaaagtcaaaaactggctggagcgggcgctgcaatcggaacgcaatattaaagagcagattgccgtcctgaagggcagcctgctgttgtctcgtatcctttaccagcaacaacaaacgctgccctcggcggatgaactggaaaacatgaccaaccgcatcgcggatttgcgtctcgaacagtttgaagttaaccagcagcgtgatgcactcttccagagcgatgcgttcgtcaacaaactggaagaaggtcacaccaacgaagtcaacagcgaagttcacgatgcgttattgcaagtggttgatatgcgtcgcgaattgctggatcaactcaacaaacagttgggtaaccagctgatgatggccattaacctgcaaatcaaccagcagcagttaatgagtgtgtcgaaaaacctgaaatccatcctgactcagcaaatcttttgggtgaacagtaaccgtccaatggactgggactggatcaagcgtagaccaaatttctgcggcatataa

SEQ ID NO: 17818 - DNA, 258 bp, Homo sapiens
  SIMILAR (113)..(3): 641254mologous to Homo sapiens Human gene 52-encoded protein fragment, SEQ ID NO:394,accession number Y86479,Smith-Waterman Score=146.
atgaacgtagttgcaaaaatcctcaacaaaatgctagaaaaccaaatccaacagcacatcaaaaaggtaacccattatgatcgagtagattttattcttgggttgcaaggttttcgttatgaaatctttgccattacctatgtcctgaatggtattatggagatgattaacatcgacttactgacggcaatgctgcttgagccacaactgccgcaaatcagtagcgccagcctgacggtggacaaaattgcaaagtga

SEQ ID NO: 17819 - DNA, 2448 bp, Homo sapiens
  SIMILAR (789)..(4): 1001254mologous to Escherichia coli envM,accession number M97219,Smith-Waterman Score=1322.
ttatttcagttcgagttcgttcattgcagcaatgctgaaaccgccgtcaacgtggaccacttcaccggagataccggcagagagatcggagcacaggaatgccgcagagttacccacatcttcaatagtaacggtacggcgaatcggggtaacggcttcgcaatgagccagcattttgcggaagtctttgataccggaggccgccagagtacggatcggaccagcagagatggcgttaacacgcacaccttccggacccatcgcgttcgccatatagcgcacgttcgcttccagagacgcttttgccagacccataacgttgtagttcgggatagcgcgctcagcgccaaggtaggaaagggtcagcagggcagaacccggattcagcatggagcggcaagcttttgccattgcaacgaagctgtaggagctgatgtcgtgggcaattttgaagccttcacgggtaacggcgttaacatagtcaccatccagctgatcgccaggtgcaaaaccaatagagtgtacgaaaccgtcaaatttcggccaaactttccccagttcagcgaacatggtgtcgatgctggcatcttctgcaacatcgcactgcagaacgatgtcagaacccaattgagcggcaaattcttctacgcggcctttcagtttgtcgttctggtaggtgaatgccagttcagctccttcgcggtgcatcgcttgagcgataccgtaggcgatggatagtttgctggcaacaccggttaccagaatgcgcttaccggaaagaaaacccatagctttaatccttattgttgatgcttgttgtgccttctccttctcctcttccttctcctcggggaagaaaagaccttccaattccccaggctcaaggaggctgggctcacctccatccggtgctggtagggcagggggcattgtcactgttgcctgctgagccagactctccacctgcaataccaagcagccaaagatggcaggtagggcctcagccatgatcccattgatgctaactaaggggaccctgaaatagccctgggcagctgatcccgggctgcactcaggcctgccaaagcttgagccacaatgctctctgccaaggtctctgcgattgatagtcagggcttcgccattatcgataatggtcgttcccacatcgtgcactgcttgttgtgtcggctgcgtaccttcgatgaaatactcttcgcggctgttgccaccattagctaactgcccggtgctgcgatcgatattcaccgtcacaatacccggtggcggcgtcagcggctgctccggcacaccttcaagaacggctttcatataagcgtcccatgcaggctgggcactcttggcaccgccttcgtaacctgagatctgatctttaatcgctccggaagccgttgtatgaccgagattacgacggtgatcatcaaagccaatccagaccgaggtcacaacgcccggaccgtaacccgagaaccacgcatctttcgaactgttagtggtcccggttttcccgccgatatcgcgacgctgcaaatcacgacctgcacgccagccagtaccctgccagcctggctcaccaaagatattggtgttcaaagcactcttaatcaggaatgccagcggagtgttgatgacgtgcggtgcgtactcctgcgcgccagtcttcgccactaacgcctgatttgcctgctccagctgcggcattggtacagaaacattctgctgctgtgcatacgaataggactgggacttctgaatggcttggggagttccttggtggaagccacttgtggctgacttaaggcctttccgacagtccctggtgtgagtggggcctggcagttctgaagggccagagtctgtggacttatgaactgagtctaggtgtgcagatggggcagggtctgtagatgtggggacagagcctgttgtaccgagggtagagcttgtggcaaagtggccagggtccagggcaggaggaacaggactggggtgctctccatgggtgggagctgggtgtgtaggtgggctaggtccccaggctaggctttctgggccaacggcctccactgaagcctcagccaaggcagcatctacactagcctcactgatgtggctcagagtccgactgtagggtgcatgcccatttgccaggactggggccacggccccctcctcatccaagggcccagagctgggggtctcaggcctgcggaaggcaacttggatgggaaggggctcgggctgctgcaccaggggcctaggggctggtgagtggcgggcagtgcctgagagctgtgggctggatgagtcgtctgaagattcagatgacagggaccatgctgtcccattctccagctcctcctgccgtcgcagcatgttgcgccctcgccgggtcgctcgtgggctctgcaggcgccgcggcgtcat

SEQ ID NO: 17820 - DNA, 888 bp, Homo sapiens
  SIMILAR (328)..(426): 961254mologous to Escherichia coli CitG homolog,accession number U82598,Smith-Waterman Score=160.
gtgtcaggttccaaggcagttcattctgccacggtatcagttactacccacatgcagaaacattcatcttcactgaccagcgagagtcctgaggtcaagagctgtgagcccaccacaaaccacagggaaactatcagggtagatgagcagagaaagaaaagcagcagaccaaccactacagatttcagccaacacaaatttctccccggtgacaatgttgattcagaatcatactggctgtacttctatgcttataaaatagccgacccccccgccccgcagcataaaaaagggacaaaatccaaagccaagaattctaattacccggggttagatcctgaactggcattgctcgataccttgctcctactgatggcgatcaacggcgataccaacgttgcatctcgcggtggccagggggggttgatcgatccagccgatcagatctttcggagcaccggcagcgatagcagcctgcagaacgatatcagccgctttgttggcagcatcacccaccgactttatttattctgtgtgaacacagacaaatacatcctggatgagcctggtgggcctaatgcaattaaaagggtcattgtaagagggaagcaagaagacacacatagcattgagtatgactctagaggatctcgtgttttgcgccagcagatccatcgctactttcaggacgccgaaaatacctattttgaccattacgccagacatcaacgccgaagcgtgcgatggtgcggcgtgattggcatcatcagcggaattacgcaattacatgctgttgtgaccttctctggaaaatttcactttgctggcatccttgtccaccttgcccaagacacctggcaacatacaggtttatttgtgaccttttag

SEQ ID NO: 17821 - DNA, 2677 bp, Homo sapiens
  SIMILAR (1842)..(694): 981254mologous to Escherichia coli valyl tRNA synthetase,accession number J03497,Smith-Waterman Score=2020.
atgaactacttcaccgattcggtggggatgttgctgatgtatctgccgcgcatgttgttctataccgatcccatcgctaaaggcggcttcccgcagggctggaccgtgttctactgggcatggtgggtgatttatgctatccagatgagtatcttcctcgcccgcatctcccgtggtcgtactgtgcgtgaactgtgcttcggcatggtgctggggctgacagcgtcaacctggatcctgtggactgtactcggtagtaacactctgctgttgatagataaaaacatcatcaacattccaaatctgatcgaacagtacggtgtggcgcgcgccatcattgaaacctgggccgctctgccactcagcaccgccaccatgtggggcttcttcatcctctgctttattgccaccgttacgctggttaacgcctgctcttataccctggcgatgtccacttgccgcgaagtacgcgatggtgaagaaccacctctgctggtgcgtatcggttggtcaattctggttggcattatcggtattgttctgctggcgctcggcggcctgaaagcgattcaaaccgacattatcggcggaggatgcccgctgttcttcgtcaacattatggtgacgctctactttattaaaaacgcgaacacagactggaaagcttcattaacccacaaaatatcaaaaccccgcacaggtgaagcccagcgcgtcagtacggtgcggctcaataccgttcgggaactgcttctcggtgcgcttacggattttgtccgccagctgcgcctgcatcatattgccggtacgtttttccagcagttctggcagcgaaataccgtcaaccatatccagtgggtcgataacgttacccttggatttggacatcttctggccttcgtcatcacgaatcaggccggtcatgtaaacggtgtggaacggcacctgcggtttgccattttcatctttgatgaagtgcatggtcatcatgatcatgcgggcaatccagaagaaaatgatgtcgaaaccagataccatcacgctggttgggtggaactgacgcagggcgtcggtattttccggccagccaagggtagagaaggtccacagcgcagaagagaaccaggtatcgagaacgtcttcgtcctgacgcaggacaacatcagcaccgaggttattttctttacgcacttcgtcttcgttgcggccaacataaacgttacccgcttcgtcataccatgccgggatacggtgaccccaccacaactgacgagagatacaccagtcctgaatatcgcgcatccaggagaagtacatgttttcgtactgcttcggtacgaactgaatgtcgccgttctcaaccgcttcaaccgccggtttcgccaggacatcggcacgcacgtaccactggtcggtcagcattggttcgataactacgccgccacggtcgccgtaaggaacggtcaggtcgtgcggtttaatttcttccagcaggccaagcgcgtcaactgcggcaacgactgctttacgtgcagcaaaacgctccagtttctggaactctgcagggatttcgctggaataaacgtcagattcgttacctttggtatcgaacacctgggcgctttcacggatatcgccgtcaaaggtcaggatgttgatcatcggcagggcgtgacgtttacccacttcatagtcgttaaagtcgtgcgccggagtgattttcacgcagccggtgcctttttccatgtcggcgtgttcgtcgccaacgatcggaatacgacggttaaccagcggcagaatgacatatttgccaatcagatctttgtaacgcggatcttccgggagatcgtctcgttaatcggccctaacggtgccggaaaaaccacggtttttaactgtctgaccggattctacaaacccaccggcggcaccattttactgcgcgatcagcacctggaaggtttaccggggcagcaaattgcccgcatgggcgtggtgcgcaccttccagcaaagcgaagcgctcgaccgcgccgcgacctggcttgagcgcattggtttgctggaacacgccaaccgtcaggcgagtaacctggcctatggtgaccagcgccgtcttgagattgcccgctgcatggtgacgcagccggagattttaatgctcgacgaacctgcggcaggtcttaacccgaaagagacgaaagagctggatgagctgattgccgaactgcgcaatcatcacaacaccactatcttgttgattgaacacgatatgaagctggtgatgggaatttcggaccgaatttacgtggtcaatcagggacgccgctggcaaacgtacgccgagaaattcgaggcaggccccagtaacagtgacaaaatccattcaggacatgctgaaggcaataaggaagcgcgtggtaaagggatgttgatggcgattgagtttgttgataacgaaatcggctataactttgccagcgagatgttccgccagcgcgtactggtggccggaacgctcaataacgccaaaacgatccgcattgaaccgccactgacactgaccattgaacagtgtgaactggtgatcaaagcggcgcgtaaggcgctggcggccatgcgagtaagtgtcgaagaagcgtaatatcaaatcggatggcgatacgacgtcgccatcc

SEQ ID NO: 17822 - DNA, 1999 bp, Homo sapiens
  SIMILAR (938)..(1534): 851254mologous to Escherichia coli trkA,accession number X77091,Smith-Waterman Score=828.
atgacggcctcagaacgtcacgccagcacagagaatgatattcgcatacggagaacattctccgctgcgaattaccgcctgactttctgcggtttgttgtttgaattgttcatgcgtggtgtaacgaatttcaatggtatttccctggtgtttttgcagctgctcaagaactttagcaacaacgcccgcgccaacggtacggccgccttcacggattgcgaaacgcagaccgtcgtccatcgcgatcgggtggatcagggtaacaaccattttgatgttgtcgcccggcattaccatctctacgccttccggcagttcgatggtaccagtcacgtcagtagtacggaagtagaactgcggacggtagcctttgaagaacggagtatgacggccgccttcatctttggacagaatgtacacttcagattcgaacttgcacggccttcgtccagcagtttcaccagtgacaaacacaccagcgttgatggctactacagccatgatggttcgctggcgcaggttgacctcagtgcgaactaccatgaagggcaatacacctctgcgggcttgtcgttacagggcggcgcaacgcttactacccacggcggcgcacttcaccgtacccagaatatgggcgggacacgcctgctgattgatgccgatggcgttgccgatgttccggtggaaggtaacggggctgctgtttataccaatatgtttggtaaagccgtcgtttctgacgttaacaattattatcgcaatcaggcgtatatcgacctcaacaaattgccggaaaacgccgaagcaacccagtcggtggtgcaagccacgctaactgaaggagccattggctaccgcaaatttgccgtcatcagtggtcaaaaagcgatggcggtggtgaacttcgctgagggtaaagtcagcctggctgtggtgtaaagcctattatgcgcgtccgctgattggtaatgcactttcggccatgcgcgaacatatgccgcatatcgatactcgtgtggcagcaattttccgccacgatcgccccattcgtccgcaaggttcgaccattgttgaagctggtgatgaagtgttctttattgccgcttcacagcatatccgcgcggtgatgagtgaattacagcgactggaaaaaccgtataagcggatcatgctggttggtggcggtaatatcggtgcagggctggcgcgtcgtctggaaaaagattacagcgttaaactcatcgaacgtaatcagcagcgcgctgccgaactggcggaaaagttacagaatacgatcgtcttttttggtgatgagtcggatcaagaactactggccgaagatcatatcgatcaagttgatctgtttattgccgtcaccaaccatgacgaggccaatatcatgtccgccatgcttgccaaacgtatgggtgcgaaaaaggtgatggtgatgtacctgggccgctgcgtggagaagggaacgaaagaccaaatcttcaataacccgcgccatccgtacactcaggcgctactttccgcgacgccgcgcatgaacccggacgatcgccgcgagcgcatcaagctcagcggtgaactaccaagcccactgaatcccccgccgggttgcgccttcaacgcccgctgtcgtcggcgcttcggcccctgcacccagttgcagccgcagctaaaagactacggcggtcaactggtagcatgttttgctgggaatgtgacgttttatcacgaaaatcttgaagaagatgtcacaaagcagccgtgggcgaaaaacggcttcgataaagtgttgctggacccggcgcgagcaggtgccgcaggtgttatgcagcaaattataaaactggaacctattcgtatagtttatgtatcctgtaaccctgcaacgctggctcgggatagcgaagcgttattaaaagcaggatataccattgcgcgactggcgatgctggatatgttcccacacacgggacatctggaatcgatg

SEQ ID NO: 17823 - DNA, 4441 bp, Homo sapiens
  SIMILAR (508)..(3015): 211254mologous to Saccharomyces cerevisiae mal5, sta1, len: 1367, CAI: 0.3, AMYH_YEAST P08640 GLUCOAMYLASE S1 (EC 3.2.1.3),accession number Z38061,Smith-Waterman Score=215.
aacaaaaccggtatgtcaactatagcaaaatgtgatggggaaagagatgatacaacacaaaacatcacggaggtggctgctgtgaaaagcatttcaccagaagtttctgcctctaggagaaaattagattttaattctccaggtggttcttcaccagtagaaaattctgattgttccacaaatagcagattatctttctctcctgaaaatatcctcatccaaaaccaagacattgtgagagaagctgcagtgcagggagatgggcagaagcaaaggcagcctcaggccacagatctggactccagtgggacacatggcagtgagatgcttccagccacagaagtgactgtgtcaggagggttttctgttgaagaaaccagctgtggagacacagggagatctggtggtgaggccctggctgttgcaaatgattctaccagcacaccacaaaatgctaatggactttggaaattgaaatctacaactcccggtggtgctttgcctgagtgttttggcaccacagacactactttttcttcagcattttgcagaaaacatggagagacacaggatacctcccaaagtagcctgcctggtaccttacattgttacacaggcattcgagaggggggagacgacactgaggtagagagtgaggcatttagctgcagtgaggggagcgaacagcaagatgctcctgatgactcacagaaaaatttaggagacacagatgctgctgtagccgaggtgagaccttccttagaggtaggttatttgacgtcagctctgcaagattttaacataagtactttttctgagctggatagactttccacatcagaggttgtgatgtttcttgagagctgtcagttaggggattatagttcaggggactctgtttctgaatgttctagtaaaggaaccctaagtaaagaaatgaacaaagaattaaaggcaagtgaaataggagaaaaatacagaaagcaaccctgtgaggaagaaacacttggaacctgtgaagagtggattgaatcagaggaagatgattattcgttaaaaaatacaagtcagctcactcagtgttctttggaaactctgtctgaggttctgaccaagattaggcaagaacttcaaacaaattctgaagattgcaatggtaaagatactggcagtttattgctcttaaatgtaaataacaacatgaccactgagaatttaaaagagaaaagtccatttcgggaaacgactggctcctcatcacatgcttcagaaccaaccccacaagcagctgccttggacactgagggcagctctcccatcagcggtatgcctcagaatgaaaaccctcagagcagaccagaggcccgttcagatgcaggcaggcaaaccgatggtggggaagaagacctgccagaacctgtggagccatcagccttgtgctctgactctgtgatggagccatccatagagcaaagttctaactgcgaggccgaaacaacatttcagtgtcagatagcaacagtgacctcagaagttataaacgtacttataaataaggatcagaatctagtcattgaaaagggggacaactggacaatcatcagtggtgtagctgtcttgccacatgtggaccaggtcacactgtgtgacattcctggagacatccctatttctcaggatcaaggagagctggaagctggttgcatcccagtgacttctgctgagaagtccccagaggccagtcacactggccctgcatttcaggaggctccatgtggcaataatctttcatgtccccaagaggatgtttcaagcagtggtcagagcaccaactttgataagagtcgtttgcgaaatagacccgttaagcctagtatatggattagttctcaaatctatgatcaaaacttcgagactcagattgttgcgtctgatcacacatattataactcaaaactagagccatctggcaaaaataagaatcgatcaaagatttcaaacaaagatcagtcaaacaaaccagtaaaaacttcagcgtcgagcagagttgaaactcatcagagtgaagttgctcagtcattttcaggggaaaaagctaatacaaaaactcaaagaagccaaactcagaccattttagcaaatgctgatacatccactcctacagattgttctcctgacacactgagtaaaatacggcaagaggtggggcctcctttgccgcctctgcttgctcctctgatagctacacctccaaggacttcacagccactgtctccactgatatcgagttctagtccttcctcaccagcctctcctgttggccaggtttctcccttccgtgaaaccccagtgcctcctgccatgtctccatggccagaggaccccagacgtgcctctcctccagatccttctccatctccatctgcagcttcagccagtgagagggtagtgccgtctcctctgcagttctgtgcggccacgccgaagcacgcacttcctgtgcctggccgactcccaccctgtgcatctggccacgctgctgtgggagggcctcaggagaattctgtgaaaatccttgacaccatgtatccagagttatctgccagggcccggaccctcaacatcctcaaagggaatattcaactcacacgaggtccgcctgctgactgtaagaatttaccgggacctgccagtgctatgataggattcaaaacgatcacttcagcagcaactgcttttgtcaaaactgggagcagctctggtggtgactgtaaccaagacaagtcaagagatttggggactcagcaggattcaagcgggaaaagaacactgtcaacgtctacactgagaagtgctaaaagactgcgcctggacactgggtccccagaaccagaaaccaggggagtcactgcagaaggaatccacaaaaacctcccagggaacctccctccagctgaagttgcaacaacaaatgaggaaagaagttgttctagtccagccgtcagtgcagtttcacagttgcctttaagcccaaaagaaactgtggagtcccatgataaagccatagctaatgccctgaagaaaattgcagagttttcttttgatctgttacctgtcattcgtagtcatgtgtatgtgggaaatatctccaaaaagcccgtaatgagagatcaagagaaggaagttgtttatgaatttagcacaacaaaaaagcatttagcagagtgcttgcttcactctattctctcagaactaaaaattcagaagatatctatggaccacaattacattcacgccctctgcagggtgtatgtgggtatttgtcggcaactcggagacttggaaagagctcgtttgttttgctacagcctacttaaagaagattttccggagtctgaaaaattaactttgtttattgcaaacatgtggcatgatatatttctctctcaatcggtgattaataaagcaatgcagttagttgccaggcaacgtgctaaaggagaggttctgaactgcttgagagcttttcttaattgggaaaagaatgccccggtagatgttggcttcatggtttctaagctgcttttgaccatacagttatgtccaaaaacagaatttcaacctagtgaaaaatttggtgaagacctaagtgataacacttgggaatacatatttgccattgatctgctctgctgccatcagaaatggatctggacgcatgataacatcataagtaaggagctgtggcctgtgatggataaatggataaaatacagaaaaggacatgcaaacattgcgtatactcctgatattattatagcctcaatactgaggctgattggtcgtttaggccaattgggtttgaaagaaggatttccatctgctgtgaaaaatattagttcggttattggtatgtttatacagcatgctcacgatgaagatataccatggggtatacagttagcagccgtgtatgctctttgtgacttgagtcccagcaatccagcagaaatttccaagatcctggaagcttggcggagagaggcctccaaaagcgttccgtctgcgattgtcagctgcctagaggaagtcagtgccctgagcacagaggagcttggctgacctgggatgccactgaggcttgagaagtgccttgacacattttgaacacaaatagtttgatcagctttcaaaatacaaagggagggttcataactcttagacgtaaaatagattaaacagaccccaggctctccttattgtttggcaaggagacaggagaaacaagcagtcgcatagtcgattttccctaaatctaatacgtttcacttaaggctgttgtgatctgtgacatatgggttatattattgtgtctttgttcaacaacaaaaacttgaacttagccctttttttgctgcagaaagtgtccttttagtggctt

SEQ ID NO: 17824 - DNA, 1990 bp, Homo sapiens
  SIMILAR (610)..(1296): 951254mologous to Escherichia coli alcohol dehydrogenase (adhE),accession number M33504,Smith-Waterman Score=1094.
atgagtgaattacagcgactggaaaaaccgtataagcggatcatgctggttggtggcggtaatatcggtgcagggctggcgcgtcgtctggaaaaagattacagcgttaaactcatcgaacgtaatcagcagcgcgctgccgaactggcggaaaagttacagaatacgatcgtcttttttggtgatgcgtcggatcaagaactactggccgaagaacatatcgatcaagttgatctgtttattgccgtcaccaacgatgacgaggccaatatcatgtccgccatgcttgccaaacgtatgggtgcgaaaaaggtgatggtattgatccagcgtcgcgcttatgtggatctggttcaggggagcgttatcgatattgcgatttcaccacaacaagcaactatttctgcgttgcttagccatgcacaacaagcatcaacaataaggattaaagctatgggttttctttccggtaagcgcattctggtaaccggtgttgccagcaaactatccatcgcctacggtatcgctcaggcgatgcaccgcgaaggagctgaactggcattcacctaccagaacgacaaactgaaaggccgcgtagaagaatttgccgctcaattgggttctgacatcgttctgcgtgtaaaaaaagcccagcgtgaatatgccagtttcactcaagagcaagtagacaaaatcttccgcgccgccgctctggctgctgcagatgctcgaatcccactcgcgaaaatggccgttgccgaatccggcatgggtatcgtcgaagataaagtgatcaaaaaccactttgcttctgaatatatctacaacgcctataaagatgaaaaaacctgtggtgttctgtctgaagacgacacttttggtaccatcactatcgctgaaccaatcggtattatttgcggtatcgttccgaccactaacccgacttcaactgctatcttcaaatcgctgatcagtctgaagacccgtaacgccattatcttctccccgcacccgcgtgcaaaagatgccaccaacaaagcggctgatatcgttctgcaggctgctatcgctgccggtgctccgaaagatctgatcggctggatcgatcaaccttctgttgaactgtctaacgcactgatgcaccacccagacatcaacctgatcctcgcgactggtggtccgggcatggttaaagccgcatacagctccggtaaaccagctatcggtgtaggcgcgggcaacactccagttgttatcgatgaaactgctgatatcaaacaagcaatggaaaccgtggcttacgctgattttgcacgtctggaaatgcgcgtcggaaagattgtggaagtgaaacgccatgaaaacgccgacaagctgtacatcgtacaggttgatgtggggcaaaaaacgctgcaaaccgtgaccagcctggtgccgtactacagcgaagaagagctgatggggaaaacggtggtggtcttatgcaatctgcaaaaagcgaaaatgcgtggtgaaacgtcggaatgcatgctgttgtgtgcggaaaccgatgacggcagtgaccagcgtgctgttaacgccggagcggatgatgcctgcgggcatcggatggcgacgtcgtatcgccatccgatttgatattacgcctcttcgacacttactcgcatgccgccagcccttacgcgccgcttttgatcaccagttcacactgttcaatgatatgctggctgatatctgccacgcgttcgataaaggcgctggaacaggaaaaaaaattcccatgtgtcgtgggagggacgccgtgggagatataccatggggtatacagttagcagccgtgtatgctctttgtgacttgagtcccagcaatccagcagaaatttccaagatcctggaagcttggcggagagaggcctccaaaagcgttccgtctgcgattgtcagctgcctagaggaagtcagtgccctgagcacagaggagcttggctga

SEQ ID NO: 17825 - DNA, 903 bp, Homo sapiens
  SIMILAR (451)..(900): 961254mologous to Escherichia coli, LBB84, plasmid pXT107, IS10L/R-1, Peptide PlasmidTransposonInsertionMutant, 402 aa transposase,accession number S67119,Smith-Waterman Score=740.
atgcgtatgttgcaggaagagaatatctggatcgtcggtacggcaggcgaggcggatcatacactctatcagagcaaaatgaccggacgcctggcgctggtgataatgcaccacattatgggaaaactctttttcacagtatttgcatttgagcgcgatatcattgataccttaaaagtggtgctgatcccggtgctgatcgccggagcaactgcgctattactgagtcgcgcgctgaacagtttgagcctcggcagcgacaccgcgacggcgctgggcagtcgcgtggcgcgcacacagttgattggtctgctggcgattaccgtgctttgtggtagtgcgacggcaatagttggcccgattgcctttattggcctgatgatgccgcatatggcgcgttggctggtgggtgccgatcatcgctggtcgctgcccgtcacgctacttgctacccctgttgtcaccaccccgtcggcaaaggagccatggattctagcaactaacttacctgttgaaattcgaacacccaaacaacttgttaatatctattcgaagcgaatgcagattgaagaaaccttccgagacttgaaaagtcctgcctacggactaggcctacgccatagccgaacgagcagctcagagcgttttgatatcatgctgctaatcgccctgatgcttcaactaacatgttggcttgcgggcgttcatgctcagaaacaaggttgggacaagcacttccaggctaacacagtcagaaatcgaaacgtactctcaacagttcgcttaggcatggaagttttgcggcattctggctacacaataacaagggaagacttactcgtggctgcaaccctactagctcaaaatttattcacacatggttacgctttggggaaattatga

SEQ ID NO: 17826 - DNA, 942 bp, Homo sapiens
  SIMILAR (113)..(250): 431254mologous to Escherichia coli fepG,accession number X57471,Smith-Waterman Score=81.
atggtaccggatcgccctgcttatcctgacgtctacgatcagttgcgtttctggcaagccggttcgctggatattcgcaatctacataccttaaaagtggtgctgatcccgggtgctgatcgccggagcaactgcgctattactgagtcgcgcgctgaacagtttgagcctcggcagcgacaccgcgacggcgctgggcagtcgcgtggcgcgcacacagttgattggtctgctggcgattaccgtgctttgtgtgcgacggcaatagttggcccgattgcctttattggcctgatgatgccgcatatggcgcgttggctggtgggtgccgatcatcgctggtcgctgcccgtcacgctacttgctacccctgccctgctgctgtttgccgatatcatcgggcgggtgattgtgcccggcgaactgcgcgtttctgtggtcagtgcgtttattggtgcaccggtgctgatcttcctcgtgcgacgtaaaacgcgaggtatctggggattacgcagcggtgccgtcacgctggaaacctcgcaggtattcgccgcgctgatgggcgatgcgccgcgcagtatgacgatggtggtcaccgaatggcgtttaccacgcgtgctgatggcgctgttgattggcgcagcactgggcgtcagtggcgcgatttttcagtcgctgatgcgtaacccgctcggcagccctgacgtaatgggctttaacaccggggcgtggagcggcgtgctggtggcgatggtgctgtttggtcaggacctgacggctatcgcgctgtcagcaatggtgggcggcattgtcacttcgctgctggtctggctgctcgcctggcgcaacggcatcgacacctttcggttgattattatcggtatcggcgttcgcgccatgctggtggcctttaatacctggctgttgctgaaagcgtcttaa

SEQ ID NO: 17827 - DNA, 1376 bp, Homo sapiens
  SIMILAR (691)..(1248): 981254mologous to Escherichia coli K12 putative aldose-1- epimerase (EC 5.1.3.3),accession number AE000463,Smith-Waterman Score=971.
  misc_feature (1)...(1376): n = a,t,c or g
ctcggtcaccaggtcattgatgccatcgctcatatttttaaagcgcgtcaacggcgaacgagtgaccaccacaaacgcgccaatattcttctgcgggatcatcgccatataggcatgaaaaaatcccgcgtggaagctttcttgattgttaaggacgtcactcacgacaaaaaatggctggatcgcgcgattcgcagtggcttccagtgattatccacgacgtcgccagaaataatcattatcgcgttaacgaacacttcgatacccagtggaatccgctgccggattacaacaaagataacccggcgcatcgcttccgcgcgttcggaggtacaccaggccactggatcgaatggggccgtttaatgctgcacatccatgctgccctggaagcccgttgcgaacaaccaccagcatggctgctagaagatgccaaaggtctgtttaacgccaccgtgcgcgatgcctgggcacccgatggcgcggacgggattgtttataccgttgactgggaaggaaaaccggtggtccgcgaacgtgtacgttggcctatcgtcgaagcaatgggtacggcctacgcgctctacaccgtcactggcgatcgccagtatgaaacctggtatcaaacatggggcgaggggaccgtccggtgcagtttttgggtttgacatcagcctcacgggaggctgtatgtcgttaattaaggtgccttgtatgcaaatcaccaatatgcattgcagtggacagaccgtttcacttgccgcgggggattatcacgcgaccattgtgaccgtcggtgctggtctggctgaattaacctttcagggttgtcatttagtcatcccgcacaaacccgaagagatgccgctggcgcatctgggtaaagtgcttattccgtggccgaaccggatcgccaacggctgttaccgctatcaggggcaggaatatcagttacccattaatgaacatagttcaaaagccgctattcacgggctgcttgcctggcgagactggcaaattagtgaattaaccgccaccagcgttaccctgacagcttttctgccgcccagttacggctatccgtttatgctggcttcacaagttgtttattcgctcaacgcacacacgggtctttccgttgagatcgcaagccagaatatcggcactgtcgcagcgccttatggcgtgggtattcatccttatttaacctgcaacttaacatctgttgatgaattacttgatgaactatntatcggagcgcgcatgggattgcttatctggacttctctactcgatgacgagctgaaggcgctgcccgctttcgaatctaccgcggctggcgatggcgggaatcactgctttccagattgtctcag

SEQ ID NO: 17828 - DNA, 1326 bp, Homo sapiens
  SIMILAR (891)..(316): 981254mologous to Escherichia coli K12 putative outer membrane protein,accession number AE000300,Smith-Waterman Score= 1006.
tcaggcattgtgcaccaattgccggatgcggcaccggttgtaggccgccgttacattcggccccatcgaaccatcggctttggcaaatggcgctaactcatccggtgtggcatggcgaatggcacgttgctgcggcgttccccagttttcatataccgcatcagcatcggtgaggatcaccagtccatctgcattaatctgctcggcgagcaacgcagcggcgagatctttatcaatcactgcttcactccctgctcggccatcggcacagcacacccgcgccgcacttctggcaatgactggctcatattggccggaaaagctatttttgcggccaaaatcgttctggtaataatcggcaatgtcatagacatcgttttcatcacggcgataattatctttattgtttgcccaaacgtgatcgttaaatgtccggtaatcacgcgacgaataacgccaggccgccagaccaaaacgcgtcgacgtttggctcacaaatttgttgtaggcaatttgataactttgcccgtcaaacacatcgccgttgtcttgtttactatgcgacttagtggcatcgacggaaatggcaccaatgcgtgtattccagccagcccccaaagtaaacgcgtaataattattcgcgaccatcgagccaccatacagcgtcaataaattattaaaaccatactgataacccgcctggacaaaatcactttgtttgctcgccccttcaatatggctacgacccgccgctaaatcatatttcgacacgccgggttgcagcatatttggcaccgctgcataaggcaccagataggtggttaccgagccgctcgtctctttcacgctgacatcaagatctgctccaccaccggccaactgcaaatcggagtcgttgctccatgcctgtctgtcatggagcaacgtacagtgacacaggttaattaccgtgttggttaaagcatgtctttgagcgtattccgggctacatactggcaggatttcttcatccatcagaaagtgatgagtgagttgcgctgacggcgcatcatcaaagtagatcgccaaatcgattccggcacgttgcagattgacgttgtcattaccagtgagcacggtgagcgaaatagacggataccggcgtgtaaagtcacctaatgcgggcaccaaccagcattgggcgatagagggccgggaatacagagttaacgttcccgataactcctgatttttgatatcaagaatttccgcactggggctcagcgacaattcctctgccggcagggcgaaggactgatgcctggcagccacttcaaaagtatgcat

SEQ ID NO: 17829 - DNA, 2055 bp, Homo sapiens
  SIMILAR (619)..(1839): 961254mologous to Escherichia coli K12 putative sugar hydrolase,accession number AE000176,Smith-Waterman Score=2116.
atgcggcagaacacaactgtgccaccgtttaacctaagcgggaaattttgttcacttatccgcaatctgattacggaaagtgaagtggcggtgaaggacaacactaaattccgcttcgtgggggctgatgctttctcacctgacgaactgcgtactgatttgttcagcgatatcggcgggcgggcgctactaatgcatggtactgaaggtgaagtgtatgctaatccgcagcgctgcccgcagatcaatctcattgaccctgaagggatgcgggtgctgtatgaaaaacaggacactgctgctgaaggcagcgatgtgcaagcaggccagtccctgtaccagatcgatcccgcgacctatcaggcaaattatgacagcgcgaaaggcgaactggcgaaaagtgaagccgccgccgccatcgcgcatttgacggtaaaacgttacgttccgctcgtggcgaaaaatgaggtgattatggaaccccttcgtgaaataagaaatcggctgcttaacggctggcaattatcaaaaatgcatacttttgaagtggctgccaggcatcagtccttcgccctggcggcagaggaattgtcgctgagccccagtgcggaaacgacgatgaaagcagtatctcgcgttcacatcaccccgcatatgcactgggatcgagagtggtatttcaccaccgaagagtcacgtattctgctggtcaataatatggaagagatcctgtgccgactggaacaggacaacgaatacaaatattacgtactcgacgggcaaacggcgatcctcgaagattatttcgcggtgaaaccggaaaacaaagaccgtgtgaagaaacagaccgataccacgattgtttctgcggaatccatcgtccgtaatctgatgtacggaatgcgtgactgcctcgcgtttggcgagccgatgaaaataggttatttaccagattcctttggcatgtccgggcaactgccgcatatctacaatggatttggcattacccgcaccatgttctggcgcggatgttcggagcgccacggtactgataaaaccgagtttttgtggcaaagcagtgacggtagcgaagtgacggcgcaggtgctgccgctgggctacgccatcggtaagtacttacctgccgacgaaaacggattacgtaaacgcctcgacagttattttgacgtgctggaaaaagcgtctgtaaccaaagagattttgctgccgaatgggcatgaccagatgccattgcagcaaaatatcttcgaagtgatggataagctacgtgagatctaccctcgacgtaagtttgtgatgagccgctttgaagaggtatttgagaagatcgaagcgcagcgagataatctggcaaccctgaaaggggaatttattgatggcaaatatatgcgcgtgcatcgcaccatcggttctacgcgtatggatatcaaaattgcccacgcgcgtattgaaaataagattgttaatctgctggaaccgctggcaacactggcctggacgttgggttttgaataccaccacggcttgctggagaaaatgtggaaagagatcttaaaaaatcatgcccacgacagtatcggctgctgctgtagtgacaaagttcatcgcgaaatcgtcgcccgcttcgaactggctgaagacatggcggataatctgattcgtttctacatgcgcaaaattgccgacaacatgccgcagagcgacgccgacaaactcgtcctgtttaacctgatgccctggccgcgtgaagaagttatcaacaccactgtgcggctgcgcgccagccagtttaatttgcgggacgatcgcggtcgacctgcattgcacgctgcatggctcagtggctttaacgatttccatttgctgctcaaactgagcgatacgctgcgctgtcgctgtaactgctttttccacgccatcacgggagacttccagattcgacaacacttgctcttcagcggtaatgagattctcaaggcgcgcgatttcttcagcaacttcgttaatcaacgacggattaacgttcttgcttaa

SEQ ID NO: 17830 - DNA, 573 bp, Homo sapiens
  SIMILAR (142)..(558): 981254mologous to Escherichia coli K12 putative transport system permease protein,accession number AE000302,Smith-Waterman Score=731.
atggcacagtggctacagccagtcttcgccagcctcgatgcaaaaacattgcagcaactgaatgccagcattgctgtggaaggactggatgccaaaaaagtggctgccgactaccctgaaacaaaaagggtggacgaagtaatttccccggcgctgccgtttatcagttacgcgcctaatcgtttagtttcgggtgaggggcgtcatctctggcagctgtggccgcaaacgatctggatgctggtgggcgttggttgcgcctggctgacggcctgttttattcccggtaaaaaaggcagcatttgtgcactcattctggcgcaattcgtcttcgtattgctggtgtggggagctggaaaggcggcgacccaactggcgcaaaatggcagtgcgctggcgcgtaccagcctcggcagtggtttctggctggctgcggcgctggcattgctggcctgtagcgatgccatccgccgaatctccacgcatccgctgtggcgctggttgttgcatatgcagattgccattattccgctgtggttgctgtactccggcacgctaacgatctctcactaa

SEQ ID NO: 17831 - DNA, 1281 bp, Homo sapiens
  SIMILAR (679)..(1242): 951254mologous to Escherichia coli K12 putative transport system permease protein,accession number AE000302,Smith-Waterman Score=943.
atgcgccggacatccgtgccagcatccaggttccggtcgtggtcgcagcctgctcaacggcaaacaacgggacgaaaacgcttgagcgcgggccgtaatcatgatccgcatcgatttattgagcgcaaagggcccaggtttgtagccagtcaatccagggataatcgccgggcaataaaggcataccgggtccggataccaagtggcggcaccaagtccgggcgaaacggtgccacaaaagaggcggtttggcccgcgtccaagggtccaccgaaaacccacgggaataaggggcgaagacacgcgcggttggagcaggcaggaagaagacgcccaaaaggtcggcaccgagaacacagggcaatggggcgcaaagacaacaagggagagggggcaaaaaccacgaagggggcaaagccggcaacattcacctccaccagcgtgaagaaagacggtgacgaactggatattaccggcgatctgacgctgaatggcgtaaccaaacccgtcacgctggaagcgaaattaattggtcagggcgacgacccatggggtggtaaacgtgcaggcttcgaggccgaaggcaaaattaagctcaaggacttcaatatcaagacagatttaggtccagcttctcaggaagtggatctgattatttcagtggaaggcgtacagcagaattacgcgcctaatcgtttagtttcgggtgaggggcgtcatctctggcagctgtggccgcaaacgatctggatgctggtgggcgttggttgcgcctggctgacggcctgttttattcccggtaaaaaaggcagcatttgtgcactcattctggcgcaattcgtcttcgtattgctggtgtggggagctggaaaggcggcgacccaactggcgcaaaatggcagtgcgctggcgcgtaccagcctcggcagtggtttctggctggctgcggcgctggcattgctggcctgtagcgatgccatccgccgaatctccacgcatccgctgtggcgctggttgttgcatatgcagattgccattattccgctgtggttgctgtactccggcacgcttaacgatctctcactaatgaaagaatacgccaaccgtcaggatgtgtttgacgacgcgctggcacaacatctgacgttgctgtttggtgcggtgctgcctgcgttagtgattggggtgccgtggggcattctgggctacttttcactggtccgcaaggggccaattttctccggtcaaggggatccgacagggcctcggggggggccttag

SEQ ID NO: 17832 - DNA, 659 bp, Homo sapiens
  SIMILAR (167)..(649): 971254mologous to Escherichia coli K12 putative transport system permease protein,accession number AE000302,Smith-Waterman Score=826.
gttgagggagtatccgcaaatggcacagtggctacagccagtcttcgccagcctcgatgcaaaaacattgcagcaactgaatgccagcattgctgtggaaggactggatgccaaaaaagtggctcccggctacttgaaccaaaaagggtgagcgaagtaatttcccgtgacttatttccgtattaatcctgttctggcgctgctgctgttgctgacggcaatcgcagcggcgctgccgtttatctgttacgcgcctaatcgtttagtttcgggtgaggggcgtcatctctggcagctgtggccgcaaacggtctggatgctggtgggcgttggttgcgcctggctgacggcctgttttattcccggtaaaaaaggcagcatttgtgcactcattctggcgcaattcgtcttcgtattgctggtgtggggagctggaaaggcggcgacccaactggcgcaaaatggcagtgcgctggcgcgtaccagcctcggcagtggtttctggctggctgcggcgctggcattgctggcctgtagcgatgccatccgccgaatctccacgcatccgctgtggcgttggttgttgcatatgcagatcgccattattccgctgtggttgctgtactccggcacgcttatcgatctctcacatcaaaacg

SEQ ID NO: 17833 - DNA, 1104 bp, Homo sapiens
  SIMILAR (1)..(408): 1001254mologous to Escherichia coli 'YafH,accession number D38582,Smith-Waterman Score=732.
ttatttatcagcagtctgattttgctcgcctggacagccgccctcggcgttgctggtctgtggtcggcgtgggtactggtgcctctggccattatcctcgtgccatttaactttgcgcctatgcgtaagtcgatgatttccgcgccggtatttcgcggtttccgtaaggtgatgccgccgatgtcgcgcactgagaaagaagcgattgatgcgggcaccacctggtgggagggcgacttgttccagggcaagccggactggaaaaagctgcataactatccgcagccgcgcctgaccgccgaagagcaagcgtttctcgacggcccggtagaagaagcctgccggatggcgaatgatttccagatcacccatgagctggcggatctgccgccggagttgtgggcgtaccagatatttaagttgatcgcccatggtcgcgaattcatgttcggtaaacggcacaaatccccagttgtgctgccagccagagttgaaaatctcacgcaggatctgcatctcttcggcaaaccgctgacgattgatgcagcgaatggtcacctttttgcgcacctgatccatcagtttttttagcgccggagagaaagtgagatcggttcgctgcatccaccacgccagtaaatcaatgcctttgtgataacccagttgttcaatatgcgcggcataccacggtttgccgtgtggcatcatcgcacagggtggtgtgtcaaaaccttcaatcagtaatccgctttcctgattgatattcaggctgaaaggaccgctgatcttacttgcaccttgtgacttcaaccacgcttccgctgcgccaaacaacgcggcaaaaacctgcggatcatcaatggcgtcaatcatgccgaaatgaccggtatctttgccgtaacgctcgcggtgcaaggtatctatttgcgcggtaatacgcccaactatctgccccgctttttttgccacccacgcctgccagatgatatggtccgtccccggatttttcgcagacaaatgctcgttgcgttcaatgaataaacggggtatccagtttggatcgtcgggataaagtgatgacggaaaagcgataaatgcctgcat

SEQ ID NO: 17834 - DNA, 1866 bp, Homo sapiens
  SIMILAR (753)..(154): 991254mologous to Escherichia coli K12 putative synthetase/amidase,accession number AE000385,Smith-Waterman Score= 1077.
tcatatggcaggggctatagagagcatgaattccagcttcccatgagccagcagaggcagtggaggcccagcctcctgatggactctctgcccgttgccccagcatgactcccactggtgcctttcttgctctacttggcctctcctttgcatggtctggaattcagcttccgttgcgcagtcctgcaaatactgaatggttccgcgatcttccaccgtgtcgcgacagcaggtgagatgcagcaactggaagccatactgttcacgcagctcaacgaagcgatcgatcagtttttcttgcagactgttaaactggtcgctgccctccggcaagttaccggcgttaagctgatcttccagccagatccactgaaagaacgccgcctcgtatagtgacgttggcgtatcggcgttattttccagaagtttaggttcaccagtgccatcccacgccagatcaagacgcgaataaagcgatggctggtgcgtcagccatgactggcgcacaaaactccaggtgtgttttggaatgcggaatttggtcatcagctcatcgctggcgatcactttttccaccactttcaggcacatctggtgcagttcggcggtgacttcttccagcttttcaacctgggcgagggtcaacttgtagtaagcatcttcacaccagtacggctcgccgtacatggtgtgaaaattgaaaccgtattcgtgggctttctcacgccagtccgggcgctcggtaatactgactccgccacgggtaacggtagtggtggtcgccggttttggtcccattccggtcttcggtacggtcatggtgcggcctggctgggctgcgccatagtttttacccgtcgcgtcggtatatttcccgtaagccggactggctggttttttaaagaagaacaggggctgctgtgcaaatccggcgccgccgcccatcagacgccccatcatgtacccgcccatcagcggcttcaagaacctccggcggattggtgggcctgcgcctggttttctggcaaagattaatgtgaaaaagtctatcgccttgcaaagctgttctgccagcgcaatgttctctttgctgccaataccgcgaccgacgctgaccaccatacgggctttgtcgagatcgacgctgttgctctggcgcgcctgggttgccgtgcgggtaatcgccacagccggagcctgccactccacggtgtgcgtttcgccagtgcgtgacgcgtctggctgagccgcatcgaacgtgccgctgctgatggtcagtaccgcataccgcgtggcaatgcgttcttcgccaatcgccagaccaccgtaaaccatgtgtttcactgtcgctttacccgcctgtacgctgacggtgctggcatcgttagacaccgccggggtgtttggcagcagcaccaagccgtatgcgccgtgttggcgaatagtgtcagccatgacaccggcgtaatcttcgatcatccgatcgtccggtttgccgtttaatttccagacatgattagcgccgagctggattgcctgtgcgccgtcggcatcattgaggacaaaggtgttgatttgattagctaaagctttgcgaagattttcagcaaatgcggcgatctgttcttcgccgtcgccttcaatcacgatgcgctgacgttcgcgctgtttcggcgcggcaacctgttgttctgaccaggctgcctctgcgttaaaaccaatatccgccgccgaccatacctggacgggctttttcgccgcgccgagaatggctttcatcgaaggtgatgaactactggcacttgaattctcgtggttaaagattaacacaatataaacaaacttgtgagtaatgtccacctccat

SEQ ID NO: 17835 - DNA, 2883 bp, Homo sapiens
  SIMILAR (824)..(856): 811254mologous to Escherichia coli Acyl-CoA dehydrogenase (EC 1.3.99.-),accession number D83536,Smith-Waterman Score=48.
cctttaatcacttcccgcatcaaaccggttaccgcgccacggatagcagcaatctgttgtaaaactgcagcgcattcgtgcggctcgtcgagcattttcttgagcgccacgacctggccctgaatcttactggcacgcgctttcagtttctgtttatcacggattgtatgagacatggcaacacctggttaacaagaatatgaaaaatcatagcactattaatctactggggggtagtatcaggtactgggggggagtagaatcagattgccgaattaatactaagaattattatcatgaccgaatttacaactcttcttcagcaaggaaacgcctggttcttcatccccagcgccatcttacttggtgcgcttcatggcctggaaccagggcactcaaaaacgatgatggcggcgtttatcatcgccatcaaaggcaccattaaacaagcggtgatgctcggactggcagcaactatttcgcataccgcagtggtctggttaattgcctttggcgggatggtgatcagcaagcgctttactgctcaatcagcagaaccgtggctccagctgatttccgcagtgatcattattagcaccgcgttctggatgttctggcgtacctggcgcggcgaacgcaactggctggagaatatgcacgggcatgattatgagcatcatcatcacgatcacgaacatcaccacgaccatggacatcatcaccatcacgaacatggcgagtatcaggatgcccatgcacgagcccatgccaatgacattaaacgacgctttgatgtagagagtcaccacctgcaatttcgttcgcgattgatgcgggcaccacctggcaagccggactggaaaaagctgcataactatccgcagccgcgcctgaccgccgaagagcaagcgtttctcgacggcccggtagaagaagcctgccggatggcgaatgatttccagatcacccatgagctggcggatctgccgccggagttgtgggcgtaccttaaagagcatcgtttcttcgcgatgatcatcaaaaaagagtacggcgggctggagttctcggcttatgcccagtctcgcgtgctgcaaaaactctccggcgtgagcgggatcctggcgattaccgtcggcgtgccaaactcattaggcccgggcgaactgttgcaacattacggcactgacgagcagaaagatcactatctgccgcgtctggcgcgtggtcaggagatcccctgctttgcactgaccagcccggaagcgggttccgatgcgggcgcgattccggacaccgggattgtctgcatgggcgaatggcagggccagcaggtgctggggatgcgtctgacctggaacaaacgctacattacgctggcaccgattgcgaccgtgcttgggctggcgtttaaactctccgacccggaaaaattactcggcggtgcagaagatttaggcattacctgtgcgctgatcccaaccaccacgccgggcgtggaaattggtcgtcgccacttcccgctgaacgtaccgttccagaacggaccgacgcgcggtaaagatgtcttcgtgccgatcgattacatcatcggcgggccgaaaatggccgggcaaggctggcggatgctggtggagtgcctctcggcccagccagaagctgcgaactttgttgctaccgacgtgaccgatatgtttgaacaacagtttatcgaacgcgttgacgtcattgttcttcgccgcttccatctcttccagcacgtacggatggcaacgaatcgctccttgtccgaagatcatcatgctgcgggtcagaatgttagccccttcaacggtgatggcaatcggtgcgccctggtaagcacgcgccaggaagttgctttgcccgagcataatgcctttaccgccggtaatatccatcgcatcaataatcgactgctgcccgcggtgggtacagtgatacttaacgatagccgacagcacggcaggtttttcgccgagcataatgccgtagtaatcagcgatgccgcagcatccatcacgtaggcattaccggcaatacgcgccasgcttcttcaatcccttccatcttaccaatagagattttsaactgacggcgaatgtvagcatacggccggttgccagcgstaccgatttcacgccgccggttgagttggaaggcagcatacatgccgccgtctaccgagaggcactccaccagcatccgccagccttgcccggccattttcggcccgccgatgatgtaatcgatcggcacgaagacatctttaccgcgcgtcggtccgttctggaacggtacgttcagcgggaagtggcgacgaccaatttccacgcccggcgtgtggttgggatcagcgcacaggtaatgcctaaatctttggcggcaaaactgggttatcgccttaaagcggcggtgtctaacgatgccagcaccgtcagcgtacaggacggtaaagcgacagtgaaacacatggtttacggtggtctggcgattggcgaagaacgcattgccacgccgtatgcggtactgaccatcagcagcggcacgttcgatgcggctcagcagacgcgtcacgcacgtggagtggcaggctccggctgtggcgattacccgcacggcaacccaggcgcgcagagcaacagcgtcgatctcgacaaagcccgtctggtggtcagcgtcggtcgcgttattggcagcaagagaacattgcgctggcagaacagcttttgcagcgataggtgcgagttggcctgttctcgtccgttgccgaaaacgaacatggatgaacacgaagctatgtcgtatctcaactgatgctgaaacctgactgtacctgccgtgggatttcggcagattcgccat

SEQ ID NO: 17836 - DNA, 637 bp, Homo sapiens
  SIMILAR (129)..(106): 1001254mologous to Escherichia coli Tellurite resistance protein TehA,accession number D90781,Smith-Waterman Score=43.
atgtcggatgcgacgctggcgcgtcttatccgacctacggggacgcatgtggtgtctggtggcagtaaagcgcaacgtgaaccagcgagcaccagaaacgtgaagcaggcacaccgccagtgggcgaaagccacggaagcagaaacgcaatgcgcgcagccaaggcagtcgtgcgttgccggaaacaaactcacaaaactgctcagcactggatggcgaacttgccgccaggcagcgcgtagtgcgggaaacggcgccagagccgcagaatttgctacggttatagtaagtcacctgtgggaaaacgctatgcgcaaatatcgtctaagtgaagaacagcgagcctttagttatcaggaagatggcactaaaaaaaatgtgttattacggcagattatcgccattagcgattttaacgatgtgatagcaggaaccgctggcggctggatcgatcgcgaaacggtgttagcacaagaaggaaattgctggatttacgaccagaatgctattgcgttcggcggagcggtgatttccggtaatacgcgtatcaccggcaccagcgtgctgtggggagaggtttacgcaacggataacgtctggatcgataatagtgaaatcagccagggtgcatatataa

SEQ ID NO: 17837 - DNA, 1150 bp, Homo sapiens; identical to SEQ ID NO: 17732
  SIMILAR (288)..(64): 551254mologous to Escherichia coli elongation factor Tu,accession number J01717,Smith-Waterman Score=209.

SEQ ID NO: 17838 - DNA, 585 bp, Homo sapiens
  SIMILAR (385)..(549): 941254mologous to Escherichia coli o475,accession number M87049,Smith-Waterman Score=261.
atggattacaccaccggtcagatcctcaccgcgggtaatgagcatcaacagcgcaatcccgccagcctgacaaagctgatgacgggttatgtcgtggatcgcgctatcgatagtcatcgcattacgccagacgatattgtcacccagaagctaacaaattcagtttctggtgaggctctcttcctgcttgcagctgccttcctaccagtgaacgaagaggtcggcaaacggctgctggaggagatggagcatcgccaggttccaggagcgcataaacgggcgggcaccatgtccggcggtgaacagcagtacatcatcaaaggggcgattattatcttcgccgtagcgctggattcactgaaatacgcgcaagtaaaatccacaaaagatgtggtgatcgacgccaaaatgacgctggtcgcctatgaacgctattttaacgccgaagacgactacacccgcgaaagcgcgctacaggaacatatcgcgtcggtgcgtaaccatatccgtttgctgggacgcaaagattatcaacactcagtcgggctcgcctcccccagtgcgagccgggagcgatcgctatag

SEQ ID NO: 17839 - DNA, 2499 bp, Homo sapiens
  SIMILAR (1665)..(1003): 981254mologous to Escherichia coli elongation factor Tu,accession number J01717,Smith-Waterman Score=1131.
atggtgccagcatctgcttctggtgagggcctcaggaagcttacagtcacggtagaaggcaaaaagggagccagcacatcacatggctttttacctgccaaatcaaaaggccgccgtgatgcgctaaaagccattgaagcggagccgcgcacgctgattttttatgaatctacccaccgtctgttagatagcctggaagatatcgttgcggtattaggcgaatcccgctacgtggttctggcgcgtgagctgaccaaaacctgggaaaccattcacggcgcgcccgttggcgagctgctggcgtgggtaaaggaagatgaaaaccgtcgcaaaggcgaaatggtgctgattgtcgaaggtcataaagcacaggaagaagacttacccgccgatgccctgcgcactgtggcgctgctacaggcagaactgccgctgaaaaaagcggcggcgctggccgcagaaattcacggcgtgaagaaaaatgcgctgtataagtatgcgctggagcagcagggggaaaacgcctttatggccgcgggattacggaattccgagctccggttaccccttggggactttgctgagtggaaacgaaattggaatggcaaagccaatggcaaccttggttcgaacttgcaggcacaccctttgggggccaagcttcgccatttgaccgttaaggaaaggcttttgccgaaggccattaaggaatgcgccgaaataggaaagtcatcggttggcagtcaggcaattaaagaagcgggcctgaaaccgggcaaagatatcctcacgggttccattgacggtgtaccggacatctacaaagcgatgatggatggcgaagcgaacgccagtgttgaactgacgccgaatatggcaggtcccgccttcgacgcgctggagaaatacaaaaaagacggcaccatgcctgaaaagctgacgttaaccaaatccaccctttacctgcctgataccgcaaaagaagaattagagaagaagaaaaatatgggtacaggtagacttctgagtctctttgataccaacgatttcaacttcttcaccaactttgatgataccgcgttctacacgaccggtaacaacggtaccacgaccggagatggagaatacgtcttcgatcggcagcaggaacggcttgtcaatcgcacgctctggttccggaatgtaagaatccaggaagccagccagttccaggattttcgcttcccactctgcgtcgccttccagcgctttcagagcagaaccacgaacgatcggagtgtcgtcgcccgggaagtcgtactgagacagaagttcacgaacttccatttcaaccagttccagcagctcttcgtcatcaaccatgtcgcatttgttcaggaacacgatgatgtacggaacgcctacctgacgacccagcaggatgtgctcacgagtctgcggcatcgggccgtcagtcgcagcaactaccaggatcgcgccgtccatctgcgcagcaccggtgatcatgtttttaacatagtcggcgtgccccgggcagtctacgtgtgcgtagtgacgggtcggggtgtcgtattcaacgtgagaagtgttgatggtgataccacgagctttttcttccggcgcgttatcgatctggtcgaatgcgcgagcagcaccgccgtaggagagactatttctggaagggaggaggagcagcatttaaccatttacatttgggagagcaagtggaccagacgaggacgggatcctctagagtcgacgttaggcaggattgaccagggcaagaaagaagcgtggtttcagtgttgccagtggttgtcacaaagcaataggaaagtgtttcttgggcaaatcggcgtttgcacgattgatcaggtgttgatatcggtattgccagttaacaccggctttatccgtggtttgggaattggtcgaagtgttttaattgttgatgaagttcatgcttacgacacctatatgaacggcttgctggaggcagtgctcaaggctcaggctgatgtgggagggagtgttattcttctttccgcaaccctaccaatgaaacaaaaacagaaacttctggatacttatggtctgcatacagatccagtggaaaataactccgcatatccactcattaactggcgaggtgtgaatggtgcgcaacgttttgatctgctagctcatccagaacaactaacgccccgcttttcgattcagccagaacctatttgtttagctgacatgttacctgaccttacgatgttagagcgaatgatcgcagcggcaaacgcgggtgcacagattgatggtcctttgggcttcccggttaaacgatcttttctcattcgcttgaaaactgccccggcagcctgggtgatattcacggctaacatcccgcgccagtttcatcattccttcggtgataacgtgctttacctcttcggccgtgatctgatgtttaaccgcgtcaatcagcatcgaagagtccttgcctaa

SEQ ID NO: 17840 - DNA, 1252 bp, Homo sapiens
  SIMILAR (666)..(103): 971254mologous to Escherichia coli CG Site No. 921,accession number L19201,Smith-Waterman Score=962.
tctggcgcataatgccgggatcagttttttcaaaagcgtagtttttccggaccactccacgcggcaaaggcgagtaacggaatcatcgtttttcctgccatcggcaagctcctctggcgtattcacgttaacaaatgcatctttatgatcgctgaaatcaaccgcatgaccgccagccagacgcataaataccattacccggcgttctcctgcttgcagatattccagtaataaaggctcaatagcgcggtttaccagagcaatagtcgggtgatcgcgttcaccgtcatggacccacacgacaggcgcatctttgcgctgatgattaagcctggctgctaaatcagggggaatgtaaggcgtatcgcacgggcaaaacaaaaaccactcaccagcttcctgctgcattactgaaagcattcctgccagagggcctgggtaatccgccagtgaatcttcaatcactttcagaccgcttgcctgatagatttcctgatgacgattagcattaaccacgacgtgagagagctgcgtcataagcgcgtcagcgacatgttgccataatggtttgccgtttaattcaagcaatcctttatctacgacgcccattcgtctggctttaccgcctgccagcacacgctctgttatcgtcgtcatcagattcaccgatatcgcctcttttattgtgggattgaccctgctaacgtgtctgtctcaagagtaaggagcatcactatgaaatgtaaacgtctgaatgaagttattgaactcctccaggcagtctggcaaaaagagccagcccttagcctgctgcaatttttgcagaaactggcgaaagagtcaggttttgacggcgaactggccggatttgacggatgacattctgatctatcacctgaaaatgcgtgattccgcgaaagatgcggtgatcccgggtttgcagaaagattatgaagaagacttcaaatccgcgctgttacgcgctcgcggcgtaattaaagagtaaaagtttgtaagcggcgccaccaaaatcatcgtgaaatgatatccttcgtcattcgtaatgttttccggatgatgggatgaataacagcgcttttactttccagactctactcccggtatgccatcatggacgctctgtttgagcatgggatccgggtggattccggtcttacgccgcttaccagctatgagaaccgtgtctatcaatttcaggacgaagatcctctagagtcgcgcggaggcgtgt

SEQ ID NO: 17841 - DNA, 1878 bp, Homo sapiens
  SIMILAR (1093)..(1860): 801254mologous to Escherichia coli K12 putative GTP-binding protein,accession number AE000461,Smith-Waterman Score=997.
atgatcaccggtgctgcgcagatggacggcgcgatcctggtagttgctgcgactgacggcccgatgccgcagactcgtgagcacatcctgctgggtcgtcaggcaggatgtagaggaaggccagcagagggcaaagagcccgagagccgggatcaggagacaggaacgtgttggcgtgtggctctaagcgaaccaaagagactgtctctggtcatccgtgttccccactgttgggtcaatcccacaataaaagaggcgatatcggtgaatctgatgacgacgataacaggcgttgtgctggcaggcggtaaagccagacgaatgggcggcgtagataaaggattgcttgaattaaacggcaaaccattatggcaacatgtcgctgacgcgcttatgacgcagctctctcacgtcgtggttaatgctaatcgtcatcaggaaatctatcaggcaagcggtctgaaagtgattgaagattcactggcggattacccaggccctctggcaggaatgctttcagtaatgcagcaggaagctggtgagtggtttttgttttgcccgtgcgatacgccttacattccccatgatttagcagccaggcttaatcatcagcgcaaagatgcgcctgtcgtgtgggtccatgacggtgaacgcgatcacccgactattgctctggtagaccgcgctaataggggttcatgcaggtgtccagttctcgaacaatttttcccttgccggtaccccggaagcgccaaaagtatctggtgtcaacgtcgccttgaacctgctgatgatctacgcgttgtctggcgtgttctatgcctttggcgggatgttagaagccggacgtatcggctctgccaccaacaacctcggctttatgtatgagctggatgctatcgcggcgtgcgtggtagccggtgtatcgttcagcggcggtgtggggacggtgattggcgtggtgaccggggtaattatttttaccgtcatcaactatggcctgacgtatatcggcgtaaacccagtactggcagtacatcatcaaaggggcgattattatcttcgccgtagcgctggattcactgaaatacgcgcgcagaaaaagccgggtctataacggccttgccggaaatgtggcttggggaagatgaagtcagcaagtcgctgcctatccccaaccattatggtgtggatgattttccggtcattatccaggataaacggagcaaaagtgctgagaatcaatgcataattgatgagtggcattttcacaaaggcttttttaattcccgttttcaaatgcaaatgacattcgataacggtgcacccgatctcaatatcaagccaggccagaaagttgtatttgatgtggatgttgagcacggtccgttgcccatcacaatgttaatgcatggtaatgtcatcccagcactggcagcggcaaaagtgaacttagtgaataatgaactgacacaaccgctatttatcgccgcgaaaaataaatcgcccgtggaagcgacattgcgattcgcgtttggtggctcattctctacgacattagatgttgcccctgcagagtatggaaagttttcttttggtgagggccagtttacttttaatggtgatggtagttcattgtctaacctggatattgaaggcaaagtcgaagatattgttctgcaattatcaccaatgaacaaagtaacggcaaaaagttttaccattgattctctggcgcgattagaagaaaagaaatttccggttggtgaaagcgagtcgaaatttaatcagattaacattatcaatcacggggaagacgttgcccaaatcgatgctttcgtccagggaactcaattgaatgttgattttgtatcctga

SEQ ID NO: 17842 - DNA, 476 bp, Homo sapiens
  SIMILAR (157)..(474): 971254mologous to Escherichia coli AMP nucleosidase,accession number M30469,Smith-Waterman Score=532.
atgcctgatttccgcaatgaccgctttgttgatgaaagacagtcaacgcgcttgatagcctggcgaagatcatccgatcttcgccttacacttttgtttcacatttctgtgacatactatcggatgtgcggtaattgtatggaacaggagacacacatgaataataagggctccggtctgaccccagctcaggcactggataaactcgacgcgctgtatgagcaatctgtagtcgcattacgcaacgccattggcaactatattacaagtggcgaattacctgatgaaaacgcccgcaaacaaggtctttttgtctatccatcactgaccgtaacctgggacggtagcacaaccaatccccccaaaacgcgcgcatgtggtcgctttacccacgcaggcagctacaccaccgcgattactcgcccaactctctttcgttcgtatcttaatgaacaacttacgttgcggtatcagga

SEQ ID NO: 17843 - DNA, 540 bp, Homo sapiens
  SIMILAR (1)..(276): 671254mologous to Escherichia coli Hyf D,accession number M63654,Smith-Waterman Score=292.
atggccgcgccagccccgatcagcgcctatctccacgccggatcgatggtgaaagtgggcgttaacatttttgcccgcgctatgatcgacggcggcaatatcccgcatgtgattggcggcgttggcatggtcatggcactgccagagcaggatatgaagcggttgctagcctggtcgaccatcactcaacgtaggctggatgtactatcggcttggtcggtctccatcttacggctcggcggcatggcgctggagggcagcatcgcctacatcgtaataaacttctgtgatgttaagccacagagatttcggggcttatctgttccagcagccagcattaccgtagtgcttatccagcagttcgttttgcatcgcagggagctgcggcgcaagctggcgcttcccgctcaccatctggtgacgttcacctggggcaatgtcagcgcggtagacgaaacgcggcaatggatggtaatcaaaccttccggcgtcgagtacgacgtgatgaccgccgacgatatggtggtggttgagatatag

SEQ ID NO: 17844 - DNA, 492 bp, Homo sapiens; identical to SEQ ID NO: 13310
  SIMILAR (11)..(490): 991254mologous to Escherichia coli Enzyme I (Ntr),accession number U29581,Smith-Waterman Score=794.

SEQ ID NO: 17845 - DNA, 1104 bp, Homo sapiens
  SIMILAR (83)..(211): 471254mologous to Escherichia coli Hyf D,accession number M63654,Smith-Waterman Score=86.
gcttcattccagcgctccaatagtcatgacaaagtaaggagaatagttgcagaggagggtcgtacagcaagaaacctaatagcttggagtgttccactagaaagcaaagatgatgatgacggaaccgtttgcgctagccgcattgaccgagttacacgccgacgcacgttatcttggtttaggcggccatcttgtttgccgcgtggggaaattcgggccagcctaccaatgcaagcgtggctaccgaacgcaatggaagcgccaacacggatcagcgcctatctccacgcggcatcgatggtgaaagtgggcgtttacatttttgcccgcgctattatcgacggcggcaatatcccgcatgtgattggcggcgttggcatggtcatggcactggtcaccattctttatggctttctgatgtatttgccacagcaggatatgaagcggttgctagcctggtcgaccatcactcaacttggctggatgttcttcggcttgtcgctctccatcttcggctcgcggctggcgctggagggcagcatcgcctacatcgtcaaccacgcgttcgctaaaagcctgtttttccttgtagcaggtgcgctgagttacagctgcggcacgcgcttgttgccgcgtctgcgtggcgtattgcacaccctgccgttgccaggcgtgggtttctgcgtggcagcgctggcgattaccggcgtgccgccgttcaacggcttcttcagtaaattcccgctgtttgctgccggttttgcgttgtcagtggagtactggatcctgctgcccgccatgattcttctgatgattgaatcggtcgccagtttcgcctggtttattcgctggtttggtcgcgttgtgcctggcaaaccgagcgaggccgtcgccgatgccgcaccgctgccaggatcaatgcgcctggtgttgattgtactgattgtgatgtcgctgatttccagcgtaatcgccggccgtagccgcatgcccaggcatctcctgtgcgacgaaacgctgcgcggcgcgaacgacaccacagccagtaaaggccaggcagcaaaggcatcgccagtagtaacagcaacagtaatgagggggtga

SEQ ID NO: 17846 - DNA, 3243 bp, Homo sapiens
  SIMILAR (570)..(4): 991254mologous to Escherichia coli sulfite reductase (NADPH) flavoprotein beta subunit,accession number U29579,Smith-Waterman Score=999.
ttagtagacatctcgctgataacggcgctctacgcgcagctcacttaaaaattcatccgccgcttcggtgtccatgccaccaaattcggcaatcacttccagaagtgcctgctcaacgtctttcgccatgcgattagcgtcgccgcagacataaatgtgggcaccatcattgatccagcgccacagctccgcgccctgttcgcgcagtttgtcttgtacgtaaactttttctttttgatcgcgcgaccaggcaagatcgatacgtgtcagcacgccatctttgacgtagcgctgccactccacctggtacaggaagtcttccgtaaagtgcggattaccaaagaacagccagtttttacctggcgcttcgtcggcggcgcgttgctgcataaaggcgcggaacggcgcaataccggtgcctgggccaatcataatcaccggggtttctggattggctggcaggcggaagttatcgttatgttcgataaatacgcggacttcgccctcttcttccacgcggtcagcgaggaagctggaggcaccaccggcacgggcgcggccttccacgttcggtaagcgccacgccaccagcggcgcgtctttgctgtacgggctggtgtggatttcatttaccgcgccagtagcgacggattgcgaaggtgccgcgacaggcgcacgcgatttaagcgcatcaaccacgcgggcgcgccactcgctggcagcagcctggtattcaacatcggcatcgacacggtcgagcaggcgttcaccacccagttccgccagcttgctgtcgaaatctttcccggactggcagaaaaattcataagagctatcgccgaggctaaacacggcaaacgcggtgttttccagctttggcgcttttttggagaacaggaacttatgcagcgcgacggcttcttccggcggttccccttccccttgcgttgacgtcactacgatgagcagtttttcgctggcgatttgtttgaatttatagtcgcccgcgttcaccagcttaacgttcagttttgctgctaataaatcatcacgtaaggcttcagcaaccccggcgcgcatttgccgttttgcgagccggagataatagtaatacccggcatttttgcgtctggcctgggcgtcgaggcctgccgcttttgccgcctgaatatcattgcgtgagtcgccgacaaacagcatctgttgtggggcaattcccatccgctcagccaccagtaacagcgggtccggatgcggttttttgttttgcacatcatcaccaccaatcaccacgctgaagtatttggcgatatctaaggcttcgagcagcggcgcgacgaacggcgtcggtttgttggtgaccaggcctagcggcaggcctttagcctgcaacgcgcccaacgtatcggcaacgtgcgggaacaaaaacgtcccctcttcggcaacctcgccatagtagcgatcgaacagtttacgcagaatacgtacctgttcttctgccggaatgtcgtcatcaacgggcggtttacccattgttttacgctgagtcgcacgttcctgacgcgcccaggtcaatgcgcgctccatcagaacatctgcgccgttaccaatccaggtaataacgcgttcttcacctgcgacgggcaactccagcgcatacagcgccatatctaccgcagcagcaagaccaggagcactgtcgaccagcgtaccatcaagatcaaaagcgacgccgcgaatatcttcaaactttgccagttcactgcgcatttcatcaatgacttttttgtagtctggctggtcgaagattgccgaaccggcgacgaacatatccgcgcccgccgcagcgatttcgccaatgttgttcaccttcacgccaccgtccacttctagtcgaatgtcaaagccagactcgtcgatacggcgacgtacttcgcgcagtttatccagtgtttgaggaatgaaagactgaccgccgaaaccagggttgacggacatcagcaggatcacatccagcttatccatcacgtaatccagatagctcagaggtgtcgccgggttaaataccagacccgctttacagccattttctttaatcagttgcagcgtgcggtcaacatgctcggaggcttctggatgaaaggtaatgatgctggcaccagcggcagcgaaatcaggcacaatgcgatcgacgggtttcaccatcaggtgtacgtcgataggggcggtaatgccatagttacgcaaggatttcagcaccattggcccagtcgtcagattgggaacatagtggttatccatgacgtcaaaatgcacgacatcagcgccagctgccagggcttttgcggtatcttcacccaggcgggcaaatcggcgatagcttttgacgtgcaaccaggtcgcggcgattacgctggaaatcagcgacatcacaatcagtacaatcaacaccaggcgcattgatcctggcagcggtgcggcatcggcgacggcctcgctcggtttgccaggcacaacgcgaccaaaccagcgaataaaccaggcgaaactggcgaccgattcaatcatcagaagaatcatggcgggcagcaggatccagtactccactgacaacgcaaaaccggcagcaaacagcgggaatttactgaagaagccgttgaacggcggcacgccggtaatcgccagcgctgccacgcagaaacccacgcctggcaacggcagggtgtgcaatacgccacgcagacgcggcaacaagcgcgtgccgcagctgtaactcagcgcacctgctacaaggaaaaacaggcttttagcgaacgcgtggttgacgatgtaggcgatgctgccctccagcgccagccgcgagccgaagatggagagcgacaagccgaagaacatccagccaagttgagtgatggtcgaccaggctagcaccgcttcatatcctgctgtggcaaatacatcagaaagccataaagaatggtgaccagtgccatgaccatgccaacgccgccaatcacatgcgggatattgccgccgtcgataatagcgcgggcaaaaatgtaaacgcccactttcaccatcgatgcggcgtggagataggcgctgatcggtgttggcgcttccattgcgtccggtagccacgcttgcatcggtagctgggccgatttcccccacgcggcaaacaggatgccgccataaaccagataacgtgcgtcgccgtgtaactcgctcatcgcgctccat

SEQ ID NO: 17847 - DNA, 1986 bp, Homo sapiens
  SIMILAR (653)..(1351): 981254mologous to Escherichia coli Enzyme I (Ntr),accession number U29581,Smith-Waterman Score=1142.
atggcgggactggtactctcctcgacgctgctcggtcagttgttgttttttgaaattacaggcggctgctcctgggcgttgatcagttattaccagagcgataaagcgcagcgttcagcactaaaagcgttacttatcactcatatcggctcgttggggttgtatcgttgccggcgtcacgctgtttttgcagaccggaacgtttgcgcttatcgcgatgagcgacgtacacggcgacgcactgtatctggtttgtggcggcatcctgtatgccgagtgggggaaatcggcccagctaccgatgcaagcgtggctaccggacgcaatggaagcgccaacaccgatcagcgcctatctccacgccgcatcgatggtgaaagtgggcgtttacatttttgcccgcgctattatcgacggcggcaatatcccgcatgtgattggcggcgttggcatggtcatggcactggtcaccattctttatggctttctgatgtatttgccacagcaggatatgaagcggttgctagcctggtcgaccatcactcaacttggctggatgttcttcggcttgtcgctctccatcttcggctcgcggctggcgctggagggcagcatcgcctacatcgtcaaccacgctagttcatcaccaattatgctcactcgcctgcgcgaaatagtcgaaaaggtagccagcgcaccacgcctgaatgaggcgttaaatattctggttaccgacatctgtcttgcgatggataccgaggtctgttcggtctacctggccgatcatgatcgacgttgttactacctgatggcgacccgggggctgaaaaaaccacgcggtcgcactgtaacgctcgcgtttgatgaagggatcgtcggcctggttggcaggctggcggaaccgataaaccttgcagatgcgcaaaagcaccccagcttcaaatacatcccctccgtaaaagaagaacgtttccgcgcgtttttaggcgtaccaattattcaacgtcgccagttgcttggtgtactggtggtacagcaacgagagttgcgccagtatgacgaaagtgaagaatccttcctggtgacgcttgccacccagatggcagctattctttctcagtcgcagttgactgccttgtttgggcaatatcgccagacgcgaatccgcgcattaccggcagcacctggtgtggcgattgccgaaggctggcaggatgccacgttacctttaatggaacaggtgtatcaggcatcaacgctggatccggctctggaacgcgaacgactgacccgggcgctggaagaagcgggcaacgagtttcgccgctacagcaaacgctttgccggcgcgtgccggtgggatatcgttcagcagggtagcgaggcgagggatcggttctgcggtttccgggctgatgcgcatacccaatttggcggcaaaacgtaccgcgcgcagcatacgtaccggatcttcacggtagcgcgtttccgggttaccaatcagacggataacgccgtccttcagatccttcatgccgccaacgtaatcacggacggtaaaatccgctacgctgtaatacaggctgttgatagtgaaatcgcggcgctgggcgtcttcttcgatggagccgaaaatgttgtcgcgcagcaacatgccgttttgcccgcgttgggaggtcgtgcggtcgctgacgttaccttcgtggtgtccacggaaggtcgcaacttcgataatctccgggccaaacattacatgagccagacggaaacggcgacccaccaggcggcagttacggaacagtttgcgcacctgctcaggcgtgggcgttagtggttacgtcaaaatctttcggctttttgccaagtaacaggtcgcgcacgccgccgccaaccagccaggcttcgtatcccgctttattgagcctgtacattaccttcagggcattttcactgatatctttgcgggaaataacatgctgctcacgc

SEQ ID NO: 17848 - DNA, 825 bp, Homo sapiens
  SIMILAR (71)..(823): 951254mologous to Escherichia coli YFHH-ECOLI protein similarity,accession number D64044,Smith-Waterman Score=1195.
atcacttttccggcaacaatcgaccgcatcatggctaactggaatttttaattcatggcaattagcggcaatggaatataaaattcactcgcgtgtgtctcatattgcctgttgtcgccactatttcatcgcgaggaaagatatgaacggcttacttcgtatccgtcagcgttaccaggggcttgcccagagtgataaaaaactggcggattatctgctgctacaacctgatacggcgcgccatttaagctctcagcaactggccaacgaagccggagtcagtcagtccagcgtcgtgaagttcgcgcaaaaactcggctataaaggttttccggcgcttaagttggcgttgagtgaagcgctggcaagccagcaggactcatcagccgggtccagtcagagtcatatcagcggtgatgatccgttacggctggtcggcgaaaaactgattaaagaaaatactgccgctatgtacgcaacgctaaacgttaatagtgaagagaaactgcatgaatgcgtaacaatgttgcgctctgcgcggcggataattctgaccggtattggcgcttcgggtctggtggcgcaaaactttgcctggaagctgatgaagattggcttcaatgctgccgcagtgcgcgatatgcatgcgctactcgcaacagtacaggcgtcgtcccctgacgatctgttattagccatttcctacaccggtgtacgacgcgagttaaacctggcggcagatgagatgctgcgagtgggcggaaaagtgctggcgattaccggctttactccgaatgccctgcaacagcgtgcttctcattgccg

SEQ ID NO: 17849 - DNA, 843 bp, Homo sapiens
  SIMILAR (151)..(2586): 981254mologous to Homo sapiens putative p150,accession number U93567,Smith-Waterman Score=4156.
atgctttctgggatagttctactggaacgcgacttcttcgaaacaaaatcagcacgaagagagccgtcgggaccgaatagtgctgctgtaggtcgatctagaggatcccctcggttaccggtcgtaactaacatcttcagcctctggcgggatgatggccgcgcttcctgcggatataacaaaacgatgaggttttacatgcgtaaaattaaagggttacgttggtatatgatcgcactggtgacgctcggcaccgtgcttggttacctgacgcgtaacactgtggcggcagctgcgccaactctgatggaagagttaaacatctccacccaacagtattcctatatcatcgcagcctattctgctgcttatacggtcatgcaaccggtagcaggttatgtactggatgtgctgggtacgaaaatcggttatgcaatgtttgctgtgctgtgggccgtgttctgtggtgcaaccgcgctggcaggtagctggggtggcctggctgttgctcgtggtgcggtcggtgccgcggaagcagcgatgatcccggcgggtctgaaagccagctccgaatggttcccggcgaaagagcgttccatcgcagtaggctactttaacgtaggttcttcgattggtgcgatgattgcgccgccgctggtggtatgggcaatcgtaatgcacagctggcagatggcatttatcatctccggtgcattgagctttatctgggcgatggcatggctgattttctataaacatccgcgcgaccagaagcatctgaccgatgaagaacgcgactatattattaatggtcaggaagcccagcaacaggtgagctcatag

SEQ ID NO: 17850 - DNA, 1728 bp, Homo sapiens
  SIMILAR (714)..(457): 741254mologous to Homo sapiens E2F-3 transcription factor,accession number Y10479,Smith-Waterman Score=311.
atgctgttgcaggatgcaggctggaatgacaaacgtatttctgatgcgctgaagcagggtgatacacgttacgtcaatattcggcagtcgattccggtgaatctctactacctgacggcctttgttggtgcagatggtcgtacccactatgccgccgtgtttaagtttgactggttctctgccaccggcaccgccattctgtttgctgcaattaccatagcaataggacccccaagttgtagcgctacggcttccacacgacttagtgagaacagcgactgccaggtgtaccattcgctgataaaaccattcagcggaggaatggctgatatcgcgaggcaaccaatccacctgacgctggacggttgctttgttgaagttgaacagaacgtcagacttcagagtgaagtgcttggtctgtacttccggtgccggagctggagccggagcaactactggagctgcttcgccctgaccgaaacggtaggaaacacccaggctcagcatgccgttgtccggacgagtgccgatggtgtacagctgcgccagctccagttcatcaacgagcgccttaagacgtgcagagtcagactgcaacgcgaaattttgtgcctgattgagcggagtattgccgatagacctgctggacgacgaaggcatggcgttcgtcaacgagcagatggatatctaccgcaatatcggttatcgcgtattgatggtttccagccatactcaggatgggctaaaaccgctggaagaggcgttgaccgggcgcatcagcatttttgccgggcagtctggcgtcggcaaatccagcctgctgaatgcgttgctggggctgcaaaaagagatcctgaccaacgatatctcatgacacaggcagaacgccgccatgaccggctggctgtcaggctgtcactgataatcagccgtctggttgcgggtgaaacgttgagcgtgcgcaaactggcggctgagtttggcgtgtcagtgcgcacgctgcggcgtgattttcgtgaacgactgatgtatctggacctggagtatcagtccggatactgccgcttacgcactgctggcagtgagatgcagatggtgcccgacgtgcttatctttgcccaccgcagcgggctggccgggctttttcccggccttgaccgccgtctgcgtcgccattattacggctggttgccgaaagagggaaccgttgagccgctgccgaacggtaagcgtctgccgacagactttaatgaaggggcgaagaacaacacctattctcgtaatgagaagatggtcggctacagcttcgatcacgaatttaacgacacctttactgtgcgtcagaacctgcgctttgctgaaaacaaaacctcgcaaaacagcgtttatggttacggcgtctgctccgatccggcgaatgcttacagcaaacagtgtgcggcattagcgccagcggataaaggccattatctggcacgtaaatacgtcgttgatgatgagaagctgcaaaacttctccgttgatacccagttgcagagcaagtttgccactggcgatatcgaccacaccctgctgaccggtgtcgactttatgcgtatgcgtaatgacatcaacgcctggtttggttacgacgactccatattgtcttcaatacgcagcaaaaaacaggaaaccagttcgccgcgctgctgcttaccgcagttgaggaatgttggcgtggctggctga

SEQ ID NO: 17851 - DNA, 1827 bp, Homo sapiens
  SIMILAR (625)..(1521): 971254mologous to Escherichia coli 'ferrichrome-iron receptor precursor',accession number D26562,Smith-Waterman Score=1525.
atggcaccgttacctgaaatggtcgctaccagtcgtaatattgatgaaaaatataaaaactattacacagcgttaactgaactgattgattatctagattatggcaatactggagcttatttcgctcagccaacccagggaatgcaaaatgcaatgggcgaagcgtttgctcagtacgccctcagcagtgaaaaacttgtatcgcgatatcgtcactgccaacgcagatgattcccgatttgcccagtggcaactgccggttatcgcgctggtggtggtattgattctgctggtggcgtggtacggcattcgccgtatgttgcttactccgctggcaaaaattattgctcacattcgcgaaatcgccggtggtaacctggcgaataccctgaccattgacgggcgcagtgaaatgggcgacctggcgcagagcgtttcacatatgcaacgctctttgactgacaccgtcatatcagcgtccgcaaaggttcagatgccatctatgccggtacccgtgaaattgcggcgggcaacaccgatcttcctcccgtactgaacaggtctcagccgcagcaacagccgcaacagcaacttgctcagcaagagcagaaagacagcgacggtgtagccgttgtagtagccacagcggttagcggcatgtctgtttatgcacaggcagcggttgaaccgaaagaagacactatcaccgttaccgctgcacctgcgccgcaagaaagcgcatgggggcctgctgcaactattgcggcgcgacagtctgctaccggcactaaaaccgatacgccgattcaaaaagtgccacagtctatttctgttgtgaccgccgaagagatggcgctgcatcagccgaagtcggtaaaagaagcgcttagctacacgccgggtgtctctgttggtacgcgtggcgcatccaacacctatgaccacctgatcattcgcggctttgcggcagaaggccaaagccagaataactatctgaatggcctgaagttgcagggcaacttctataacgatgcggtcattgacccgtatatgctggaacgcgctgaaattatgcgtggcccggtttccgtgctttacggtaaaagcaatcctggcggcctgttgaatatggtcagcaagcgtccgaccaccgaaccgctgaaagaagttcagtttaaagccggtactgacagcctgttccagactggttttgactttagcgattcgttggatgatgacggtgtttactcttatcgcctgaccggtcttgcgcgttctgccaatgcccagcagaaagggtcagaagagcagcgttatgctattgcaccggcgttcacctggcgtccggatgataaaaccaattttaccttcctttcttacttccagaacgagccggataccggttattacggctggttgccgaaagagggaaccgttgagccgctgccgaacggtaagcgtttgccgacagactttaatgatagggcgaagaacaacgcctattctcgtaatgagaagatgaacgaaccggaaaccgggtattacggctggttgccgaaagacggaaccgttgaaccgctgccgaacgcttctttcgtggcaattttcccccaggagggatttccctgcagtggacctcctccccattggtaccttcagccatcagaacacctcgctttagatctgtgggtcccaaatttcatcaaatccaatgaccatttctatggaaatcatcccaatatgcctgatgtgcttttcctactttgctacctgtcaacgttgtccatgatgtccctggttgaacaaaaatccttggatttgatgtaa

SEQ ID NO: 17852 - DNA, 362 bp, Homo sapiens
  SIMILAR (67)..(135): 521254mologous to Homo sapiens Human secreted protein sequence SEQ ID NO:195,accession number Y87156,Smith-Waterman Score =63.
  misc_feature (1)...(362): n = a,t,c or g
ggcacgaggtgttatggtttttgaagttttcaggggtttagtgccgttatctccggatatttgtagattgatctaccttgggtctttactgctgctgaccttcaagtgggctctatgagtggacgtcctttttgttgatgctgatactatnnnnnnnnnnnnnnnnnnnnnnnnnnnnnnnnnnnnnnnnnnnnnnnnnnnnnnnnnnnnnnnnnnnnnnnnnnnnnnnnnnnnnnnnnnnnnnnnnnnnnnnnnnnnnnnnnnnnnnnnnccaagattactgcctgtttcttcctctgcaagctttgtcccagaacggcacccgtcagatgccacccacaggtcttctgtatgagatgtcc

SEQ ID NO: 17853 - DNA, 2643 bp, Homo sapiens; identical to SEQ ID NO: 15144
  SIMILAR (196)..(3000): 981254mologous to Homo sapiens putative p150,accession number U93567,Smith-Waterman Score=4804.

SEQ ID NO: 17854 - DNA, 1560 bp, Homo sapiens
  SIMILAR (1057)..(1545): 801254mologous to Homo sapiens putative p150,accession number U93568,Smith-Waterman Score=658.
gctattattcgtgaattgggtggtattccaattgttgcaaacaaaatcaaccattccaaccagagtattaaagagaaagctttaaatgcactaaataacctgagtgtgaatgttgaaaatcaaatcaagataaagatatacatcagtcaagtatgtgaggatgtcttctctggtcctctgaactctgctgtgcagctggctggactgacattgttgacaaacatgactgttaccaatgaccaccagcacatgcttcacagttacattacagacctgttccaggtgttacttactggaaatggaaacacgaaggtggattcatcattcctttccctttatgacagccacgtagcaaaggagattcttcttcgagtacttacgctatttcagaatataaagaactgcctcaaaatagaaggccatttagctgtgcagcctactttcactgaaggttcattgtttttcctgttacatggagaagaatgtgcccagaaaataagagctttagttgatcaccatgatgcagagagcaactgggggaaggggtgctgtgggcgcagtttcagcagacttaaacgtccctgcctgacagctctgaaaagagcactggttctcccagcacagcgttcgagctctgataagggacagactgcctcctcaagtgggtccctgacccctgtgtatcctggctgggagacacctcccagtaggggccgacagacatctcatacaggagacctctggctggcatctgacgggtgcccttctgggacaaagcttgcagaggaagaaacaggcagtaatctttgctgttctgcagcctccgatgttgatacccaggcaaacagggtctggagtggacctccagcaaactccagcagacctgcagcagaggggcctgatcacaactcctcaccagcaagggaagaaaactggacacagaatgagtttgatgaattgacagaagcaggctttagaaggtgggtaataacaaacccctccgagctaaaggagcgtattctaacccaatgcaaggaagctaagaaccttgaaaaaagaaccaatgacaaaaaccacatgattgtctcaatagaagcagaaaaggccttcgacaaaattcaacaacccttcaagttattcaataaactaggtattaatggaacatatctcaaaataataagagctatttatgacaaacccacagccaatatcctactaaatgggcaaaaactggaagcattccctttgaaaaccagcacaagacaaggatgccctctctcaccactcctattcaacatagcattcgaagttctggccagggcaatcaggcaagagaaagaaataaagggtattcaattaggaaaagaggaagtcagattgtctctgtttgcagatgacatgattgtatatttagagaaacccatcatctcaacccaaaatctccttaagctgataagcaacttcagcaaaatctcaggatacaaaaatcaatgtatcacagcattcctatacagaattaaaaatcacaagcaaactcaaaagcgagcagaagaccaataa

SEQ ID NO: 17855 - DNA, 886 bp, Homo sapiens
  SIMILAR (370)..(819): 511254mologous to Homo sapiens p40,accession number U93571,Smith-Waterman Score=370.
atggcgccagtatctgcttctgaggacttctggcaatgtccagagacatctttgatttcgcaactagaaagtgcccctggaattcagttgatggaggccagggatgctgataaaagtcttataatgcacgaaatagcccccacctccaacagggaattaccagtccataaaatcagtattgccaaaccttgctctatgctaatgatctcatggttttttgttaataccggacaaagcttccagaggaaggatcaggcagcaatatttgctgttctgcagcctctgctggtgatacacaggcaaacagggtctggagtggacctccagcaaactccaacagacctacagctgagggacctgactgtcagaaggaaaaataacaaacagaaaggaatagcatcaacatcaagaaaaaggacatctacaccaaaaccccatctgcaggatcacagctcctcaccagcaatggaacaaagctggatgcagaaagactttgacaagttggcagaagtaggcttcagaaggtcggtaataacaaacttctccgagctaaaggaggatgttcaaacccatcacaaggaagctaaaaaccttgaaaaaagattagatgaatggctaactagaataaacagtgtagagaataccttaaatgacttgatggagctgaaaaccatggcacaagaactacatgatgcatgcacaagcttcagtagacaatttgatcaagtggaagaaagggtatcagtgattgaagataaaattagtgaaataaagtgtgaagacaagattagaggaaaaagaataaaaaacaaacaaacaaacaaagcctctaaaaaatgtgggactatgtgaaaagaccaaatctacatttgattggtgtatctga

SEQ ID NO: 17856 - DNA, 682 bp, Homo sapiens
  SIMILAR (360)..(205): 881254mologous to Homo sapiens Hb2E,accession number AF235097,Smith-Waterman Score=248.
  misc_feature (1)...(682): n = a,t,c or g
atttcagcttgtcttcttttaactccgtgattgcttttcacctcatatacaagagctccggctggcatctggcaggtgcccctctgggacgaagcttcccagaggaaggaaaaggcagcaatctttgnnnnnnnnnnnnnnnnnnnnnnnnnnnnnnnnnnnnnnnnnnnnnnnnnnnnnnnnnnnnnnnnnnnnnnnnnnnnnaagtgtcatctggggccatggacggagaggggtgggggctaccagtggacccactgactcgtggacatcaggatgctctgccatggcaaaggtgttatcatccatgttcttcgtcttcagttcctcctcggcaggcctgcagggcagaggagagagtacatggatctaataataccctgagaggtcacttctgccacccactggcaccttctgagcctctgtgctagcccaccttcacctgacagctgctgttttctcttctgctgcctttgtttatcccctcatcctaaaagtcctacagcctcattatagaaaattcgcaaaatacaggaaagtctaaagaagcaagaaaaacaatcacacatcagccagagacaactactgttaccattctggaaactttccttccagatattctacgaaatcatttagattctacagacataatttcacagctagctttgtccatttaacagcc

SEQ ID NO: 17857 - DNA, 489 bp, Homo sapiens
  SIMILAR (240)..(4): 881254mologous to Homo sapiens Human TB2 protein (partial),accession number W76141,Smith-Waterman Score=370.
  misc_feature (1)...(489): n = a,t,c or g
ntaggtgctcttctnttcttcacccagtaaattcacggtagctttcttcgcttctttagtgatggcatctgcagtctctttggccttgtctttaaggtccttgaccacactgtccatctgggactcgtgcttcaggaagaaaggacggatgatgcgcttgtagagcagttcagccccattagaagggctcggggccatgcaccacaacaggaagccacagagatgtaggctgggtagccaaatcctatcaggttgcagaggagagaggctccataaccgaacaccaggtacaaggccaccagtccgatgacaccaagagcgatgaagctcctgttcacgccggttttggcctcgagcttggccagaaggtcagtcatgcagttcttctcgtgcaggaaccggtcgaacctctccctcatggccgcagacatggcggggaccgtctcgccgctcggggctgttcctagtgccggacgaaatcgtcgaccg

SEQ ID NO: 17858 - DNA, 669 bp, Homo sapiens
  SIMILAR (552)..(244): 981254mologous to Tn10 delivery vector pHV1248 transposase,accession number AF307747,Smith-Waterman Score=523.
ttagtctttctcgtactgtttgttggttttctctcttgctttaaaagcacatatactcttacttatggggattcgccttccctctgcgatggtcttcttattatttaaataagcaggatagatacaaataaacctgccatagacaatagcataagtggtatcagagatgtaggctgggtagccaaatcctatcaggttgcagaggagagaggctccataaccgaacaccaggtacaagccaccagtccgatacacgtttcgatttctgactgtgttagcctggaagtgcttgtcccaaccttgtttctgagcatgaacgcccgcaagccaacatgttagttgaagcatcagggcgattagcagcatgatatcaaaacgctctgagctgctcgttcggctatggcgtaggcctagtccgtaggcaggacttttcaagtctcggaaggtttcttcaatctgcattcgcttcgaatagatattaacaagttgtttgggtgttcgaatttcaacaggtaagttagttgctagaacccatggctcctttgccgacgcaagagcgatgaagctcctgttcacgccggttttggcctcgagcttggccagaaggtcagtcatgcagttcttctcgtgcaggaaccggtcgaacctctccctcatggccgcagacat

SEQ ID NO: 17859 - DNA, 1431 bp, Homo sapiens
  SIMILAR (1)..(522): 961254mologous to Escherichia coli K12 transport of D- alanine, D-serine, and glycine,accession number AE000492,Smith- Waterman Score=865.
atggtagatcatgtaaaagtcgttgccgatgatcaggctccggctgaacagtcgctacggcgcaatctcacaaaccgacatattcagcttattgccattggcggtgccattggtacggggttgtttatggggtctggcaaaacgattagccttgccgggccgtcgatcattttcgtttatatgatcattggttttatgctctttttcgtgatgcgggcaatgggggaattgctgctttcgaatctggaatacaaatcttttagtgacttcgcttccgatttactcgggccgtgggcaggatatttcaccggctggacttactggttctgctgggttgtaaccggtatggcagacgtggtggcgatcacggcttatgctcagttctggttccccgatctctccgactgggtcgcctccctggcggtgatagtgctgctgctgacgctcaatctcgccaccgtgaaaaatgtcggtgagatggagttctggtttgcgatgatcaaaatcgtcagacccctgtctggaagccgcaccaagaagatgtccaagtctgacgataatcgcaataacgttatcggcctgctggaagatccgaaatcggtagtgaagaaaatcaaacgtgcggtcactgactccgacgagccgccggtagttcgctacgatgtgcagcgaccaaagcgaagcgccctgctggagcgcgcccctgaacgttttcaggaagtctttattttaaaaggccgtgaagataaacgtctgttaccgctgattcacgcccttgagtctcagggcggtggttatccagttggcaaaccgccaatatctcgacgagaaaagcgaccgtgccgtgcatcaggggcatattccccgccagttttattgatcctgattatggatccgctcggaaacctacctattttcatgtccgtactgaaacatactgaaccgaaaagacggcgggcaatcatggtgcgagagttgcttattgctctcctggtgatgctggtgttcctgtttgcgggtgagaaaattctggcatttcttagcctacgagcagaaaccgtctccatttctggcggcatcattctgtttctgatcgccattaaaatgattttccccagcgcttcaggaaatagcagcgggcttccggcaggtgaagagccatttatcgtgccgttggcaattccgttagtcgccgggccgactattctcgccacgctgatgttgttgtctcatcagtacccgaatcagatggggcatctggtgattgctctgctgctggcctggggcggcacctttgtcatcctgctacagtcttcgctatttttacgtctgctgggcgagaaaagggtgaacgcacttgaacgcctgatgggattgattctggtgatgatggcacccagatgttcctcgacggcattcgaatgtggatga

SEQ ID NO: 17860 - DNA, 918 bp, Homo sapiens
  SIMILAR (379)..(909): 991254mologous to Escherichia coli K12 putative regulator,accession number AE000330,Smith-Waterman Score=881.
atggtagatcaggtaaaagtcgttgccgatgatcaggctccggctgaacagtcgctacggcgcaatctcacaaaccgacatattcagcttattgccattggcggtgccattggatatttcaccggctggacttactggttctgctgggttgtaaccggtatggcagacgtggtggcgatcacggcttatgctcagttctggttccccgatctctccgactgggtcgcctcgctggcggtgatagtgctgctgctgacgctcaatctcgccaccgtgaaaatgttcggtgtcatcggactggtggccttgtacctggtgttcggttatggagcctctctcctctgcaacctgataggatttggctacccagcctacatctccgaatgtccgcccacatacggcgtgaaaccgggtctggtggttggtttgattgctggcggagaatatgccattcagcacgcggtggaaggcgcggaagatagccgggaaggcggtgttaatgatctgaaaaatattaatttaacggcacaggatgtggtggttggcattgctgccagcggtcgcacgccgtatgtgattgccggactggaatacgcacgccagctcggctgccgcacagtgggaatttcctgtaatccggggagcgccgtttcaaccaccgctgagtttgccattacaccgattgtaggtgccgaagttgttaccggttcttcgcggatgaaagcaggtacagcgcagaaactggtgctcaatatgctttccaccgggctgatgattaaatccggcaaagtgttcggcaacctcatggtcgatgtggtcgccaccaacgaagaactgcatgtgcgacaggtcaatattgttaaaaacgccaccggatgtagcgcagagcaagcggaagcggcgttaattgaatggtag

SEQ ID NO: 17861 - DNA, 2385 bp, Homo sapiens
  SIMILAR (2114)..(1707): 551254mologous to Homo sapiens Human TB2 protein (partial),accession number W76141,Smith-Waterman Score=273.
ggtttgctttctacaaagttttaagtttaataaaatgccggtaatcaccactgttttcctccccaaaataaatgctctgatccatattatattagagtgatactgtcacttagtattgatatctttaatattttttacatcatgagacattgttatgatcttacctgattgttatctcaaggtgagctaatcatctttatttgccttaaaaaatactgcactggctggatatttaatcttgttagtttagttatacacttgttttagtctagtttaattcaaaaggactcttaacagtatggtgtaaaactcagattttctagtccagacaaattgctctctataacgatttggcagatcaatggagacatccgttttaactttactgttctgtacttactatgtagtcatgtgcagcttatcaacacaaagaatacggatgagggcatttaaatggactacaagtgactctgacttgtaaactagggaagcctcttgtgtttgacctcaaaggccagagaaaaactgaagatagattgacttaactattgccaagcagattatgggttactttatacttcctttcattctcccagaattgctcttagagctaggtgtcgtcattagcatgttgttgctaatgatacaaacaagaacatacatgtaatcagaggtggacaaatcttcagaagttccttaaactggtttaaaaaagaagattgggaaagaagactaaatcaacatgtttctccgctttgaagataaaaccagaaatggtttccattgtagcatcttgacaatagacaaatatgtaaagtttatagcagataagacagtattactagtttttcagggaattgagagttacagggtactctgtgtgtgtgtgtgtgtgtgtgtgtgtgtgtgtgtgtgtgtgtgtgtgtgtgtaaatttcccgatttatcactagagtgagtaactaactaactaactgctttataaagctatcctggtattcatatgccatatactagggaaacaaccaggccaatctccattcgatttcatttctcactttgttcacttgcatattaatcacgtatttcctaaagtattatttagtagaccacaccagcacaatggttcctccagcttttggcaggtggtcttactgtacagaagttataaatgacacatacaaccttcccctgctccctccccatgagcatgatgcatgttgtagtcagacagtaacatttccatatgtacatgtgcacaaatacattaaaaacatttcagaattatataaaattgtacattataggaagtagaaccataaagattatcctaaatgtaactacagagaaaatgcgtgcagggagagcccagtaaagtacacagcctgtggggtatataattttattttaagtttatatttcctgcaggatagcaacatacatcttttcctacccagaggcaaaatacattttccaaaaacgtggacactgcccactgcattaagtttaaagtgctccctatatatatagacagtaaaagtaagcaaagaaacttacaacacattccaatctttaatatctcaaaaatgtttccaaggcaacattattaaaataattataccacagtccctaatataacatcaagctccagtaggaaggtacagagagggcaggaagtttccatccagtctggtttagtctggtttaggtgctcttcttttcttcacccagtaaatttcacggtagcttttcttcgctttctttaagtgatggcatctgcagtctctttggcccttgtctttaaggtccttgaccaacacttgtccaatctgggacttcgtgcttccagggaaagaaaaggaccggatgatgcgcttgttagagcagtttcagcccccatttagaaggggcttcggggccattgcaccaaccaaccaggaagccacactttcagccatgtagttagaaggggaacccatgacaggaagatatcagagaacgaatttcagcaatgctgaacacaccatacactacccagtaggtcagccactgggtatcatcttctttgttgggactctctatagctttaattgagatgtaggctgggtagccaaattcctatcaggttgcagaggagagaggctccataaccgaacaccaggtacaaggccaccagtccgatgacaccaagagcgatgaagctcctgttcacgccggttttggcctctgagcttggccagaaggtcactcatgcagttcttctcgtgcaggaaccgatcgaacctctccctcatggccgcagtcatgttcggggaccgtctcgccgcccggggctgttcctagtgccggatagactggagcggcgactgcggcggagcagacgaaa

SEQ ID NO: 17862 - DNA, 1206 bp, Homo sapiens
  SIMILAR (37)..(675): 891254mologous to Escherichia coli PEP carboxylase (AA 1- 883),accession number X05903,Smith-Waterman Score=927.
atgaaggtctggtcctcatccgttgcaaagggtaatatgaacgaacaatattccgcattgcgtagtaatgtcagtatgctcggcaaagtgctgggagaaaccatcaaggatgcgttgggagaacacattcttgaacgcgtagaaactatccgtaagttgtcgaaatcttcacgcgctggcaatgatgctaaccgccaggagttgctcaccaccttacaaaatttgtcgaacgacgagctgatgaccgttgcgcgtgcgtttagtcagttcctgaacctggccaacaccgccgagcaataccacagcatttcgccgaaaggcgaagctgccagcaacccggaagtgatcgcccgcaccctgcgtaaactgaaaaaccagccggaactgagcgaagacaccatcaaaaaagcagtggaatcgctgtcgctggaactggtcctcacggctcacccaaccgaaattacccgtcgtacactgaaccacaaaatggtggaagtgaacgcctgtttaaaacagctcgataacaaggatatcgctgactacgaacacaaccagctgatgcgttggctgggcccagtgaatcgccagtcatggcctaccgatgaaattcgtaagctggcttcaagccacgttgatgaaacacaaatgggctatggccatctcgttaattactgggacataacatcaagaggatatgaaattatgagtaccgctaaattagttaaatcaaaagcgaccaatctgctttatacccgcaacgatgtctccgacagcgagaaaaaagcaacagtagagttgctgaatcgccaggttatccagtttattgatctttctttgattaccaaacaagcgcactggaacatgcgcggcgctaacttcattgccgtacatgaaatgctggatggcttccgcaccgcactgatcgatcatctggataccatggcagaacgtgcagtgcagctgggcggtgtagctctggggaccactcaagttatcaacagcaaaaccccgctgaaaagttacccgctggacatccacaacgttcaggatcacctgaaagaactggctgaccgttacgcaatcgtcgctaatgacgtacgcaaagcgattggcgaagcgaaagatgacgacaccgcagatattctgaccgccgcgtctcgcgacctggataaaatcctgtggtttatcgagtctaacatcgaataa

SEQ ID NO: 17863 - DNA, 1199 bp, Homo sapiens
  SIMILAR (117)..(884): 981254mologous to Escherichia coli Sensor kinase CitA,accession number D90702,Smith-Waterman Score=1273.
ctttaattgatttaatgaataaaatttgccacgatcataattaatatctatgtattttgattcaacattttaattacatccgtcaaagaggctcgggacaacccgcaaggaaaacaatgttgcagcttaacgagaataaacagtttgcatttttccaaagactggcatttccgctgcgtatctttttgctgattctggtgttctcaatatttgtcattgcagccctggcgcaatattttacggccagttttgaggactatttaacgcttcatgtacgcgacatggcaatgaatcaggcgaaaattattgcctccaatgacagtgtcatatctgcggtgaaaacgcgtgactacaaacggctggcgaccatcgctaacaaattacaaagagataccgattttgattatgtggtgattggggaccggcactcgatccgcctttaccatcctaatccggagaaaattggttatcctatgcagttcaccaaacagggcgcgctggagaaaggggagagctacttcattaccgggaaagggtcaatggggatggcgatgcgcgccaaaacgccaatctttgatgacgatggaaaagtcatcggcgtggtgtcgattggctacctggtgagtaaaatcgatagctggcgggctgagtttttattaccgatggcaggtgtgtttgtcgtgctgttagggattctgatgttgctgtcgtggttcctggccgcgcatatccgtcggcagatgatgggcatggagccaaagcaaatcgcacgcgtggtccgtcagcaagaggcgctgtttagttcggtttatgaagggctgattgcggtggatccgcatggttacattaccgccatcaatcgtaacgcaggggatcctctagggtcgacttgcgagctcgcatctgtatctcgctacgtacgcgactcgttagagagtgtctggcatgtagtaaacccacagaaagtggtaactctaataatgatgcgaaatttattgaataacttgacatgtgtaaaacatatcaccatgagcactgagaaatcagtgcatcaggcagtgggggaaataaatgggatctgtgccgggtaccgagcagtacgcaaagcgattggcgaagcgaaagatgacgacaccgcagatatcctgaccgccgcgtctcgcgacctggataaattcctgtggtttatcgagagataa

SEQ ID NO: 17864 - DNA, 991 bp, Homo sapiens
  SIMILAR (991)..(395): 981254mologous to Escherichia coli K12 putative 2-component sensor protein,accession number AE000485,Smith-Waterman Score=975.
ccagtacatgttcagcaatgtacggcagcaggtcgatagccagtaaatccatcaggttcatcaggaatacccagacgaagatcgtcagggccagcggagcaatcagcttgcttttgccatggtacatgtctttcacgctaccattaacaaagccgatcaccagctcaatcgcggtctgaaacttacctggcacaccgctggtcgcctttttggctacgctacggaataaaaccaggaacaacagacccagcaccaccgagaagaacatggagtcaatattgattgtccagaaggtggctggggggttttgtggatccaccagcgagaatgtacgcaggtccagctgaaggttattcaggtggtgtcctatgtaatcctgcggcgtcatattttccaccagagagccaatctcttcctgatagttattggctgttttgagaatgtaatcttccaactgcttataactctcagaatgcaataatccgagaatcacatgcaatttattcataaattcgtgggatcgttcacgaagtgcgtcagcatagttgaccagaccgtcgagtcgctgcatcagtttacgtacttcagttttgtccctgaaggttgaaatggcaccgatgataacgccattactgcgcaccggaacggtgttgatcagtaatagccggtctttaatcgtaatctcttcgtcgcggcgcggggtaccgtcgcgtaacacttccgagacatctaccacctgtgaccatgagtggcttagcgtcgacagtttctcatcgtcctgcgacttacggtaattcagcaattcttgtgcggcatcgttgatcagcgtgacctcgccgcgatcgtccacggcaacgacgccttctttgatagactgcaacatggcctggcgttgctcaaacagcgtggagatttcgtagggttccaggccgaaaaggatttttttcagtaccttaaccagaatgcaggtgccaatcagtccgaccagcat

SEQ ID NO: 17865 - DNA, 1125 bp, Homo sapiens
  SIMILAR (1)..(1107): 821254mologous to Escherichia coli K12 putative 2-component sensor protein,accession number AE000485,Smith-Waterman Score=1437.
atgacgcgagatgggctagccaacaaggcactggcagtggcgcgtaccctcgccgactcgccggaaatccgtcagggcttgcagaaaaaaccgcaggagagtggcatccaggccatcgcggaagccgtacgcaaacgcaacgatctgctgtttattgtcgttaccgatatgcaaagtcttcgctactcgcatcctgaagcccagcgtattggtcagccatttaaaggtgatgacatccttaaagcgctgaatggcgaagaaaatgtcgctatcaatcgcggttttctggcgcaggctttacgcgtatttacccccatctacgatgaaaatcataaacaaattggcgtggtggcgatcggccttgagttaagccgtgtgacccaacagatcaatgacagtcgctggagcattatctggtcggtattatttggcatgctggtcggactgattggcacctgcattctggttaaggtactgaaaaaaatccttttcggcctggaaccctacgaaatctccacgctgtttgagcaacgccaggccatgttgcagtctatcaaagaaggcgtcgttgccgtggacgatcgcggcgaggtcacgctgatcaacgatgccgcacaagaattgctgaattaccgtaagtcgcaggacgatgagaaactgtcgacgctaagccactcatggtcacaggtggtagatgtctcggaagtgttacgcgacggtaccccgcgccgcgacgaagagattacgattaaagaccggctattactgatcaacaccgttccggtgcgcagtaatggcgttatcatcggtgccatttcaaccttcagggacaaaactgaagtacgtaaactgatgcagcgactcgacgtctatctctttagctaccgttggatcacgcttgggtaccgagctagaagtcgtatcaaggttgtccattttgctgacctcaatgcgccgttaaacgatgatgagcacgcacaacttgaacgcctgctgaaatatggcccggcactcgccagccacgccccgcaaggcaaactcctgctggtgaccccgcgtcctggcaccatctctccctggtcttcgaaagcgaccgatattgcccataactgcgggctacaacag

SEQ ID NO: 17866 - DNA, 2124 bp, Homo sapiens
  SIMILAR (1423)..(2007): 971254mologous to Escherichia coli similar to Desulfurolobus ambivalens hypoth. 28.3 kDa protein in sor 3' region,accession number U00006,Smith-Waterman Score=959.
atgagggatcgacttggatccccgcagttcggtatatccggtgttcgcgcgggtggtactaatagacgcatggcgcggatgatatccatcccgcctgccagcagcagttccagcatgttatccatacgaactggagtcagagccggtttcgttgacgaacggtgcggcgtcgtgcaggtcagggataagcggtgtctggaatttataagtacgcgcacgcgcccattggcggttaccggtgatggtgttgatttcaccgttatgcgccagatagcggaacggttgcgccagcggccagcgcggtacggtgttagtggagaagcgctggtggaacaggcaaatggccgattccagacgcaggtccgcaagatcccgcactatacgcggcctgaggtgttagaagggatggaagttccgccagtgttactgtcgggcaaccatgccgagatacgtcgctggcgtttgaaacagtcgctgggccgtacctggcttagaagacctgaacttctggaaaacctggctctgactgaagagcaagcaaggttgctggcggagttcaaaacggaacacgcacaacagcaacataaacatgatgggatggccaacattattaagcaacttgaacaagagcagatgaagcaggacgtaccttccttccgtccgggtgataccgtggaagtgaaagtatgggttgttgaaggttccaaaaaacgtctgcaggcattcgagggcgtggttatcgctattcgtaaccgcggtctgcactctgcattcactgttcgtaaaatttccaacggcgaaggcgttgagcgtgtcttccagactcacctgcgttgccggattatcaataatggcattgatatggcaactgaagcgattctggcggacttgcctccggtgcgcgaaacccagggcaagccgaaaatcgcggtggtggcgcatgatctgcgttacgacggcaaaactaaccagcaactggtacgcgagatgatggcgctgggcgacaaaattgaactgcatacctttggtaagttctcgccgttcaccgctggcaacgtggttaatcacggctttgaaaccgacaaacgtaagctgatgagcgcgctcaatcagatggatgcgctggtattcagttctcgcgtcgataactacccgctgattttgtgtgaggcgctatcgattggcgtgccggtgattgccacccatagcgatgcggcgcgggaagtgttgcaaaaatccggcggtaaaaccgtcagcgaagaagaggtgctgcaactggtgcagttaagcaaaccggaaatcgcgcaggcgatatttggtaccacgctggctgagttcagccaacgcagccgcgccgcctacagtggacaacagatgctggaggaggataatatatccggatcggtaccgagcattgattgtatcatgtcaatcgactttaccgccttacgctgcattttcggcgctctcgttttattcatcgtccttttattacgtggtcgcggaatgcgcccgacaccgtttaaatacaccttagccattgccctgttacaaacctgcgggatggttggtctggcgcagtgggcgttggtcagcggaggtgcggggaaggtggcgatcctgagctataccatgccgttctgggtggtgattttcgccgcgttgtttctcggtgaacgcctgcgacgtgggcaatatttcgcgattctgattgccgctttcggcttatttttggtgttgcagccgtggcaactcgatttctcttcgatgaaaagtgccatgctggcaatcctctccggcgtcagttggggggcgagcgcgattgttgctaaacgtctgtatgcccgtcatccgcgcgtggatttattgtcgttaacatcctggcagatgctgtatgcggcgctggtgatgagtgtggtcgctttactggtgccgcaacgtgaaattgactggcagcccaccgtgttctgggcgctggcctacagtgcgattctggcgacgggtgtcccacaaatctatgctgccaaatccgaagctaacagagccaatacgcgtctgatgctctcagatgtcgtacatcgttctcacgatcggccaccgttttgtattagtataggtcggtga

SEQ ID NO: 17867 - DNA, 1710 bp, Homo sapiens; identical to SEQ ID NO: 10729
  SIMILAR (497)..(276): 351254mologous to Arabidopsis thaliana contains similarity to Gossypium hirsutum cotton fiber expressed protein 1 (GB:AF072404),accession number AF162444,Smith-Waterman Score=95.

SEQ ID NO: 17868 - DNA, 1338 bp, Homo sapiens
  SIMILAR (963)..(1106): 951254mologous to Escherichia coli ribosomal protein L12 (AA 1-179),accession number X15860,Smith-Waterman Score=237.
atgtctcggaagtgttacgcgacggtaccccgcgccgcgacgaagagattacgattaaagcaccggctattactgatcaccaccgttccggtgcgcagtaatggcgttatcatcggtgccatttcaaccttcagggacaaaactgaagtacgtaaactgatgcagcgactcgacggtctggtcaactatgctgacgcacttcgtgaacgatcccacgaatttatgaataaattgcatgtgattctcggattattgcatctgaagagttataagcagttggaagattacattctcaaaacagccaataactatcaggaagagattggctctctgctgggtaagatcaaatctccggttatcgctggttttttaatcagcaagattaaccgcgcgaccgatttaggccatacgctgattttaaacagtgaaagccagctgccagacagcggcacggctgcttgtgggcagtcgctgaacgttctttaccagcgtatagtgggcgaacgaaaactacacactggatctctcatgtctgccgcaggaaagagcaacccactggcaatcagtggcctggttgtgctcacacttatctggagttatagctggattttcatgaagcaagtcaccagttacatcggtgccttcgactttaccgccttacgctgcattttcggcgctctcgttttattcatcgtccttttattacgtggtcgcggaatgcgcccgacaccgtttaaatacaccttagccattgccctgttacaaacctgcgggatggttggtctggcgcagtgggcgttggtcagcggaggtgcggggaaggtggcgatcctgagctataccatgccgttctgggtggtgattttcgccgcgttgtttctcggtgaacgcctgcgacgtgggcaatatttcgcgattctgattgccgctttcggaatctgtaccgcaacgcaaagaaatcgcctgctgccatgtaaaaaccagccctgcaaagcgaatcagtaccagggaactggcgatgtgctaaatcagttacatattgattttagagcctttagcggtgtcatggttgctggctctaggcaaatatttgctaatgaaatttcgtcaggagcaagtaatgtaggagtagttatattttctactcaggattcggcgaatacattcaatgttcttaatgcttcaggcggatctcgttccgtttatccagtaatgtcggatgacatgaatggttcatcctggaaatttagcacccgaatgcaaaaaatcgatcctgcattgagtgttacatctggtcaacttatgagccatgtgttagtggatatttactacgaataa

SEQ ID NO: 17869 - DNA, 1500 bp, Homo sapiens
  SIMILAR (871)..(1257): 961254mologous to Escherichia coli Glutathione-dependent formaldehyde dehydrogenase (EC 1.2.1.1) (FDH) (FALDH),accession number D90701,Smith-Waterman Score=670.
atgctgctggctgacgtcggtatgttggggatgccaaacgcgggtaaatcgacctttattcgtgcggtatcggcggctaaaccgaaagtggcggattatccgtttaccactctggtgccaagtctgggtgtggtacgaatggacaacgaaaagagcttcgttgttgccgatattccaggactgattgaaggcgctgcggaaggcgcaggtctgggcattcgcttcctgaagcacctggaacgttgccgcgtcctgttgcacctcatcgatatcgatccgattgacggcaccgatccggttgaaaacgcgcgtattattatcagcgagctggacaacaattaccagccaggatctggcgacgaaaccgcgttggctgaagaagcgaaacagccagagaaagtcgaattcatgtgggatgattatcatcgccagcagcttgaagagattgctgaagaggatgatgaagactgggatgacgactgggacgaagacgacgaagaaggcgttgagttcatttacaagcccagaaagatcaaccgctatgcactgcgcggcaacccgggcgcacgcaccgagcagctgtacgacacgctatttacgacttccgatgacgaaccaggcagttattacccgctgattgctgaaagcgcacgctatgctgacgattattcctgggtggaggtcgctattaatccgcgcgcccgttttcatgatggttcgcccattactgcccgcgatagtatcctcgcgctctacgccaggcgcataatcataaacttcgatgcggcgaggacgatgaaggtaatcacaaacaggatcaggcccgacaatcagcgtggtgcgcagcaacgtactgtctgcaccgcccgcctgcgggtagaaaatgttcccgatccgggcgttgaacaggcagatgatattattctgcgtattacggcaacggcgatctgtggctctgacctccatctttatcgaggcaaaatacctcaggttaaacatggcgatatttttggtcatgaatttatgggggaagtagttgaaaccggaaaggacgtaaaaaatttgcaaaaaggcgaccgagtggtaattccgttcgtcattgcttgtggcgactgttttttctgtcgattgcaacaatatgccgcctgcgaaaatagcaatgcgggtaaaggcgctgcgctcaataaaaaacagataccagctccagcggcattgtttggttatagtcacctgtatggcggcgttcctggcagcaaaaaatgcgcagatccacaaggttcaagcgttgcagtctatggtgctggtcctgtgggattgttgacaatcgcctgtgcacggttgctcggtgcggaacagatttttgttgttgatcatcatccctaccgcttgcatttcgccgccgaccgctacggcgcgatcccgattaattttgatgaagacagcgatccggcacagtcaattattgaacaacggcaggtcaccggggcgtggatgcagtaa

SEQ ID NO: 17870 - DNA, 826 bp, Homo sapiens
  SIMILAR (561)..(728): 961254mologous to Homo sapiens KB07 protein,accession number AF064606,Smith-Waterman Score=325.
cgacccaacttttggcaagaagagctttgagcagaccttgacagtggagctctgtggcacagcaggtgagccagggggcttccactggcaggtgccttcaggaaaacacccgtgcatctctgagtttttcatcatgcatgggcaagctgaacacaacaaaaatgatgatggggaaggtatgacgccgttacgcgtttttcgtaaaacaacacctttggttaacaccattcgcctgagcctgctgccgctggccggtctctcgttttccgcttttgctgcacagatgattgtgcgcatactgctgctgtttatcgctctgttcacctttggtgtgcaggcgcaggctatcaaggaaagctatgcctttgccgtgctgggcgaaccccggtacgcgtttaatttcaaccattttgattatgtgaaccccgccgcgccaaaaggtgggcagataacgttgtcagccctcggcaccttcgataatttcaaccgctatgcactgcgcggcaacccgggcgcacgcaccgagcagctgtacgacacgctatttacgacttccgatgacgaaccaggcagttattacccgctgattgctgaaagcgcacgctatgctgacgattattcctgggtggaggtcgctattaatccgcgcgcccgttttcatgatggttcgcccattactgcccgcgatgtagagtttacttttcaaaaatttatgaccgaaggcgtgccgcaatttcgtctggtctacaaaggcaccaccgtcaaagccattgcaccgttaaccgtgcgcattgagttagctaaacatcattggggccaccaataa

SEQ ID NO: 17871 - DNA, 1968 bp, Homo sapiens
  SIMILAR (586)..(1290): 1001254mologous to Escherichia coli Tail fiber protein GP37,accession number D90774,Smith-Waterman Score=1232.
atgggcctcctcatgatgcgagatgtcccctgcggtttcaacgacccagccagacgccagccacaggctttcctgataatccacgcgcgaaatagaacagttacgcagacaggtacgcaagtatcaaacggccacagtgcgaaggtgcagcagtgcaatgccgggctgctttcgcccagggctcgtcagcggagcctgtgcttcaacatgaatgccggcttacacgaagcgagacttgaatctgtgaccgctgtttgccgagtggaacgatcatttccgcgatgctgcccgtcgtttctggatagcggtaaacaacggcgcatcctgacggaactctggcgtacggcccatgactgccgccagatcaaagcggaaaccatcgacgtggcagtcattcgcgtggttgcccgagatggtacacgctacagctacatcgtgtggatggacaccgaatcgaaattaccgatgcgggttgatctccttgatcgcgatggtgaaacgctggaacaatttcgcgtgattgcttttaacgtcaatcaggatatcagcagcagtatgcagacgctggcgaaggcaaatttgccgccgttgctttctgttcctgtaggtgaaaaagctaaattcagctggacgccaacctggttgccacagggttttagcgaagtttccagtagtcgacgtccgctaccgacgatggacaacatgcctatcgaatcacgtctctattccgacggattattcagcttctcggtaaacgttaaccgcgctacgccatcgagcaccgatcagatgttgcgcaccggacgcagaaccgtcagtacaagcgtacgtgataacgccgaaatcaccattgtcggtgaactgccgccgcaaacggcgaaacgcattgctaaactctcgtacccgaccaggcccccaggccaaatccgtctaccggtggaccagccgaataccgataagcccccgtcggctaacggctggtctgcatattgtacttttcctcttactcgacttaaccagtaccaacccagcttctcaacggatttataccatggcactttaaagccagcatcactgacaatgagcggtatggtgttactcggtagaatgctcgcaagaccagtcaacaagtacaatgggcatcgtattgcccgaacagataaagctagcatgccaacggtatacagcgagtcgctctttgtggaggttacggccaagttcggggattcatcagtgctgggcgcggaactgcagattaccaacatgttcggtaataccttcctgcacagcttcgacaaagatccgatgtttgccagcagctttattgtgcagcatgcgtcaatcatcatgtcgatttcgcagatctctgaaaccctgttcattctgaccatcccgttcttcttaagccgctacgaacgtaatgatgatcagtattgtggcgtggatcctgcgttttgcgctgtttgcttacggcgacccgactccgttcggtactgtactgctggtactgtcgatgatcggtaccgagctcgattcgtatctgtcataccggttattggtctgacgctgcttgataaaaacccgcaggcgaaagtggtgttggtcgatgaatcgccgatggcggttgcttccagccgtttgaacgttgaaaccaacatgccagaggcgttggatcgctgcgagtttatgatcaacaacgcgctctccggcgtggagcctttccgctttaatgctgtgctctgcaacccgccgtttcaccaacaacatgcgctgaccgataacgtcgcctgggagatgttccaccacgcccgccgctgcctgaaaatcaacggcgagctgtatatcgttgccaaccgtcacctggattacttccataaactgaagaagattttcggcaactgcaccactattgcgacgaataataaatttgtggtactgaaagcggtgaagctgggacgtcgtcggtaa

SEQ ID NO: 17872 - DNA, 3879 bp, Homo sapiens
  SIMILAR (1492)..(2118): 961254mologous to Escherichia coli K12 putative ATP-binding component of a transport system,accession number AE000509,Smith- Waterman Score=1026.
atgaaaaagaaaagacccgtacttcaggatgttatggagagaaatggcacgtctagtgatgaaatgtgcaacttatacattatgtattacatggaagccaagcatgcagtttctttcatgacctgtacccagaatgtagctccagatatgttcagaaccataccaccagaggccaacattccaattcccgtgaagtctgatatggttatgatgcatgaacatcataaagaaatacaaactaccatcagagaatactacaaacacccctacacaaataaactagaaaatctagaagaaatggataaattccttgacacatacactctcccaagactaaaccaggaagaagttgaatctctgaatagaccaataacaggacctgaaattgtggcaataatcaatagtttaccaaccaaaaagagtccaggaccagatggattcacagccgaattctaccagaggtataaggaggaactgagattattcgccgcccacatcattgaacagaccacaaaaagtagccgcgtatcccgcttcctgtgggtggagggtaaaatttctacgggttgggtaacgacaggaatatttctttgtattgatggcaaaaacaaccagactatcagtccgcaaacaacaaatgcgatggcagcgcgcgattccagaactggtcatacattgccgtatgcgacgcttgccgcgtcttatccggcctggatgtacgtgctgtacgtaggccggataaggcgtttacgccgcatccggcaacagtgccaactgcctgatgcgacgcttgcgcgtcttatcaggcctacaaattcccgcaccatccgtaggccgataaggcgttacccgcatccgcaacagttgaaaagctggagaaaatgccgcatcaccgacgataccgccgagaatcgccactgcgttcagaccgatttggaccacggtaaagaacatgccgggattttcctgcatattcagaacgcgttgggcatttatattgccttcatcagccaccagtttaagtttgattttgcgccagatcctcggaaggggaagttgattaatttgtgtgaaatacacattgaaagccgattcgaagaaagtgaaccggcatttctcagtggcatagtactacgccgtcatatgacagacgccaattccgccaattccaaaatgcatgcagctgccttaccccaccacgtgctaagggcaggagttgagtcagctgtggcctgccctgggggctggggtccttggggagaacacgggcatgttgatttggacactcattcagcaaacatctacgaagcacctgctgtagaatgcactggacgttgccaatccgtacaacaggtgatagtgaacgccaagagaggccccctttgtcctcacggaccttctcttgtaggagcaggaagagtgaggaaaacttttaacagctcccagcagatgcccgtatgtctcattgagcctgtgttcgcttctaaactgatccctgttagagcgatcttcggatcaatcggtccgatcgtgcagggtaaatcgaccctgttccgtatgatctctgctcaggaacagccggacagcggcaccatcactttgggtgaaacggtgaaactggcgtcggttgatcagttccgtgactcaatggataacagcaaaaccgtttgggaagaagtttccggcgggctggatatcatgaagatcggcaacaccgagatgccaagccgcgcctacgttggccgctttaactttaaaggggttgatcagggtaaacgcgttggtgaactctccggtggtgagcgcggtcgtctgcatctggcgaagctgctgcaggttggcggcaacatgctgctgctcgacgaaccaaccaacgacctggatatcgaaaccctgcgcgcgctggaaaacgccctgctggagttcccgggctgtgcgatggttatctcgcacgaccgttggttcctcgaccgtatcgccacgcacattctggattaccaggatgaaggtaaagttgagttcttcgaaggtaactttaccgagtacgaagagtacaagaaacgcacgctgggcgcagacgcgctggagccgaagcgtatcaagtacaagcgtattgcgaacttcagcaccaagttactttttgtcgacctgcttaagaatgcctacctatacgatctccatttaccgttgttaaacctgatgctgacgccagatgagcgcgaagcgttggggactcgcgtgcgtattgtcgaagagctgttgcgcggcgaaatgagccagcgtgagttaaaaaatgaactcggcgcaggcatcgcgacgattacgcgtggatctaacagcctgaaagccgcgcccgtcgagctgcgccagtggctggaagagaatcaccgcaggcaacggcaaagtagccgaacgcgcctcgccgcgctggctggcgttttcaatcaccacccaactgaaagtgctgtcaccatcgatgccagcttcaatcgccacccaggtgaggagacgaggcaaagccgatacgaggacgaaggagaagacacccgagagcgaggagtgatattatctgtacatggggagccaaagcagcaatctccagcaaagtcgcgcgttattcagtttttccagcagggctttgttatccggacgtacagcgatgcccaggccggtgccaaaatattgcggatcggtcactttctcagtagcaacaccaagttgtggattggttttcagccattcgtttaccaccgctgtgtcaccaaataccccatcaatacgaccatttttcagatcgataaaggcattctgataactgtcataagagacagttttcacttccgggtgctgatcctgaatatatttctggccagtacagggggtcacttcctgtctcgtattacctgtcgggtccagtactttctcagcaaatccttgcgtatttctgggagttttctgtggtcgaaaagggcacggttgttcagcttctgcggaggtggattacccgcgtatggaccactccgggttatttggctttggatgctgctggatctgcgttcatgtctgccggcaccgatgtcttctcgtggatccggtcaccgttgtttcggtgattcccagccggccaccgttgttctgcgcaccagacgctggaaactgttcctgatcccggaagagtattcgccgccgcaggtgctggttgataccgatcggttccttgagatgaatcgtcaacgctcccttgatgatggctttatgcacgcagtgtttaacccgtcatttaacgctctggcaaccgcaatggcgaccgcgcgtcaccgcgccagtaaggtgctggaaatcgcccgtgaccgccacgttgaacaggcgctgaacgagacgccagagaagctgaatcgcgatcgtcgcctggtgctgctaagcgatccggtgacgatggcccgtctgcatttccgtgtctggaattccccggagagatattcttcatgggtgagttattacgaagggataaagctcaatccactggcattgcgtaaaccggatgcggcttcgcaataaaaacgtagttgcctgatgcgctacgcttatcaggcctacatcgttcctgcaatttattgattttgcaagactttgtgggtcggataaggcgttcacgccgcatccggcaaaaacaacgagccaataaaaataccggcgttatgccggtatttttttacgaaagaggtatcaaatgcgtttaattgtggtgagcatcatggtgaccttgctgagtggctgtggcagcattattagtcgcactataccggggcaggggcatggcaaccaatattatcccggtgtgcaatgggatgtgcgtgactccgcctggcgttatgtcac

SEQ ID NO: 17873 - DNA, 2055 bp, Homo sapiens
  SIMILAR (1525)..(2001): 981254mologous to Escherichia coli Cys regulon transcriptional activator,accession number D90837,Smith-Waterman Score=796.
  misc_feature (1)...(2055): n = a,t,c or g
atgcaatgcaaaggagtcacgggagacggtctaacccatccacttaagagagaatttcccaccattagtctaagagttagggtgaaaaaaaggtcgactctagaggatcccccgtggtggatctgcgtttcctgttctggctggcaccgattgtcttctcgttgatcctgtcaccgtttgtttcggtgatttccagccgtgccaccgttggtctgcgcaccaaacgctggaaactgttcctgatcccggaagagtattcgccgccgcaggtgctggttgataccgatcggttccttgagatgaatcgtcaacgctcccttgatgatggctttatgcacgcagtgtttaacccgtcatttaacgctctggcaaccgcaatggcgaccgcgcgtcaccgcgccagtaaggtgctggaaatcgcccgtgaccgccacgttgaacaggcgctgaacgagacgccagagaagctgaatcgcgatcgtcgcctggtgctgctaagcgatccggtgacgatggcccgtctgcatttccgtgtctggaattccccggagagatattcttcatggttgcctgatgcgctacgcttatcaggcctacatcgttcctgcaatttattgattttgcaagactttgtgggtcggataaggcgttcacgccgcatccggcaaaaacaacgagccaataaaaataccggcgttatgccgtcactaagagtaaaagccaaagtccttaaaaagaacagcctgggtgtggtgctgatcaaagtgccgaaaacactggcattgctggaacagcaactgcgtgcgctgcgcaaagtggtcacgtcggatacacgtattattgccggtgccaaggcccgtgacattcacacttccacgctggaactgttcgaaaaagtgctcggcccaaccaccaccacgctggcatggaaaaaagcgcgcctgattaattgcactttcaatgaaccgcagctggccgatgcgccgcagaccgttagctggaagctggaaggtactgactggactatccacaaccatgcgaaggtcttcttcccgtaccgggcttgagatcggcgcgcgcttctttatgcaacatctgccagagaatctcgaaggggagattgtcgatctcggttgcggtaatggcgttattggtctgacgctgcttgataaaaacccgcaagcgaaagtggtgtttgtcgatgaatcgccgatggcgggtgcttccagccgtttgaacgttgaaaccaacatgccagaggcgttggatcgctgcgagtttatgatcaacaacgcgctctccggcgtggagcctttccgctttaatgctgtgctctgcaacccgccgtttcaccaacaacatgcgctgaccgataacgtcgcctgggagatgttccaccacgcccgccgctgcctgaaaatcaacggcgagctgtatatcgttgccaaccgtcacctggattacttccataaactgaagaagattccgcagggaccctatggacgctatacttggggntaccgtgaacttggcatcgaaatatttgttcgacgaggtaagcgactgctgggcatgactgaaccgggcaaagcattactggtcattgcagaacgtattctgaatgaagccagtaatgttcgtcggcttgcagacctgtttaccaacgatacgtctggcgttctcactattgcaacgacgcatactcaggcacgttatagcttgccagaggtcattaaagcttttcgcgaacttttcccggaggttcggctcgagctaatccaggggacgccacaggaaattgcgacattgttgcaaaatggcgaagctgatattggtatcgccagcgagcgtttgagtaatgacccgcagctcgtcgccttcccgtggtttcgttggcaccatagtttgcttgttccacacgatcatcccttgacgcaaatttcaccattgacgctggagtcaatagcgaagtggctcaaaatcacttaccgacaggggattaagcaagttttaggattgtggtatgtcaaatcattttcacaaaataacctttga

SEQ ID NO: 17874 - DNA, 351 bp, Homo sapiens
  SIMILAR (172)..(342): 981254mologous to Escherichia coli choline dehydrogenase,accession number M77738,Smith-Waterman Score=305.
atgtcgattgacgtggtcgatcgcgagttgtgtttgggattctggaaagggaacatggtagtctaccgagttcgtggagttgctgtggacagaggaaagaggctttccaacaagggtgtctcacttactcagccggcagctctcaaccccttatgggagagtaagcgcgcagatccgaatacctccgtgctgctgcttgaagcgggcggcccggactatcgctttgacttccgcacccagatgcccgctgccctggcattcccgctacagggtaaacgctacaactgggcctatgaaacggaacctgaaccgtttatgaataaccgccgcatggagtgggggacgcggtaa

SEQ ID NO: 17875 - DNA, 894 bp, Homo sapiens
  SIMILAR (355)..(891): 971254mologous to Escherichia coli glycogen synthase,accession number U18997,Smith-Waterman Score=948.
atgacccagcattttgacattcgcaccgtccaacgtaccgatagtcagcgcaccgttaagcgcaaactttatgttactggtgccggaagcttccgtccctgccaaaaaaatctgttaaaacagatctgccgccggaatgatcaactgcgccaggctaacgctgtagttcgggatgaacacgactttcagcttattgccaatctggggatcggtggtgaacactttcgctacgtgattgaacaaaagaataatgtgcttcgccatgtaataggcccaaaccgcctttcccgcaaaaatatttacgcgcggggggcgagaaaaccaatgtgcccccccaaaaaaaaaagcacccgcccgtatcacgataccaacttatttgcctataccgacaacgtattgcgttttgcgctgctggggtgggttggggcagaaatggccagcgggcttgacccattctggcgtcctgatgtggtgcatgcgcacgactggcatgcaggccttgcgcctgcgtatctggcggcgcgcgggcgtccggcgaagtcggtgtttactgtgcacaacctggcctatcaaggcatgttttatgcacatcacatgaatgacatccaattgccatggtcattctttaatattcatgggctggaattcaacggacaaatctcttttctgaaggccggtctgtactatgccgatcacattacggcggtcagtccaacctacgctcgcgagatcaccgaaccgcagtttgcctacggtatggaaggtctgttgcaacagcgtcaccgtgaaaggcgtcttttcggcgtactgaacggcgtggacgagaaaatctggagtccagagacggacttactgttggcctcgcgttacacccccgatacgttggaagaataa

SEQ ID NO: 17876 - DNA, 679 bp, Homo sapiens
  SIMILAR (1)..(612): 961254mologous to Escherichia coli 'ferrichrome-iron receptor precursor',accession number D26562,Smith-Waterman Score=1045.
ctcggtacccgtggcgcatacaacacctatgaccacctgatcattcgcggctttgcggcagaacgccaaagccagaataactatctgaatggcctgaagttgcagggcaacttctataacgatgcggtcattgacccgtatatgctggaacgcgctgaaattatgcgtggcccggtttccgtgctttacggtaaaagcaatcctggcggcctgttgaatatggtcagcaagcgtccgaccaccgaaccgctgaaagaagttcagtttaaagccggtactgacagcctgttccagactggttttgactttagcgattcgttggatgatgacggtgtttactcttatcgcctgaccggtcttgcgcgttctgccaatgcccagcagaaagggtcagaagagcagcgttatgctattgcaccggcgttcacctggcgtccggatgataaaaccaattttaccttcctttcttacttccagaacgagccggataccggttattacggctggttgccgaaagagggaaccgttgagccgctgccgaacggtaagcgtttgccgacagactttaatgatagggcgaagaacaacgcctattctcgtaatgagaagatgaacgaaccggaaaccgggtattacggctggttgccgaaagacggaaccgttgaaccgctgccgaacg

SEQ ID NO: 17877 - DNA, 2505 bp, Homo sapiens
  SIMILAR (145)..(477): 791254mologous to synthetic construct InsB peptide,accession number Z37515,Smith-Waterman Score=459.
atgaggccattagagaggtctctaatccaatcctcacaggaggaaatttggacacacagagaagctgtccctcctgttcagctactgacggggtggtgcgtaacggcaaaagcaccgccggacatcagcgctatctctgctctcactgccgtaaaacatggcaactgcagttcacttacaccgcttctcaacccgccgggcagtgacgtcatcgtctgcgcggaaatggacgaacagtggggctatgtcggggctaaatcgcgccagcgctggctgttttacgcgtatgacagtctccggaagacggttgttgcgcacgtattcggtgaacgcactatggcgacgctggggcgtcttatgagcctgctgtcaccctttgacgtggtgatatggatgacggatggctggccgctgtatgaatcccgcctgaagggaaagctgcacgcaattttggttacatttgaggaaaaatttcaagaagaacctgtgaagaaacaaatcatcatggttagcatttcggtttctgacacgggagggaaaaaagagaagccaaagttgatcaacctttcgtccaagacaaatggcttacagaacaccactgaagcccagctgtgtgaaacaaaatctgattttgagctctccttttccgggttcaatcctatatccatagacactgaagacatgaaaactggctgctgctttcaagaacagtcagttagaagggcatatttcaaagctacttcaagccccaggagagggctgattatcactaaactgacaacaagagtggatggttatgtggcagatgatccttcccgcagatattcaggacacggagacttgctctggcccaatgcaggaaacagctgtgtggaaacaactgtgggttcccttctgtgtgaagttcaagctgctcccaccccacacacactggagggtaaacatggctgtcgaaataaggaaaagaaaagattaacccattcaggggcatgcacctacaccttctcagagttgggcttggaactgtgggcttggaactgtgggaaaactgaagtgaatctgggtgcagtaggaaaaggagttggtggagatagaggcttcaagaaaatacatgccaaaagccagttcacttgctcagttctttacacttttacaataaaacagggtatttctctgactttgtggtctaaagtcatgcatattttggagcacctaaaagaaaacagcaaacagcttacttctatttgtaccaggtatcagagagtatttggtcccacctggttgcatgaaacaatcttttgcaaagtggcccttacagccacacttcttgcagaacttgaaaagacatccacactgcagacgtttctggataagatatggatccttggggcccagcaacatacagggtcacaagaaccctcccaagctctgctgacttgtgaccctgcctggaaaaaagcactgaggaaggtcacacagaaaggtggagcattctttggagtcgataacttgggttctagtctcagtcctactactgatttattgtatgaagagcagagacttacttccctctctggatcttggttccccatctgtgtaatggtggagttgactctaagggcaggatcgtctccggggggcaggctctatgtagagttcgaccaagctgtcaccaaagaacctcgttttttgcaatacaaacattactgggatggggcagtagctggatccagcatcttacggcaagattcatttgtcgcggaggcttctactaccattacgcgtatcgagtctcctagcgttccatctcgttcaagtacctttcttgatgatttctccatcacacagcagcaccgccgccacgccggcttgtctgtcatgctgtccctgataatcagcccgcctgttcgcgggctgtgtcaggagcgcacgctgcggcgtgattttcgtgaacgactgatgtatctggacctggagtatcagtccggatactgccgcttacgcactgctggcagtgagatgcagatggtgcccgacgtgcttatctttgcccaccgcagcgggctggccgggctttttcccggccttgaccgccgtctggtgaatgcactgctgatgtgcgatgagtctccctgcgtgatagcaccagccaatccggttccttcgccttcaggagcattgtctttctggagactgattcaggccattaccgggcgcaggcgggtgacgctgattgcagaggggcgacgctgtgagcgcctagctccctgccggttactcatccaccagcagacctggtatctggtggctgaacacgaagggcatatcgccgtattcacacttgatgaaatccatctgattcagcctttgcaggagacttttcgccgcaatgacagtctgtgtcgcctggttgaagacccggtcttcattcaggccttaccccattttcgctttatccagcattcactgcttacgtttgttccggccgacagcccaccggaatag

SEQ ID NO: 17878 - DNA, 1242 bp, Homo sapiens
  SIMILAR (236)..(3): 971254mologous to Homo sapiens Human PRO1780 (UNQ842) amino acid sequence SEQ ID NO:282,accession number Y99419,Smith-Waterman Score=412.
tcactctgaggaagccagtccacaattttcacatttgcagccaggtggacatctttgggccaatgagaacactgacacttccatatcaccccttggggtaggtgagcaaaggcattgttcatctccttgaagatttccggattctgacaggtgttcaccatggagcccaaggtcacaaggacaaaaccagagtccccaaacttggcaatgaagttctccaagtcgatactgggtacgaccatctgcaccaacaaaggccgtcaggtagtagagattcaccggaatcgactgccgaatattgacgtaacgtgtatcaccctgcttcagcgcatcagaaatacgtttgtcattccagcctgcatcctgatcctgactggctaccacaccggctttgctggtatcgacctgaggtccattaagcaaactctggttttcacgttttggacgcgactcctgttccgggatgttttccaacagcaccatcagcaactggcgttcgatctcctgaatgacatccatcatccgcttaatgacctgcggagatcctgaaaatccggccactggtgggctcaaggtttgggagcacctgatgatgctggtggccagggctgcagacttgtacctgtttgcagaaacagaagggtggaagcagcattcaatgacagctatcagcagcttaggcttgacacaaaaggaaccaatttttaacatttgtgccggttgtggccggccttccaaccttggtcccccggccttttttcccaaaggttccgggtgcacaaaacaccttggttccggttggcgccaaggctttggcaattttaaatttggacctttctggggcccaaactggccccaggggcagttttttcccccccccttgtgaaaggcgtcccccttccgctgtggggcggtcttccctgggtttcccgaaaccccgttgcggcgttttcccggggataaccttgttgcggccgttttcttcccattcttttttaaaaccttgggggaagcggaaaggttaggttctccgggggaaaccaaaggataagagggggtttggcccatggccaagccaaccccaaatgccccattggaaggccttggaaaggccagggggcaaggcatcgcctcacccaggaagcgcaaggggtcaggggaattccctttctcattgccagcacagcagtctgagaccaaactgcaaagcagcagcgaggctgggggagggatgcccaccat

SEQ ID NO: 17879 - DNA, 1728 bp, Homo sapiens; identical to SEQ ID NO: 17850
  SIMILAR (1177)..(1641): 991254mologous to Escherichia coli 'ferrichrome-iron receptor precursor',accession number D26562,Smith-Waterman Score=840.

SEQ ID NO: 17880 - DNA, 520 bp, Homo sapiens
  SIMILAR (250)..(366): 1001254mologous to Escherichia coli ribosomal protein S4 (aa 1-206),accession number X02543,Smith-Waterman Score=199.
atgagcatcaagcgcctgatggatcttggttgctatcgcgtttgcgtcatcgtcgtggtctcccggttcgcggtcagcgtaccaagaccacgcacgtacccgccgcgaatctactatcgtgctctgaacgccgcaggtttccgcatcactaacattactgatgtgctccgatccctcataacggttgtcgtccgccgaaaaaacgtcgcgtataacgcctcgttttccaggtttgttggagaagagaaaatggcaagatatttgggtcctaagctcaagctgagccgtcgtgagggcaccgacttattccttaagtctggcgttcgcgcgatcgataccaagtgtaaaattgaacaagctcctggcagcacgctggaatgagggcctggttcccacacgtcattcacagtctgggcggctactgaactacatcccacgagaccacacactaagcatcacgcacaagggacagtgcagcactctgagcaatccatggagattcccatccacaaatacctga

SEQ ID NO: 17881 - DNA, 682 bp, Homo sapiens
  SIMILAR (214)..(2): 981254mologous to Escherichia coli glycerol-3-phosphate dehydrogenase subunit B,accession number M20938,Smith-Waterman Score=379.
cctggcgcacaaactggcgctgtaactggttttgcagacgaatgcccagcacggaaggcggcagcgttggcaaaagcatcagtgaacaaggtagtttttcattcaaccaacgccacagtttgtcatcggccagaccgaagcaggcgggcatcaggatcatttcgcaggtattggcgacaggaataagcgcatcaagtaacagcggccagttttgccagaagaaagagagctgcttttcgatcagcttttcgaagatgtcatatttttgctgatcgtagcgagccacgttgaccggctgaccaaagaacatcggttctttgagctgatcatttttcgtctgtgaaaaggtggtatatgccatgagtgtgtcctgttgggagtttaatgccggataaggcattttacgccgcatcctgtgcctgatgcgacgctggcgcgtcttatcaggcctacaaatccgagccgtaggccggataaggcgttcacgctgcatccggcacccggagcctgatgcgacgctggcgcgtcttatcaggcatgcgccgctttcgcagccatcgtcctggattgacggcaccagatcgtcttgtgcgtcttcagcgccgtcacgggtgttctgataatacagtgttttgaccccgaatttgtaggcggtgagcaggtctttcagcaactgctgcat

SEQ ID NO: 17882 - DNA, 1157 bp, Homo sapiens
  SIMILAR (426)..(1040): 971254mologous to Escherichia coli K12 putative galactokinase (EC 2.7.1.6),accession number AE000295,Smith-Waterman Score=1026.
cagttcagattacagactacatccacttctacggttatcgcccggttaaatctttcgctattcgcattcctgccagttacaccattcacggaatagatgtttcgcgctggcaggagcggatcgactggcagcgggtggcaataatgcgcgacaatggtatccgcttacagtttgcttttattaaggcgacggaaggcgaaaagctggtggacccctatttttcgcgtaactggcaactaagccgcgaaaatggcctgctgcgtggggcgtatcattatttctccccgtcggtatccgcttcagttcatgcgagattatttctgcaaacggtggatttctcacaaaggcgatttcttgccgtgctggacgtagaagaacgggggagaattatcggcaaaagaatttacgcaagctggcagcaatacaatcgtggcgacagcgccatcctgcgcggcttacttgatgccatcaacattctcaatccacacgccgaagtggatgtgatgagccgctatccggtcagttcttcctggctgctcaaccgcccggtaatgggcgatccgctgttcctgcaaatgaaacaacacaacagcgcggcgggcgttgtcgggcgcgttaaaaaagtcctccgtcgccgctaccagcatcaggtattgctctcacgcgtcaccgacactggcaagctgcgcaatatcgccatcgcccagggattcaccgacttcgtgcgcctgctgtcaggttacgacgccattatccaggtcggcggatcgttttttgtcgatctctatggcgtgccgcagtttgaacatgcactttgcacgtttatggcgaaaaagccgctgtttatgattggtcacagtgttggcccgttccaggatgagcaatttaaccaactggcgaactacgtttttggtcactgcgacgcgctgatcctgcgcgaatcggtcagctttgatctgatgaaacgcagcaatatcaccaccgcaaaagtggaacatggcgtcgataccgcgtggctggctttggcaaaccacgccacgggcgcaaagctggataaacgcatcaccgccagcatcgtgccccacaaaataccaatcactaccgccgtgacggtgattttcagggtgatcaccagcccgtcgagcagatatggcagg

SEQ ID NO: 17883 - DNA, 696 bp, Homo sapiens
  SIMILAR (202)..(312): 1001254mologous to Escherichia coli K12 putative galactokinase (EC 2.7.1.6),accession number AE000295,Smith-Waterman Score=195.
ggttatgttccggtttgtaggcctgataagacgcacagcgtcgcactcaggcaacggctgtcggatgcggcgtaaacgccttatccgacctacggttatgttccgcttgtaggcctgataagacgcacagcgtcgcgtcaggcaacggttgccggatgcggcgtaaaacgccttatccgacctacggttctgtgctcgggacttgatgccatcaacattctcaatccacacgccgaagtggatgtgatgagccgctatccggtcagttcttcctggctgctcaaccgcccggtaatgggcgatccgctgttccagaatggtgtgtttgccgtagcgagtgaaaaagccgtccatactgtcaagcacggttttgccggttaatttttccaccacttcgcggcccatcactctggcgataaaaaagcaaagcgccgcgccggccatcgaactggtccacgacagcaagccgccccagaacgcgccaaacagcgacgcattggcaaaggtgatcaaaaacgcaggtagcggtgcagcaatggcctgcaaaatcatcaacaagaacgagacaactgccgccagtgcgccgtaagactgaataaagcgttctataccctgttggtccacgcgggcaaacgccgcaacgctgcgattgataaactcatggacgccgggaagcagcgcccatgccagcagcat

SEQ ID NO: 17884 - DNA, 3824 bp, Homo sapiens
  SIMILAR (2676)..(3386): 871254mologous to Escherichia coli K12 putative ligase,accession number AE000494,Smith-Waterman Score=1056.
tcacagcgcgttaacgctcatcaggcagagatacagtttttcattcagctcgcgcaggctaacggtcacagttttaccgttaacggtgtgggtaccttcgcccagcagatgccagtagctggtcatttcgatcagctcatcgtaatagctggagatcccttccgcacgtttctggatctgctcgttggtgacgatatcgtcaaacacaacagacggttcgttaacgatattacgaatgatatgagtataggaacgggaatgaatcgtttctgagaacgcccaggtttcgacccaggtttccagttccggaatagaaataagcggcaatagcgccacgttcgggctacgaccctgaatggaatccagcagcgtctgatatttcaggttgctgataaagatgtgtttttcgtgctccggcagcgcctggtaatctatacggtcgcgggagacgtcaacttcttccggacgccagaagaaagagagctgcttttcgatcagcttttcgaagatgtcatatttttgctgatcgtagcgagccacgttgaccggctgaccaaagaacatcggttctttgagctgatcatttttcgtctgtgaaaaggtggtatatgccatgagtgtgtcctgttgggagtttaatgccggataaggcattttacgccgcatcctgtgcctgatgcgacgctggcgcgtcttatcaggcctacaaatccgagccgtagccaggataaggcgttcacgctgcatccggcacccggagcctgatgcgacgctggcgcgtcttatcaggcatgcgccgctttcgcagccatcgtcctggattgacggcaccagatcgtcttgtgcgtcttcagcgccgtcacgggtgttctgataatacagtgttttgaccccgaatttgtaagcggtgagcaggtctttcagcaactgctgaatcggcacttttcctgacgggaagcgtgacggatcatactgggtgtttgcaaaaatcgactgatcgataaatttctgcatgaaactcaccagttgcaggtaaccacggttaccgtaatttcccaaagtactcataaggttcttgcaagtgctcgaaatctgacaaaactggcggaaaataacggttttgaaccttgaatcatcaagttctgcctgtctgcgaagcagcgcccatacccgacgataaccatacgttggcagctctccgataacatggtgtatacggagaagcacatccgtatcatcagtgtgacgactgcggcggccatccatccagtcatcggttcgtctgagaatgacgtgcaatccccatccccgggcaataagggcgcgtgcgctatccacttttttgcccgtccatattcaacggcttctttgaggagttcattttccatcgttttcttgccgagcaggcgctggagttctttaatctgcttcatggcggcagcaagttcagaggcaggaacaacctgttctccggcggcgacagcagtaagacttccttcctggtattgcttacgccagagaaataactggctggctgctacaccatgttgccgggcaacgagggagaccgtcatccccggttcaaagctctgctgaacaattgcgatcttttccttgatgccatcaacattctcaatccacacgccgaagtggatgtgatgagccgctatccggtcagttcttcctggctgctcaaccgcccggtaatgggcgatccgctgttcgacgccattatccaggtcggcggatcgttttttgtcgatctctatggcgtgccgcagtttgaacatgcactttgcacgtttatggcgaaaaagccgctgtttatgattggtcacagtgttggcccgttccaggatgagcaatttaaccaactggcgaactacgtttttggtcactgcgacgcgctgatcctgcgcgaatcggtcctctttgaacgcctgagacatgcagtaccgccagcattgcccccccacccccaacatggcacatgtatacatatgtaacaaacctgcatgttgtgctttgaatttgatcaggatggagttagcgatacctttttcgataccttctttcaggatcttggtgttggttacgaacaggtcgtcaccaaccagctggattttgtcgcccagaactttggtctggtatgcgaaaccgtcccagtcagattcgtccagaccgtcttcgatagaaacgatcgggtactgtttggtcagttcttccaggaagtgagtgaattcttcagaggtgaacgctttgttgccttcgccagccagaacgtatttaccatctttgtagaattcagaagctgcgcagtccatcgccaaagtgatgtctttgcccagttcataaccagcagctttaacagcttcagcgataacagccagagcttcagcgttggaacccaggttcggcgcatagccaccttcgtcaccaacagcagtgttcatgcctttcgctttcagaacttttgccaggtgatggaaaacttcagaacccatgcggatggcttctttcacagttttcgcgccaaccggctgaatcatgaattcctggatatcaacgttgttgtcagcgttctcaccaccgttcatgatgttgatcatcggaacagagttgagaggcaagggattgagctgattcaggggtacgatgccagccagctcgagccgcagccggatctggtgattattggcaacgccatgacccgtggaaatccgtgtgtggaagcggtactggagaaaaatatccttttttttatcgaatcggatgagtatgactgcgcctttttcgacaaacgctctaaatttgttcattactgcccgcgtacgctgatcctcaacaaccttgagttcgatcacgccgatatctttgacgacctgaaagcgatccagaaacagttccaccatctggtgcgtatcgttccggggcagggccgtattatctggccggaaaatgacatcaacctgaaacagaccatggcgatgggctgctggagcgagcaggagctggtgggtgagcagggtcactggcaggcgaaaaagctgaccaccgatgcttccgaatgggaagttttgctggatggcgaaaaagtgggcgaagtgaaatggtcgctggtaggcgaacataatatgcacaatggcctgatggcgattgcagcggctcgccatgttggtgtagcgccggcagatgccgctaacgcgctgggttcgtttattaatgctcgtcgccgtctggagttgcgtggtgaagcgaatggcgtcacggtatatgacgattttgcccatcacccgacggcgattctggcaacgctggcggctctgcgtggcaaggccggtggtacggcgcttttggaaattgagagcaatgtgtgtatcacgggctgtaactactactccggtggtaatattcagttcacccgtgcctaattggatttgcccatatatttccagacatctgttatcacttaacccattacaagcccgctgccgcagatattcccgtggcgagcgataacccagcgcactatgcggatgccattcgttataatgctcgaacgcctctgcaaggttctttgctgccgttaacccgtctggtttgggcatgatactgatgtagtcacgctttatcgttttaacgaagctctctgctattccgttactctccgggctccgcaccgccgtgttcttcggctcgagtcccaacatccgggcgaactggcgtgtttcattagcccggtagcatgaaccattatccgtcagccactccactgggcacgacggaagatcggtgccgaagcggcattccaccgctcccagcat

SEQ ID NO: 17885 - DNA, 1312 bp, Homo sapiens
  SIMILAR (746)..(904): 1001254mologous to Escherichia coli K12 putative galactokinase (EC 2.7.1.6),accession number AE000295,Smith-Waterman Score=277.
atgcggaacacctgcaccgcacgacgcctcgcccgaccaccggctgcaacagcacaacagaagagattccccaaaccgatgtccgcagcggaagatcccgccggcggcaccagcccacgggccacaccgcacacagcatcagaaacggaggagccacacacaaccgccagattctacgaagagcagcccccatatccagtagacatgaaattatacacccccttatcctccctcatcaccatccatcagtccggtcacaatctccctacatccatccatgctccctccaatcgaaagggcattgatcctcgtgaaaattgccatccgttccgctgattttaacgcaattgatgaacctggcgtttattggtccgttgaaacatgccgggctgtcactttctattggtctggcggcgtgtctgaatgcttcgctgctttactggcagttgcatcgttaagcacagcggacatctggtcgaggatctctgcaagacgtgtcatacgatcagttactctgcaagtcttgctgcgcttcgttgatcagcgcatcggcaattttgccggggtccatttttagttcaccgttacgaatcgccagtttaaggaccgagcagggaaattaagtaaatgtgaatttttctccgtgcgatctgaaaacgagtcatacctcaaaacttcttttgcaaaaagcggcaacgaacaatacttacgcagcctcacctggcatcaaatttatgaggaaaaaatgaaattacttattctgggcaaccacacttgcggcaatcgtggcgacagcgccatcctgcgcggcttacttgatgccatcaacattctcaatccacacgccgaagtggatgtgatgagccgctatccggtcagttcttcctggctgctcaaccgcccgcatcaggtattgctctcacgcgtcaccgacactggcaagctgcgcaatatcgccatcgcccagggattcaccgacttcgtgcgcctgctgtcaggttacgacgccaatatcgcagggtcgattcgacaattcaaaggactcccggggtgccggatgcagcgtgaacgcctaatccggcctacggctcaggatttaccggtcaacgtggctcgctacgatcagcaaaatatgaatcttcgaaaagctgatcgaaaagcagctcttctttcttctggcgtccggaagaagttgacgtcttcccgcgaccgtatagattaccaggcgctgccggagcacgaaaaacacatctttatcagcaacctgaaatatcagacgctgctggattccattcagggtcgtagcccgaac

SEQ ID NO: 17886 - DNA, 1761 bp, Homo sapiens
  SIMILAR (1090)..(1743): 991254mologous to Escherichia coli alpha-amylase precursor,accession number X58994,Smith-Waterman Score=1174.
atgtcggtgcacagattcgccaggcacaatgaaacactggaagaggtgctccgctcctctggcgatcccgccgatcagaaatatgttgagctgaaagcgcgtgcagaaaaagcgctggatgatgtgaaaaaacggaagctgtattgctggagacggcggcagatctgcgctttgcgccggataagtcgctcgccatatcccgggcaccaactcgagtgcatcgctagcttcgtgaggtggttcaacctcgttgttgaaagagtttcatccagttcattgactttagcttcgcgtagtaaatcagagacaaaaacagagtctttcttcgagagtcttggcggcggttatttactactgcaaatgatcaaccgcatcgccctgcccgccggattatatccattgctggcattaagtggcggtattctgattttctcattaactactgcgctggaagggcggtattctaaagagaaactggatcggtggttgaaagatggcatcaccacgccgggtggaaaactcccttcagaaagagagctgggagaactgctgggcattaaacgtatgacgctgcgccaggcgttgttgaacctcgaggcagaatccaaaatcttccgtaaggatcgccccttccgcaacttcatatcaacgatatcggccagaccttccacgaacggctgcaccccgacgcctgccgtttccaatgccatcctggttcacaataaaaaaggtggcccgctggcagacggtatcgtgattacaccgtcccataacccgccggaagatggtggaatcaaatacaatccgccaaatggtggcccggctgataccaacgtcactaaagtggtggaagacagggccaacgcactgctggccgatggcctgaaaggcgtgaagcgtatctccctcgacgaagcgatggcatccggtcatttgtgcaggtcactctttctatatcttcgagcagggctgtccggacatcaggcacagcagctgcacttctctgatgcccctttgcagatgcagccctgggcacacttggcacagctcatggggcagcaggagcagcagcctggggaagaagggagacgtaatccaatggatacccacgccaaagccattgacggctatacgccgcgcgattacttaacccactggttaagtcagtgggtccgcgactatgggattgatggttttcgggtcgataccgccaaacatgttgagttgcccgcctggcagcaactgaaaaccgaagccagcgccgcgcttcgcgaatggaaaaaagctaaccccgacaaagcattagatgacaaacctttctggatgaccggtgaagcctggggccacggcgtgatgcaaagtgactactatcgccacggcttcgatgcgatgatcaatttcgattatcaggagcaggcggcgaaagcagtcgactgtctggcgcagatggatacgacctggcagcaaatggcggagaaattgcagggtttcaacgtgttgagctacctctcgtcgcatgatacccgcctgttccgtgaagggggcgacaaagcagcagagttattactattagcgccaggcgcggtacaaatcttttatggtgatgaatcctcgcgtccgttcggtcctacaggttctgatccgctgcaaggtacacgttcggatatgaactggcaggatgttagcggtaaatctgccgccagcgtcgcgcactggcagaaaatcagccagttccgcgcccgctgtttccccagcccctga

SEQ ID NO: 17887 - DNA, 2511 bp, Homo sapiens
  SIMILAR (1213)..(1839): 911254mologous to Escherichia coli Phosphoglucomutase (EC 5.4.2.2) (glucose phosphomutase) (pgm),accession number D90708,Smith-Waterman Score=977.
  misc_feature (1)...(2511): n = a,t,c or g
atggtgaaaccccggacaccaaataaacaaccgcccgcccacaaacaaacggggggttccaaaaacccagaggccccccccccccccccaaagaaggaccgaccccaagaaccgagcgaccgcaccaacgcaacaacccacgaacagagagaaagcgccaaaaagagggagccaacgaacccaacaaagacgcagcgcaaaaaaggaaacaaggacccagcgacccaacaccgaagacaggaaacaagaaaagaaccaccaaacgcaagcaagaaaaccgaaacggacaaccagaaaagacccacggcaaagcgcggaaacgcaagcagcggcccaccgacccaaggacaaaccgaaggcacgcacccaccaaagcgcggagaggagggcagaaacacacagggagcccggcacaaggaaaggggaacgaaagaaaccaccgcaaaacaggccagcaccaaagaaccaaaggacagaaaaggccccaccgggcaggagaccgaggaacggccaggaaggcgcaagaaggagagagcagccagacggggacgcgccaaaagccaagcaagcacgcacgcccgacaaggacggaagccaccaacaggacaacgcaaccagacgcgcaagcccacaaacaacacgagacgaagcgacccaaaccgccgacgcacacaaacgaacacgcacacggaaaaacgcacggacacagaaccgaaacaagacaagcacgcgccaacgcaaagcgaagaccgcaggacaacacgcacccgcaccccgcccaaccggacggagcgcaacaacggagcgcacaccaccaacacggcaacggcaagaagacgcagacccagacagcgcaacagaagcggggacgccaagcagaagagacaaaaaacagcccagaagcccaaaggtgaagacaaacggcaggcaacaaaggcagcaaacgaaccccgggccccgcaaaaggcgcgggaagacaaggcaaggaaccaccagaccgcgaccaaaggaaaacaagcaaaggacgtcagcccaggagaaaaccgcaggaaccgaaggccagaaagaaggcagggaacggaacggaggcgacgcaacgaacggaagagaagcaaacgccaaggaaagcgaacggaaggcgagcctaacgacagcgaagcggaagcaacggaacgggaaacaaagagcaccccaaggccagcgaaggcaaggctagcggaaagccagagaaaagcgcaagcaaagcgaactgattggtttaacgtcgcccaactgacggcgcaatattatgtactgaaaccagaagcagggaatgcggagcacgcggtgaaattcggtacttccggtcaccgtggcagtgcagcgcgccacagctttaacgagccgcacattctggcgatcgctcaggcaattgctgaagaacgtgcgaaaaacggcatcactggcccttgctatgtgggtaaagatactcacgccctgtccgaacctgcattcatttccgttctggaagtgctggcagcgaacggcgttgatgtcattgtgcaggaaaacaatggcttcaccccgacgcctgccgtttccaatgccatcctggttcacaataaaaaaggtggcccgctggcagacggtatcgtgattacaccgtcccataacccgccggaagatggtggaatcaaatacaatccggcaaatggtggcccggctgataccaacgtcactaaaatggtggaagacagggccaacgcactgctggccgatggcctgaaaggcgtgaagcgtatctcccttcacgaaacgatggcatccggtcatgtgaaagagcaagatctggggccgccgcggagacgaacggaagccgaacctcgagccaagccacagtcatatgcaaacgcaagcgaaagcaaaggaaagcgaagcaaccccgaacggcaagaacagcgtaccggaagcacagccaaagccaaccgtaaggaacaactcacggaaaacctacggcaacgcagaaggcaaccaaagggaagagtaatgcgcaccggcaaggtaaagctacgccaaacgcatcgacaaggcaaagcaagagaaaactccgcgcaacggcagacgacagccaaggcgcaagccacccgcaaacggacgctcaaacgacaacgcaaacgcaatccgacaggaacccatcgccgaacagacaacgaaagcagaacgcaaagccaacaaaaacacaacagtaacgcgaaggcaaaaagaaaacatcccacaaccacaacgaaaaccgtgccccaaacgcgaatccaacacccaaagccaagggcacaccgcgaacggcgaacgacaagcgaaaaggcgaaggcaaaagcgctaaggacaacggcaacggctaaagacaaaatcgcaacagctaaacgagcacaccaccaccctaaacgacaacccgaaagncgcaacgcgaaacggccaaggcgaaacggccacagcgcacccgcgctaagagaaaacctaaaaggcaaagagtaa

SEQ ID NO: 17888 - DNA, 537 bp, Homo sapiens
  SIMILAR (192)..(536): 991254mologous to Escherichia coli ModF,accession number U27192,Smith-Waterman Score=578.
agtcaagaggaactgctccaacaagcactcgtcgcgcaactggcgatagtgaacagcttgaaggtgtgcaactgccggagccggatgaaccttcagcacgtcacgccttacccgccaacgaaccgcgcattgtgctgaacaatggcgtggtttcttataacgatcgccccattcttaataaccttagctggcagcatatcggttacgtcagcagtagtttgcatctggattaccgggtcagcactaccgtgcgtaatgtgattctttctggctattttgattcgattggcatttatcaggccgtttcggatcgccagcaaaaactggtgcagcagtggctggatattctcggcattgataaacgcacggctgacgctccgttccatagtctttcctggggacagcagcgtctggcgctgattgtccgcgcactggtgaaacatccgacgttgcttattctcgatgaaccactacaggggcttgatccgctgaatcgccagcttatccgccgttttgttgatgtgctgattagcgaag

SEQ ID NO: 17889 - DNA, 536 bp, Homo sapiens
  SIMILAR (1)..(345): 1001254mologous to Escherichia coli ModF,accession number U27192,Smith-Waterman Score=583.
catatcggttacgtcagcagtagtttgcatctggattaccgggtcagcactaccgtgcgtaatgtgattctttctggctattttgattcgattggcatttatcaggccgtttcggatcgccagcaaaaactggtgcagcagtggctggatattctcggcattgataaacgcacggctgacgctccgttccatagtctttcctggggacagcagcgtctggcgctgattgtccgcgcactggtgaaacatccgacgttgcttattctcgatgaaccactacaggggcttgatccgctgaatcgccagcttatccgccgttttgttgatgtgctgattagcgaaggctttattcccggtgactggatcaaagaaggcgcaattgtgattgatgtcggcatcaaccgtctggaaaatggcaaagttgtgggcgacgtcgtgtttgaagacgcggctaaacgcgcctcatacattacgcctgttcccggcggcgttggcccgatgacggttgccacgctgattgaaaacacgctacaggc

SEQ ID NO: 17890 - DNA, 1319 bp, Homo sapiens
  SIMILAR (496)..(1317): 981254mologous to Escherichia coli ModF,accession number U27192,Smith-Waterman Score=1387.
atgatactgaccgatccagaatggcaggcagttttattaagcctgaaagtttcttccctggctgtgctgtttagcctgccgtttgggatcttttttgcctggttactggtgcgttgcacgtttccgggcaaagctctgctcgacagcgtactgcatctaccgctggtgttaccgcccgtggtcgtcggttacttattattagtttcgatgggacggcgcggatttatcggtgaacgtctgtatgactggtttggtattaccttcgcctttagctggcgcggcgcggttctcgctgccgccgtcatgtcgtttccgctgatggtgcgggcaattcgtctggcgctggaaggggttgatgtcaaactggaacaggccgcaagaacactgggggccgggcgctggcgcgttttctttactatcacgttaccgctgaccttaccgggaattattgttggtacggtactggcttttgctcgttctctcgaatcagggtaccgagctcaagctgagatcattcaggatgaagtaaaggatgccccgcgttgcatgcaactggcgcagcagttcggtattaccgccttcctcgaccaacgctttaaatacctttccactggcgagacgcgaaaaaccctgctgtgtcaggcgctgatgtcggagcctgacttgttgattcttgatgagccgttcgatggcctggatgttgcctcacgtcagcagctggctgagcgactcgcctcgttacatcagtccggtattactctggtactggtgctcaatcgcttcgatgagatcccggagtttgtccagtttgctggcgtgctggcggattgcacgttagcggaaactggcgctaaagaggaactgctccaacaagcactcgtcgcgcaactggcgcatagtgaacagcttgaaggtgtgcaactgccggagccggatgaaccttcagcacgtcacgccttacccgccaacgaaccgcgcattgtgctgaacaatggcgtggtttcttataacgatcgccccattcttaataaccttagctggcaggtgaatccaggcgaacactggcaaattgtcgggccaaatggtgcaggaaaatcgacgttattaagcctggttactggcgatcatccgcaaggttacagcaacgatttgacgcttttcggacgacgtcgcggcagcggcgaaaccatctgggatatcaaaaagcatatcggttacgtcagcagtagtttgcatctggattaccgggtcagcactaccgtgcgtaatgtgattctttctggctattttgattcgattggcatttatcaagccgtttc

SEQ ID NO: 17891 - DNA, 341 bp, Homo sapiens
  SIMILAR (92)..(3): 661254mologous to Homo sapiens Human secreted protein sequence SEQ ID NO:103,accession number Y87064,Smith-Waterman Score =95.
  misc_feature (1)...(341): n = a,t,c or g
acctcccagtaggggacaacagacacctcatacaggagagctctggctggcatctggtgggtgctcctctgggatgaagattccaaaggaaggaacaggcagcaatctttgnnnnnnnnnnnnnnnnnnnnnnnnnnnnnnnnnnnnnnnnnnnnnnnnnnnnnnnnnnnnnnnnnnnnnnnnnnnnnnnnnnnnnnnnnnnnnnnnnnnnnnnnnnnnnnnnnnnnnnnnnnncaatagcatcaacatcnnnnnnnnnnnnnnnnnnnnnnnnnnnnnnnnnnnnnnnnnnnnnnnnnnnnnnnnnnnnnnnnnnnnnnnnnnnnnnnnnnaagaaactg

SEQ ID NO: 17892 - DNA, 182 bp, Homo sapiens
  SIMILAR (3)..(89): 791254mologous to Homo sapiens Human secreted protein sequence SEQ ID NO:103,accession number Y87064,Smith-Waterman Score =106.
ccctttttgcctgggtattaccagcagaggctgcagaacagcaaatattgctgcctgatccttcctctggaagcttcgtcccagaggggcacccaccgatgtgaggtgtctgttggcccctactgagaagtgtctcctagtcaggaggcatggcggtcagggacccatttgatgaggtagtc

SEQ ID NO: 17893 - DNA, 745 bp, Homo sapiens
  SIMILAR (391)..(744): 521254mologous to Homo sapiens p40,accession number U93567,Smith-Waterman Score=307.
atggcaactgcctcaggggaggccatcactgttgcctcaggagtgcatggttgttctcctcagagaaagcatcagctaatcgggcaaaaggtgaacactgattcaagggtggggtcaactaacacctcatacaggagagctctggctggcatctggtgggtgccctctggacgaagcttccagaggaaggagcaggctgcaatctttgctgttctgcagcctctgctggtgatactcaggcaaacagggtctggagtggctccccagcaaactccagcagacctgcagcgggaaaatgaacaaatgaaaaggaatagcatcaacatcaacaaaaaggacatccacacaaaaaccccagaaaccccatgcgaaggtcacaaacatcaaagaccaaaggattacaactccttgccagcaagggaacaaaactggacagagaatgagtttgatgaattgacagaagtaggcttcagaaagagggtaataacaaactcctccgagctaaaggagcatgttctaacccaatgcaagaaagctaagaaccttgaaaaaaggttagaggaattgctaagtagaataactagtttagagaagaacataaaagacctgatggagctgaaaaatgcagcacgagaactttgtgaaccatacacaagtatcagtagccaaatcaatcaagtggaagaaaggatatcagagattgaagatcgacttaatgaaataaagcaagaagacaaaattagag

SEQ ID NO: 17894 - DNA, 663 bp, Homo sapiens
  SIMILAR (661)..(269): 1001254mologous to Homo sapiens Hb2E,accession number AF235097,Smith-Waterman Score=706.
ggggaagcaaacacattcttcttcacatggcggcagcaaggagaagtgcgcagtgcagcaaagctatggccagactgcttctctagattcctcctcactgggcagggcatctctcgtacaggaaagctctggctggcatctagtgggtgcccctctgggatgaagcttccagaggaaggaacaggcagcaatctttgctgttctgcagcctctgctggtgatacccaggcaaacagggtctggagtggaactccaacaaactccagcagacctgaagtgtcatctggggccatggacggagaggggtgggggctaccagtggacccactgactcctggacatcaggatgctctgccatggcaaaggtgttatcatccatgttcttcgtcttcagttcctcctcggcaggcctgcgcctcaccggcttcatgcagctcttcagctgcctggcctcagcctccacgggaccctggcactcgggctgtggctccagctgcggcagctgctgctgctggggcagcccttcggcatcagtgggtgtgggagcgggtgcgatccggagcaggactgtgtagttgcggccgtggttgttggcccagaaagtgccctcaggggtctcatagcgcaccacgaagtcgaggcgcgccccatcgcccgcgccct

SEQ ID NO: 17895 - DNA, 297 bp, Homo sapiens
  SIMILAR (2)..(238): 721254mologous to Escherichia coli Membrane-associated ATP- hydrolase amsA,accession number D90735,Smith-Waterman Score=266.
ggttggggaaaacggccactatacactggaaggtgaagagttcaccgtcaatggtatggtcggccagcgtctggaaaaagatggcgttgcgctgactatcgcggacattaaggccaaaccaggaacacagtttgtcctgagccagcgtacccgaactgaagtgcgcagcgagctggaccaagcggaagaaaaactcaacgtttatcgccagcagcgcgattcggttgaccttaacctggaagccaaagccgttcttgagcagattgtgaacgttgataatcaactcaatgagctgac

SEQ ID NO: 17896 - DNA, 453 bp, Homo sapiens
  SIMILAR (218)..(271): 941254mologous to Escherichia coli ORF_f325,accession number U28377,Smith-Waterman Score=97.
tcagtaagtacctgcaaactcgctgtcagcgattgcacttttccggcgtgaaagcgtgacgccgctggctgcgcttgcagcttctccagtctgtgcgggccgatttgtgctgctcaaaaaccatcgccgagatttgccgtagatttcagtgccggttaactcctcgagcaattccgcgcgttctttggtttggcattcaggaaggcagcaaattgccccggactggagcagcaaagacgactttatgcgtctgggtaaaccgaatcgtttttcggtgttactgctggcaacatggattcgatgatcaaccgttatccgccgatcgccgtttacgtcatgacgatgccgcgcattatgattactggtccgataccgtgcgccgttccggctggtggattcgaaagccgacatgctgatggcaggtaacggtgaggtcctgtacaagtggcgcat

SEQ ID NO: 17897 - DNA, 1344 bp, Homo sapiens
  SIMILAR (628)..(1308): 971254mologous to Escherichia coli Membrane-associated ATP- hydrolase amsA,accession number D90735,Smith-Waterman Score=1107.
atggtccataggttcggtatccgggtacggttcgtagcgctagggttttaccaggatgtcatcttaccggttcgcgcacatcggcacgagtggggccattatgtgcacttgtgcgcaagcatccagcgccagatcgatgtctcgtttgcccgagacgccacttcgcacagcagctgcccggtcaccggcgtcagattctggggctacccattcgccgccaataaagtcgtcatagcgggctttgaacttgagggggaaaccatgactcgcccgggcttaatctgtgctgaagggggattattggtcatgatcgtctccttgcggtctgagctttacgacagctatcacgaatttacgaggcaacgggttacagagatagttgaaaaagcggctaaccatttgccagccgttgtggaaatgatgactctacatcgctgcgcgataaatcgccacaatttcgttcgtcgcgtaggacctgccgggatatccactttcttcgccagttcaccggatggcgttaatgcaggcttcagcaccttccgcgtcgtttttacctgtcaacgttcacgcccattgcagcggcacagtcacgcagacgtgcagacggcgactttgctgttgaataccgtgaaccttgagcaaaaacaggccaacgccattctcagcggcctgagcgatatgatccctaactcatcgcccgagtctgcaccggagatccaactgctgcaatcgcgcatgattctcggtaaaaccattgctgaactgaatctgcgcgacatagttgagcagaagtattttccgattgtgggtcgcggctgggcgagattaaccaaagaaaaaccaggtgagctggcgatcagctggatgcatattccacaactgaatggtcaggatcagcaactgacactcacggttggggaaaacggccactatacactggaaggtgaagagttcaccgtcaatggtatggtcggccagcgtctggaaaaagatggcgttgcgctgactatcgcggacattaaggccaaaccaggaacacagtttgtcctgagccagcgtaccgaactggaagcgattaacgcattgcaggaaacctttaccgttagcgaacgcagtaaagaaagcgggatgctggaacttaccatgactggtgatgatccccagttgattactcgtattctgaacagcatcgctaacaactatttgcaacagaatatcgctcgccaggcggcgcaggattcacaaagccttgaattcttacagcgccagttacctgaagtgcgcagcgagctggaccagcggaagaaaaactcaacgtttatcgccagcagcgcgattcggtga

SEQ ID NO: 17898 - DNA, 1578 bp, Homo sapiens
  SIMILAR (1275)..(337): 951254mologous to Escherichia coli SbcC (AA 1-1048),accession number X15981,Smith-Waterman Score=1502.
ttagaatccctttaggcctgataagacgcggtccttaaaaggaatcccccattttttcccactccgcttaccatccacaccaaaataacgatcatcacgacataatttttctttaacatcgcaaaatacaccgttagcgaatgtaaattcgctgggatcgtagccttgtaatgattgtaagttttcagcggctttttcgccgagatatttccttgttaactctggggaaatcctcatgctccatggcaccctgtgcccatgcagctccccagaacagccaccactacctggctccccactgagagtgctgggctgggcaagaggcactgtgcttgagggtgtctgagagctgcagatcaccaaggatacttcatcggcgggtaacgtcaacgtgatcgccgcaagcgcattaagtttttgctcagcatgggttaactgttgctgccattgccgcacatgctcgcgatcgctggtttgttgggagaactgcgcacgccaacccgccggttcgttgttccactgacggaagcggtcgtgttcctgtaaccaggtattcaggctttgttgctgctgctgtaattctgctgactgcttcgccgcgtggtggcgaatgctcgcgcgaagcgccattgtgctctgtaagcgagtatttacttcttcaatctgctggcgaatatgcgccagcgccgcgctgtgttctgcgatgcgttcccagtgtggacgaagatttcgtgccggttgtgccagactaagcgccgccagttgaggttgcgctttttcttcttcggctaacgcctgttgcaaggcctgctgacggcggctggcttcttgctgcaattcgtcctgacgcgttaaccagtttagcgattgttgttcttgctgctgcgcggtaattaactgtttttcttcgtcagtaagtacctgcaaactcgctgtcagcgattgcacttgttccggcgtgagcaacgtgacgccgctggcctgcgcttgcagcttctccagctctgtgcgggccgatttgtgctgctcaaaaaccatcgccgagatttgcccgtagatttcagtgccggttaactcctcgagcaattccgcgcgttctttgggtttggcattcaggaaggcagcaaattgcccctgcgaaagcagcatcgaacgggtgaagcgcccgtaatccagcccggttaacgtcgctgtcagttccagcttatctttcactttgtcggcgagaattttgccgtcggcgcagcgcgccagctctacgcgtggcaccacaagcggcgttccggcaactggatcgtcaatgatcatgcagcgcagaccataaatgcgctcaatcagttcagcagtgacaatctccttcggcgctccctgagcaacaattttcccttcccgcaatgcaatcaaatggctggcgtaacgacaggcctgattaagatcgtgcagcaccgccgccagggtatagcctttttcgcggttcagttcgcttaacaactccagcaaatcaatctgatgactgatatccagccaggtcgtgggttcgtcgagcagcataattgccgtttcctgggccagcaccat

SEQ ID NO: 17899 - DNA, 1118 bp, Homo sapiens
  SIMILAR (447)..(1115): 951254mologous to Escherichia coli Membrane-associated ATP- hydrolase amsA,accession number D90735,Smith-Waterman Score=1061.
  misc_feature (1)...(1118): n = a,t,c or g
atgctcctgaatgaccagtggatcaatgacaagattaagaagaaaattgaaaaatattttgaaacaaatgataatggaaacacaacataccaaaacctatgggatacagcaaaagcagtaccagaagggaagtttattgctgtgaagaagctaagtctcagaaagataactcacccaagaggacacaaggataaacctgatacccatggcagtagaaagcctacacttacccactcagatgctcatcaatggaggagagacttatgcctggaggaactggaaaagagggggacaatacaaatcagcgacactgaatacggggcaacctcatgtccgagctcgcgagctcgtcgacagcgacacacttgcatcggatgcagcccggttaacgtgccggcacggcctggcgttgcccgcgttattcacgttgatcgctgtcgcttacttcgctgttaagcacaccaatttatcaggcagatactctggtccaggttgacaaaaacaaggcaacggccattctcagcggcctgagcgatatgatccttacttcatcgcccgagtctgcaccggagatccaactgctgcaatcgcgcatgattctcggtaaaaccattgctgaactgaatctgcgcgacatagttgagcagaagtattttccgattgtgggtcgcggctgggcgagattaaccaaagaaaaaccaggtgagctggcgatcagctggatgcatattccacaactgaatggtcaggatcagcaactgacactcacggttggggaaaacggccactatacactggaaggtgaagagttcaccgtcaatggtatggtcggccagcgtctggaaaaagatggcgttgcgctgactatcgcggacattaaggccaaaccaggaacacagtttgtcctgagccagcgtaccgaactggaagcgattaacgcattgcaggaaacctttaccgttagcgaacgcagtaaagaaagcgggatgctggaacttaccatgactggtgatgatccccagttgattactcgtattctgaacagcatcgctaacaactatttgcaacagaatatcgctcgccaggcggcgcaggattcacaaagcctngtttattaa

SEQ ID NO: 17900 - DNA, 785 bp, Homo sapiens
  SIMILAR (192)..(4): 681254mologous to Escherichia coli RtoA protein,accession number D90778,Smith-Waterman Score=220.
atgcccgtcgcttttggtaaagtaaatgtattccgaaattataaccgttttcgttttatcgagaagaacggtcattataaaccgaaaccgtttgggaagtttaggcgtatcatccggatcgtccggtattatctcatctccgccaggagttgggggaactggagtgtcgtctgattcatcgtcagggggtgtcgttcggtacgctggctcaggaaaactgtgttcctggtttggccttaatgtccgcgatagtcagcgcaacgcatctttttccagacgctggccgaccataccattgacggtgaactcttcccttccagtgtatagtggccgttttccccaaccccgcgacccacaatcggaaatacttctgctcaactatgtcgcgcagattcagttcagcaatggttttacgagaatcatgcgcgattgcagcagttggatctccgcgatgcacttgttccggcgtgagcaacgtgacgccgctggcctgcgcttgcacttctccagctctgtgcgggccgatttgtgctgctcaaaaaccatcgccagatttgcccgtagatttcagtgccggttaactcctcgagcaattccgccgttctttgggtttggcattcaggaaggcagcaaattgcccctgcgaaacagcatcgaacggttccagcttatctttcactttgtcggcgagaattttgccgtcggccagcgcgccagctctacgcgtggcacctgcaaattaccgtcgggttggtacgcgcccgattctggctccagaatgcacg

SEQ ID NO: 17901 - DNA, 282 bp, Homo sapiens
  SIMILAR (109)..(282): 1001254mologous to Escherichia coli TonB protein,accession number D90763,Smith-Waterman Score=299.
cgcacaggtcgttgggtgctagccgactctagaggaacctgatagtcttgtcttattgacaatcatcgctatatgcgtttacaaacgagacctggcttgtctagtgaaatgattatgacttcaatgacccttgatttacctcgccgcttcccctggccgacgttactttcggtctgcattcatggtgctgttgtggcgggtctgctctatacctcggtacatcaggttattgaactacctgcgcctgcgcagccgatttctgtcacgatggttacgcctgct

SEQ ID NO: 17902 - DNA, 1201 bp, Homo sapiens
  SIMILAR (58)..(837): 811254mologous to Escherichia coli K12 putative transport,accession number AE000192,Smith-Waterman Score=1064.
atgaaaaatagtgtattgacggcgtttataactgtggtatgtgcaatgtttgcaggtcatttccgcacttcttatttgccgcgcataatccctcgttttaccgatgcccctttaattttggcgaaggatttgtctatggctgggaatgttcaggaaaaacagttgcgatggtacaacattgcgctgatgtcttttatcactgtctggggttttggcaacgttgttaataactatgccaaccaggggctggtggttgttttttcatgggtgtttatctttgcactctatttcacaccttatgcgctaattgttggtcagttaggctcgaccttcaaagatgggaagggcggggtcagtacctggattaaacacacgatgggacccggactggcttatctcgccgcgtggacctactgggtggtgcatattccctatctggcacaaaaaccccaggcaattctgattgcgctcggttgggcgatgaaaggcgacggttcgctaatcaaagaatattcagtcgtagcgttacaggggttaacgctggtgctgtttatcttctttatgtgggttgcttcacgcggtatgaaatcgctgaaaatcgtcggttctgtggcagggattgccatgtttgttatgtcactcctgtatgtggcgatggcggtaccgcgcctgcaattactgaagtgcatattgcgacccacaacattacctgggaaacgttcattcctcatagcgaccttatctacagtaccaccgattcaatgctggttttcgcggttggcgaatagacagagattctccttacgttatcaaacgcgcaacccaggattagagttccgctgcagctggcttttcaccggcagcggttggggcttcaaaccgtactttgctaagcgttatacagatcaaacctattacactggcgacaacggctatgtcgccggctgggttgcaggttacaactttatgctgggcagcgagaaattcactcttaccaactggaacgagtacgagtttgaccgtgacgctacctatgcagcggccattagcgcattgccctggtctcgtaccacgtcccataaagcttcagcggcggtggaaagtgaacggttcttcctgcgcaccagcatcaactggcgttcaacaaccggcgtaatgcgctttaccaccagtgggctaccttcaggcaatggtagcgcca

SEQ ID NO: 17903 - DNA, 621 bp, Homo sapiens
  SIMILAR (322)..(552): 871254mologous to Escherichia coli similar to,accession number D90870,Smith-Waterman Score=363.
atgattgccaaaaaaatttcgttaatcgccaaaggatccttcaaccacgctggcgtaatacaattcccccaccccaaagacgaacttccacagaaaacagggtcttccttcactattcgcaaagaggggctggtgtccaatgtcaagaaggaaaccattctatttggcaaccgtggtgggatgtacgtgtccagcggacaggaattccaggtttacgctgtcatctcatatttctacaattgcctgctggacaaccccagacagacaattaaaatcaggcccacctccaccccagcttacctgcccttcctccccgttaggggacaaatgtacgggttctacgactgggaaaacttctataacgggcgccataataaaccatgtagcgagcagcgttatacctttaaaaataccaagccgtatttatcctgggttgacaccggatttagtctctacttgcatgcgtatggcacctacggttctgcgaatcgcgtgaatttcctcgacgatatgttcctgtacggtatcggctacaatttcaccggcagcggttgcaactttatgctgggcagcgagaacttcactcttaccaactggaacgagtacgagtttgacctgtga

SEQ ID NO: 17904 - DNA, 1045 bp, Homo sapiens
  SIMILAR (217)..(957): 701254mologous to Escherichia coli similar to,accession number D90870,Smith-Waterman Score=854.
atgctgtgtacaaagtgggataaactgggcttggagaaaaacgcgggtaaaaataaaaacgcgtacaaatggtatgggtggcccgcaaatgcacctgatgaaccgcatattgaacaattggttggcgagtgccgtgttatgcggcaattaaaacgactcattagccgtattgcacccagcccatccagcgttatggtggttggtgaaagcggcacggcgatacctgttgtatctcatgcagaatttaaaggcggttttgcagatatcggcgtgcattatctggactggaccagccggactaccgaaaaatcgtcgaccaaatcacacaaagatgattttggttatcttgaatttgaaggtggcgctaactttagttggggagaaatgtacgggttcttcgactgggaaaacttctataacggtcgccataataaaccaggtagcgagcagcgttatacctttaaaaataccaaccgtatttacctgggtgacaccggatttaatctctacttgcatgcgtatggcacctacggttctgcgaatcgcgtgaatttccacgacgatatggttcttggccgggttcgggttccaattttaaccggcgggggggtggggggttcaaacccgttctttgctaagccgttataccagatcaaaaccttattacacttggcgacaacggctatgttcgccggctgggttgcaggttacaactttatgctgggcagcgagaaattcactcttaccaactggaacgagtacgagtttgaccgtgacgctacctatgcagcggatttcctgccgttatacgacgttgactgccaggacaatggcaatctggaatatgacacctattcccaaccggaatggaaacataacttgttcgaccattatctggcggtgctttaccgctttaaagatgaaagtggcaaagaacaatttagcggcgcagtggtgaaaacgcgtgaagcaacgccgggtaaagaaatagaagcgatcactcgccgaatgcttgatttcagcccacgactgaaaaaactcgcgg

SEQ ID NO: 17905 - DNA, 1755 bp, Homo sapiens; identical to SEQ ID NO: 14854
  SIMILAR (67)..(705): 991254mologous to Escherichia coli K12 diaminopimelate epimerase,accession number AE000457,Smith-Waterman Score=1097.

SEQ ID NO: 17906 - DNA, 1180 bp, Homo sapiens
  SIMILAR (704)..(982): 841254mologous to Escherichia coli K12 putative transposase,accession number AE000253,Smith-Waterman Score=402.
atgtgccggcaacgaattcgaggtacagagaataaaacccggaaccaggtcaatacggctaaagcccccgtggcaaaggtcggcccggtacacatatcgacgctccgcaaaacggatattcgtttacgcgtttatgagcgtggggcaggagaaacccaggcctgcggcagcggcgcgtgtgcggcggttgcagtagggattcagcaaggtttgctggccgaagaagtacgcgtggaactccccggcggtcgtcttgatatcgcctggaaaggtccgggtcacccgttatatatgactggcccggcgatccttagcaagctggatgatgatcgcatcaaagatgacgatgtgcgtcacgatggtcgtcacgcccacgattatgactatgtccaccgcgttcgtgatattgaagccgacacgcccgcacgttataacgccgatcctgatcggttatttgaatcttctgggtgcgcccgggaagctggcggtctttgcagtacgtcttgataccttcgaagcggaaaaaaatcagcaggtgttttatatgcagtgcagcctacgggtaatgacttgtaggccggataagggcgttcactgccgcatccggcactggttgcctgatgcgacgcttgcgcgtcttatcaggcctacggtttacgccattcacggttggcacaccacacatcagacgttgcatattctaatccccaaaagtaactatatagttacacaaacagcgagatcggctgtaactgtaaataattacatgacaaatcttaacgccgtgttccagtttggtgttgataacggttacctggcagataatccgtttaaggggatctcgccattaaaggaatcaagaaccattccggatcctctttcgcgggaagaatttatccgtcttatcgatgcgtgcagaaatcagcaagcaaaaaatttatgccttcagatgctctcctggatcacatcgcggagagaatgcaacattcgtgattctgtatctcccatcaactgcgaatatatcatatcccgcgtttatcaattcatgttcgcaactgggcatagggaaacatacgaagtaccgagaatgtgcacgagttggaacaaggttccaaccgtgcataaggtcacgaaccgatgtcgaaagaaacctcggcgggcaaaagacgatgcgcggtga

SEQ ID NO: 17907 - DNA, 1398 bp, Homo sapiens
  SIMILAR (85)..(1395): 861254mologous to Escherichia coli NtrC/NifA-like protein regulator,accession number U17902,Smith-Waterman Score=1932.
atgccatcagatatatcgctcgccagttgccggctacgcgcaacctcacgcttatttaccgatcaccgcaggcaatcagactgtatgactgctattaatcgcatccctattgtggatgatgaagataatgttcgccgattcgaaacacattgtgcgaacaacgtacgcacagcattacacctgtttgccgatattcaccctgatgtggtgttgatggatatccgcatgccagagatggacggcatcaaggcactaaaggagatgcgcagccatgagacccggacacccgttattctgatgacggcctatgcggaagtggaaaccgccgtcgaagcgctacgctgcggagccttcgactatgttattaaaccgtttgatctcgatgagttgaatttaatcgttcagcgcgctttacaactccagtcaatgaaaaaagagatccgtcatctgcaccaggcactgagcaccagctggcaatgggggcacattctcaccaacagcccggcgatgatggacatctgcaaagacaccgccaaaattgccctttctcaggccagcgtcttgattagcggtgaaagcggcaccgggaaagagttgattgccagagcgattcactacaattcgcggcgggcaaagggggcgttcattaaagtcaactgcgcggcgctgcgggaatcgttgctcgaaagtgaactgtttggtcatgaaaagggattatttgaacgagccaacgaaggtactctgctcctcgacgaaattgggcgaatgcgctggtactacaagcaatactacgcattctacaggaacgggaatttgaacggattggcggcatcagaccataaaagtgatatcgcatcattgctggcaccaacgcgactgcaggcaatggtaaaagaaggcaccttccgtgaagatctcttttatcgccttaacgttattcatttaatactgccgcctctgcgcgatcgccgggaagatatttccctgttagctaatcactttttgcaaaaattcagtagtgagaatcagcgcgatattatcgacatcgatccgatggcaatgtcactgcttaccgcctggtcatggccgggaaatattcgagagctttccaacgttattgaacgcgccgtcgtgatgaattcaggcccgatcattttttctgaggatcttccgccacagattcgtcagccagtctgtaatgctggcgaggtaaaaacagcccctgtcggtgagcgtaatttaaaagaggaaattaaacgcgtcgaaaaacgcatcattatggaagtgctggaacaacaagaaggaaaccgaacccgcactgctttaatgctgggcatcagtcgccgtgcattgatgtataaactccaggaatacggtatcgatccggcggatgtataa

SEQ ID NO: 17908 - DNA, 774 bp, Homo sapiens
  SIMILAR (394)..(726): 991254mologous to Escherichia coli NtrC/NifA-like protein regulator,accession number U17902,Smith-Waterman Score=567.
atggatttgattgtcctcggctgtcgattcagccagcgtaacgccccgccccagtcgatcagttgctcgccgggtaaatccatcatcggcgcatcactgggtaatgaaatgcgccataagagcgctggcggaccaactgctcaacaggtactactgaatatcctgatcaatgccgtccaggctatcagcgcacgagggaaaattcgcattcaaacctggcaatacagcgactcacaacaggccatttcgatagaggacaacggctgtggcattgatctctcgctgcaaaaaaagatcttcgatccctttttcaccaccaaagcctcaggaaccgggcttggtctggcgttaagtcaacgcatcattaatgcccatcaggggaaatcagactgtatgactgctattaatcgcatccttattgtggatgatgaagataatgttcgccgtatgctgagcaccgcttttgcactacaaggattcgaaacacattgtgcgaacaacggacgcacagcattacacctgtttgccgatattcaccctgatgtggtgttgatggatatccgcatgccagagatggacggcatcaaggcactaaaggagatgcgcagccatgagacccggacacccgttattctgatgacggcctatgcggaagtggaaaccgccgtcgaagcgctacgctgcggagccttcgactatgttattaaaccgtttgatctcgatgatgaatactcggctacacctcatgaaaagagatccgtatgccggcactga

SEQ ID NO: 17909 - DNA, 2157 bp, Homo sapiens
  SIMILAR (1)..(786): 991254mologous to Escherichia coli GTP pyrophosphokinase,accession number U29580,Smith-Waterman Score= 1386.
  misc_feature (1)...(2157): n = a,t,c or g
atggcgatggtcgatgattttcgctgcgtagtcatcaaactggcggagcgtattgctcatctgcgcgaagtaaaagatgcgccggaagatgaacgtgtactggcggcaaaagagtgtaccaacatctacgcaccgctggctaaccgtctcggaatcggacaactgaaatgggaactggaagattactgcttccgttacctccatccaaccgaatacaaacgaattgccaaactgctgcatgaacggcgtctcgaccgcgaacactacatcgaagagttcgttggtcatctgcgcgctgagatgaaagctgaaggcgttaaagcggaagtgtatggtcgtccgaaacacatctacagcatctggcgtaaaatgcagaaaaagaacctcgcctttgatgagctgtttgatgtgcgtgcggtacgtattgtcgccgagcgtttacaggattgctatgccgcactggggatagtgcacactcactatcgccacctgccggatgagtttgacgattacgtcgctaacccgaaaccaaacggttatcagtctattcataccgtggttctggggccgggtggaaaaaccgttgagatccaaatccgcaccaaacagatgcatgaagatgcagagttgggtgttgctgcgcactggaaatataaagagggcgcggctgctggcggcgcacgttcgggacatgaagaccggattgcctggctgcgtaaactgattgcgtggcaggaagagatggctgattccggcgaaatgctcgacgaagtacgtagtcaggtcttgacgaccgggtgtacgtcttacgccaatcagccgaggatcccgacactgatcattcgcggctttgcggcagaaggccaaagccagaataactatctgaatggcctgaagttgcaggacaacttctataacgatgcggtcattgacccgtatatgctggaacgcgctgaaattatgcgtggcccggtttccgtgctttacggtaaaagcagtcctggcggcctgttgaatatggtcagcaagcgtccgaccaccgaaccgctgaaagaagttcagtttaaagccggtactgacagcctgttccagactggttttgactttagcgattcgttggatgatgacggtgtttactcttatcgcctgaccggtcttgcgcgttctgccaatgcccagcagaaagggtcagaagagcagcgttatgctatagcaccggcgttcacctggcgtccggatgataaaaccaattttaccttcctttcttacttccagaacgagccggaaaccggttattacggctggttgccgaaagagggaaccgtcgagccgctgccgaacgcatggcaagatctcacttcgggacgggttatttccggtggcagcacgctcactatgcaggttgctcgtctgcttgatcctcaccccaaaacatttggcggcaaaattcgccagctctggcgcgcgttgcaactggaatggcatctgtctaagcgtgaaattcggaccttgtatcttacccgcgctccgttggccggtacgttgcaggggatcggtgcggcaagttgggcttatctcggaaaatcgcctgcgaatttaagctattccgaggcggcaatgctggcggttttgccgcaagcgcccagccgtcttcgcccggatcgttggccggagcngtgcctgaagccgcggcgtaataaagtgctcgaacggatggccgtgcaaggtgtgtggtcccgtgagcaggtaaaagagtcaagggaagaacccatctggctggccccccgacaaatgccgcaactggcaccgctgttttcgcgcatgatgctcggtaaaagcaaaagcgacaaaatcactactacgttggatgccggtcttcaacgacgtctggaagaactggcgcaaaactggaaagggcggttgccaccgcgcagctcactggcgatgatcgtggttgatcataccgatatgcgtgttcgcggctgggtgggatcggttgatctcaacgatgattcacgctttggtcatgttgatatggtcaattcgatccgatcgccaggatcagtgctcaaaccgtttgtttatggtctggcgctggatgaaggcttgatccacccggcatcactgctgacagaaataaaacacgagcaaatatga

SEQ ID NO: 17910 - DNA, 1263 bp, Homo sapiens
  SIMILAR (768)..(406): 1001254mologous to Escherichia coli o278,accession number L10328,Smith-Waterman Score=612.
tcagggctgtgcctgggagcaagagggactcaaagacccagagcatctgtttgcttgctgttttgaattcacgccatcccgcttgagtttttcttctgtttgggtagctcgaaagagattagccgccagttctgttgaacccatatgatccaggatcttctgattctttttcagccccttccgctgatgaatagctttctgatctaatccaccatacagcccctggtaaccatgattctgaaatatggcgaaatcagtagctgtcgctaccccagcttgctgtgctgcctcaaccaattgtttgttatgttctttcaactcatttctcagaaacagacgcttttcgtcttcacgaagttgcttaaatgcttcatcgtcagcaagctcctgccgtcgggtagccactgtgtttgcttgctgttttgaattcacgccatcccgcttgagtttttcttctgtttgggtagctcgaaagagattagccgccagttctgttgaacccatatgatccaggatcttctgattctttttcagccccttccgctgatgaatagctttctgatctaatccaccatacagcccctggtaaccatgattctgaaatatggcgaaatcagtagctgtcgctaccccagcttgctgtgctgcctcaaccaattgtttgttatgttctttcaactcatttctcagaaacagacgcttttcgtcttcacgaagttgcttaaatgcttcatcgtcagcaagctcctgccgtcgggtctgaatcgccagcggcatcagcaccttgtcgccttgcgtataatatttgcccatggtgaaaacgggggcgaagaagttgtccatattggccacgtttaaatcaaaactggtgaaactcacccagggattggcccttctgtcatgtaaagacacagtaaagcagatctgacccaccgccactgtggtggaattccagagcctcagagtgtctcctttggcagcagtcagcatggtggaggccagttcccaccgctgtgattccaagtgtccaagcgagaaccagggaggataatggctgcaccagctcttcagcacctggacacaggaccgtgcttcgcacatcttgctcagcacggtgccctgcctcgtttcttcttgaacatgacacgcgtagaactgtggaacctcagcattcagtgtcggtgccatccaggctgttctcaggatacagctgaaaacctggacaccattatcatcagtgtatccttccaaacccagcaccat

SEQ ID NO: 17911 - DNA, 2049 bp, Homo sapiens
atggcggtagcattgttcagggacttccagtgcggaaacctgaagtaccagggggaccctggctatcgagggcttaatgcccgctaccatgcgttaaccagcattagcccaaatgcggaagtcagcctcgataatactcaggggttaggcagaggaaatattgcccatgacggtctgttaacgctaaaaaacgtgactggcgaactgcgtaatagcataagcgggaagggtatcgtgagcgcaaccgccaggacagatgtagagttggatggcgataatagccgctttgtggggcaattcaacattgatacaggcagcgcgctcagcgtcaacgagcagaaaaacctgggtgatgcttccgttatcaataatggcctgctcaccatctccactgagcgtagctgggcgatgacgcacagtatcagcggtagcggtgatgtgacaaaactgggtaccgggatcctgactcttaacaacgattccgcggcgtatcagggtacgacggatatcgtggggggggaaattgctttcggttccgactctgccattaatatggcaagtcaacacattaatatccataacagcggtgtgatgtcgggaaatgtcaccactgcagtacaaaacggcgaccctgcgaaaccggtcattgcggcagggcagacttattttgctatccagacccgacggcaggagcttgctgacgatgaagcatttaagcaacttcgtgaagacgaaaagcgtctgtttctgagaaatgagttgaaagaacataacaaacaattggttgaggcagcacagcaagctggggtagcgacagctactgatttcgccatatttcagaatcatggttaccaggggctgtatggtggattagatcagaaagctattcatcagcggaaggggctgaaaaagaatcagaagatcctggatcatatgggttcaacagaactggcgctgaccggtgacgccctgttcagcttgcgctgcgattgtggcttccagctcgaagcggcattgacgcaaattgccgaggaaggccgtggtattttgctgtatcaccgtcaggaaggtcgtaacattggtctgctgaataaaatccgcgcttacgcactgcaggatcaaggttacgataccgtagaggctaaccaccagttaggcttcgccgctgatgagcgcgacttcactctttgcgctgatatgttcaaactccttggcgtcaatgaagtccgcttgttaaccaataaggggcttaaaaatttttttcccgggggaatctttttccccaaggggaaacccattgaaaaaccaagggcgtcccatgctggacacgatatccggaccttaaacgttcggacagcgcagaaatctttaaaacgcctgcaaacgcgtcaggccgaacgtcaggctcgcttggatgtgccgcacagttggagaaagtcgcagacggtcgcgaccttgacgaaaagctggccgaagccggaattggcggtagcaataaaacgtctgtttggcaaggataataagccagctatcgctcgtggtccgctgggacttcatctcaatagtggctttacgctcgacacgttagcgtttcgtttgctggaagatgaattgctgattgcgctgccgggtgaggaatttacggtagccgccgtcagccacatcgatctgggcggcggtagtcagattttccgctactacacttcaggcgatgagtttctgcaaatcaataccaccggcggcgaagatattgatgacattgatgatatcaagctctttgtctatgaagagagctacggtatcagtttgaataaatcccgagcttcgcgttttccacaccctcctgaggccctgaagagaactgactgtcgagtcatagtgtacctgaagtttgagctgggtataactaccactcatcacgaaagacctagtgtagataataaaaagtccaaagtttgtgaaaaggtagtggcagttgtttctcttgccttcatcatcgtaatcatcaccactgccactaccactgtcatcattatcaacgagcactga

SEQ ID NO: 17912 - DNA, 2392 bp, Homo sapiens
  SIMILAR (1196)..(831): 461254mologous to Escherichia coli PENICILLIN-BINDING PROTEIN 1A (PBP-1A),accession number D90882,Smith-Waterman Score=172.
ctgttgtcgatccacggaatcaggctaccgccagcggcacgccaaagttatccaccggcagctcaccgctacgggtaaggttgtgactttgcgttcgatatcgagaatagcagaggacggggtcggagttcatctgccacatggccatacagatggcccatctgggttaataaccacgcatatgtcgcgcaccaccgccggaagcggcctgggtcgccggagtgaatttcacgttcagcaacgtaccgttaacagcagcgtgttatcgagcttactgactgacttcagtaccgctgttggccttgtgcgtcctggcccagcatgggtgacaagccgccgtctgccagctttctccggcaaaacgaccgtctggcgtcgcgccaaccaccgatcccaacggaccgcacacgctaggcgtataagcggcgatagtgcttgccaaggtcgatataatgttggtgtgtacttccagagggccatcgggttctttccggcagattcgcactgcgcgacatggggcgacgcgcggcaaggcactatccggcaagggttcgcttcatcagccataatccggcgaatgatccacgccgcccccgacgacttaaaggccgttcaagcagcggatcgtcaggctgtaagcgcaatttgccgccttgccgtggcgagcaaacgcggtatacgctgccgccatatcttccattttgcaccagcgccgccgagaatgagtgaaagattcggcgcagcaccgtgggcaaatataacggcaatccaacattgcgtaactttgccgcaaaccgttcggtccataggcttccagcacctgcacagcagttttgcgccagttcttccagacgtcgttgaagaccgcatccaacgtagtagtgattttgtcgcttttgcttttaccgagcatcatcgcgaaaacagcggtgccagttgcggcatttgtcggggggccagccagagggttcttcccttgactcttttacctgctcacgggaccacacaccttgccggccatccgttcgagcactttattacgcgcggcttcggcacgctccggcaacgatccgggcgaagacggctgggcgcttgcggcaaaaccgccagcatgccgcctcggaatagcttaaattcgcaggcgattttccgagataagccaattgccgaacgatccctgcaagtaccgcaaagggacgcgtcgtcatcccagcttcatcatcctcttcagcaatctcttcaagctgctggcgatgataatctcccacatgaattcgactttctctggctgtttcgcttcttcagcctgcagaccgggttttcaatgataaagatccggctggtaattgttgtccagctcgctgataataatacgcgcgttttcaacggatcggtgccgtcaatcggatcgatatcgatgaggtgcaacaggacgggcaacgttccaggtgcttcaggaagcgaatgcccagacctgcgccttcgcagcgccttcaatcagtcctggaatatcggcaacaacgaagctcttttgttgtccattcgtaccacacccagacttggcaccagagtggagcccaaggccaatgccggggctcgagccccaggcaaggccgtgacccaaatggaggcttttaaacccgagccagagagtttcacgaacgccaggtacagtgcgatgagaataatcggcaccagggtaatgccgccgccatcggcatattgccaatcgccccctgctgggaataaacatattgccgataaaatatcctggaggaccaaccagctgcgggacgataaatcgcccagtgtgagtgagaagtgtcagcagcgagccgaaatagacaatgccaaacacattagcgggccaagcagcagtaaaaacagccccagccccggattatccagaagaaaccggacaccttacccagacctggacgtgaaggtgattgcatacattcatcgccattcacctctcctcaaccagcggcaccatcacatccgcgaccaggaaaccatcacctgttgtccgggccggaatttctctgatctcgctctggctacctacgccgacgagcattacggggtgatctggccgcgggacaagaagaaccgcttatcgccaactcatgggttgcggtgtataccgtacaaggatggggaaaattcttttaaagaatggcgaacaaataacactgcatggcaacttattatattcttaaagccaatggatattcactcttatcactgtgaaggcagcaaaagagacctggccaaagctgtgctggcggagctgccccaacaagttgtgcagtatttaagcataaaaacctgccccccaccaactcggagcccgactgagctccaggcccagcagcagcatgtcagctga

SEQ ID NO: 17913 - DNA, 1410 bp, Homo sapiens
  SIMILAR (220)..(1002): 891254mologous to Escherichia coli phoM,accession number M13608,Smith-Waterman Score=1131.
atgcagcaggcgagcattaagcacattgagttccgtgacgatcgctttgtggcggcggttgccgttgatgaataccaaccggtaacgctggtgtatctggcgcgggcggtgacgccgggaacgtatcagcgtggggagcagataaactctggcctctaccgctgcatgaagtcaatcccgcacgagtggtcgtggcgcaggatggtacgccgctctggcgcttcgccgatgctgacggcatctggcgttatccgagcaaacactgaactgcggcagatggcatcgcaggtcattcaagcggatagcgaatcgacgaatattttatgggccagcgccattttgttggggattgcactggtgattggcgcaggcatggtttggtggatcaaccgctctattgcccggctcactcgctatgctgattccgtcactgacaataagcccgttcctctccccgatctcggtagtagcgagttgcgtaaactcgcgcaggcgctggaaagtatgcgcgtgaagctggaagggaaaaactatattgagcagtatgtttacgcattaactcatgagctaaaaagcccactggcggcgattcgtggagcggcggaaattttacgcgaaggtccgccgccggaagtggtggctcgttttactgacaacattctgacgcaaaatgcgcgtatgcaggcattggtagaaacgttactacgccaggcaagactggagaatcgtcaggaagtcgttctgactgctgttgatgtggcggcattattccgccgcgtcagcgaagcgcgcaccgtgcagttggcagaaaaaaaaatcactctgcatgttacgcccaccgaggttaacgttgctgctgaaccggcgttactggagcaggcgctgggaaatttactggataacgccatcgattttacccccgagagcggttgcatcacgctaagcgccgaagtggatcaggaacacgtcacgcttaaggtgctggataccggtagtggtatcctgactacgcgctgtaccagcaactgcgaatatagagtaaacagtttgctactcaacgacggtgatgtttatttgtcagcacaaacagcagcgcctgccacaactaacggtatctacaatacgctgacaaccaatgaactttccggtagcggtaatttctacctgcataccaacgttgcaggctcccggggcgatcaactggtcgtcaacaacaacgccactggtaattttaaaatctttgttcaggataccggcgtcagcccacagtctgacgacgcgatgacgctggtgaaaacagggggaggggatgcttcgtttacgctgggcaataccggcggtttcgttgatcttgggacctatgagtatgtcctgaaaagacggcaacagcaactggaacctgaccaatga

SEQ ID NO: 17914 - DNA, 978 bp, Homo sapiens
  SIMILAR (360)..(28): 1001254mologous to Escherichia coli glycerol kinase,accession number M55990,Smith-Waterman Score=583.
tcatcggtaccgtaatgctgcggatatatcttctaaaccgtcacgttttaaatgctcgcagatttctgcggtacgacggcactgccagacaatggcgttatagataggcttgccggtttctttttcccagacaatagtggtttcacgctggttcgtaataccgatagctgcaatttgatcggaactgatatcggctttcgccagcacttctaccagcgtggagctttgggtggcccagatttccattgggtcgtgttctacccaacctggttttgggtagatttgctcaaattcgcgctgcgacacgctaatgatattggcatcgtgatccattacgaccgcgcgggagctggtggtgcccaattgtttgttatgttctttcaactcatttctcagaaacagacgcttttcgtcttcacgaagttgcttaaatgcttcatcgtcagcaagctcctgccgtcgggtctggatagcaaaataagtctgccctgccgcaatgaccggtttcgcagggtcgccgttttgtactaccaggtaacaggcatagcgggagagtacgatgtcttttaatgctcttttggcatttgagccaattttgaccatatcgaggatctcctcgaaatggtcatcaattgtgtgaccactgttctcacaggctttcagaggatccctttgtgcgttatagtaaccattgccaatcaataagcaattaccggtgtgataagccacctgttcgaccgctttcaccattgcaccaaaaaacggatcggaaacatcaccaacgaccagaccgaccgtttcagtggtctgctgcgccagcgcacgggcgttggcgttcgggtgatagctaagagactccattgcactatgcacagccagccgggaagcttcgctggctttgggtgaattattaatgacgcgggaaacggtggcgactgaaacgcctgccagtcgggctacatcctttatggtcgccat

SEQ ID NO: 17915 - DNA, 1174 bp, Homo sapiens
  SIMILAR (1174)..(395): 941254mologous to Escherichia coli K12 putative dehydrogenase,accession number AE000394,Smith-Waterman Score=1201.
ccggatcatgtgggtcgaggaaatcggccagcgattcggtaaccatccattcggtgcgtcgctgctcttctgtggtggtaacgctcacatccgcaatgcggatatctacaaaaccacacttcttcagccagtttttcagcgccagcgcggaagggatgaaatagacattacgcatttgcgcgtaacgatcgcctggtaccagcaccgtgttctcatcaccatcaataaccagcgtttccagcaccagttcaccttcattgaccagttgatctttcaactgccatagatgctccagcggtgaacggcgatggtaaagcacgcccatcgaaaagacggtatcaaaggctttcagtgccggaagttgttcaatactaacggtaacaaatgcgcgcgcatctgctcgaagtgcctgcatcatctcaataaccgcagctgtgagcggcagttgtgcgccgacgccgtgagaagtatccagcgcattcgccagatccttaatatgcagatcaatacggaagcccggcttgaagttgcggtccatcaccatcggcgctttggcatccaaaacggtactgcccgccagtccaccgcgaattgcctgataaaccaggtccgggttaacgcccgctttagttgccagcgttaacgcttctgacatcgcggcaatattcagcgccacaatgacctgatttgccagtttggtgacgttacctgcaccgatttccccggtatgcaccacggaacccgccatcgctttcatcaaatcatagtatttgtcgaaaatagccttgtcgccgcccaccatcactgacagcgtaccgtcgatggctttcggttcaccgccgctcaccggagcatccagcatatcaatgcctttcgctttcaacgcttcgctgaattcacggcttgccagcggtgcgatagaactcatatcgatcaataacgtaccttgcttttcgccctttattaatggcatttttacccacggccacctttttacatgaggagagtttggcagcatggttatgatgacgtcgcactgttcagcgatcgctttagccgtagacgctgtttctgcacctgcagcaatcacgtcagcaatagcttctgggttacggtcagcaaccaccagcgagtaacctgctttcagaaggtttttactcattggtttacccat

SEQ ID NO: 17916 - DNA, 1822 bp, Homo sapiens
  SIMILAR (541)..(1191): 981254mologous to Escherichia coli bifunctional penicillin- binding protein 1C,accession number U88571,Smith-Waterman Score= 1146.
atgggtaaaccaatgagtaaaaaccttctgaaagcaggttactcgctggtggttgctgaccgtaacccagaagctattgctgacgtgattgctgcaggtgcagaaacagcgtctacggctaaagcgatcgctgaacagtgcgacgtcatcataaccatgctgccaaactcccctcatgtgaaagaggtggcgctgggtgagaatggcattattgaaggcgcgaagccaggtacggtattgatcgatatgagttctatcgcaccgctggcaagccgtgaaatcagcgaagcgctgaaagcgaaaggcattgatatgctggatgctccggtgagcggcggtgaaccgaaagccatcgacggtacgctgtcagtgatggtgggcggcgacaaggctattttcgacaaatactatgatttgatgaaagcgatggcgggttccgtgtgcataccggggggtccgcttccggcggtgccccgggaagtaccggtcccgcaccggtgggggcccaaggatgtcccccatggcggggaacgggcccggctgaaattcgctgatgcgtggggagcagataaactctggcctctaccgctgcatgaagtcaatcccgcacgagtggtcgtggcgcaggatggtacgccgctctggcgcttcgccgatgctgacggcatctggcgttatccggtaacaatcgaagatgtttctccacgttaccttgaagcgctgatcaattatgaagatcgctggttctggaagcatccgggggtgaatccattctcggtggcgcgcgcagcatggcaagatctcacttcgggacgggttatttccggtggcagcacgctcactatgcaggttgctcgtctgcttgatcctcaccccaaaacatttggcggcaaaattcgccagctctggcgcgcgttgcaactggaatggcatctgtctaagcgtgaaattctgaccttgtatcttaaccgcgctccgtttggcggtacgttgcaggggatcggtgcggcaagttgggcttatctcggaaaatcgcctgcgaatttaagctattccgaggcggcaatgctggcggttttgccgcaagcgcccagccgtcttcgcccggatcgttggccggagcgtgccgaagccgcgcgtaataaagtgctcgaacggatggccgtgcaaggtgtgtggtcccgtgagcaggattttcccagttctgacgcagtttatgtacgtgccagagccccgattgcgtgccccaggatggtcttcgaggagcctgcggacgattagtcagttagccatgcgccatgatatctatctgaacggtgaattattcgcgcggacccgacggcaggagcttgctgacgatgaagcatttaagcaacttcgtgaagacgaaaagcgtctgtttctgagaaatgagttgaaagaacataacaaacaattggttgaggcagcacagcaagctggggtagcgacagctactgatttcgccatatttcagaatcatggttaccaggggctgtatggtggattagatcagaaagctattcatcagcggaaggggctgaaaaagaatcagaagatcctggatcatatgggttcaacagaactggcggctaatctctttcgagctacccaaacagaagaaaaactcaagcgggatggcgtgaattcaaaacagcaagcaaacaccacacactttgacgtgggtcgcaaggtgaggcaaaccattcaggaacttggcggaaccatgcctgaggagttgccgaccccgcaggtcagcatcaagcagttggaaaacagtgtaaaaattacagagaagaaatag

SEQ ID NO: 17917 - DNA, 1653 bp, Homo sapiens
  SIMILAR (316)..(840): 961254mologous to Escherichia coli Threonine 3-dehydrogenase (EC 1.1.1.103),accession number D90821,Smith-Waterman Score=864.
atgtgtggcctaacttaccattttaccgtatgcccctatcccgctgaatggcgactacatatgggatatgatcctcatacctgtcagttcactgattttgagctaaccgacagcagagacgctgaacggctggaccgatttgcgcaaacggcagacgagatacgcattgctgaccggggattcggttcgcgtcccgaatgtatccgctcacttgcttttggagaagctgattatatcgtccgggttcactggcgaggattgcgctggttaactgcagaaggaatgcgctttgacatgatgggttttctgcgcgggctggattgcgaaaaagtaaaccttggtctggataataatacctggggcggtggtttttccaaatattgtctggttcctggtgaaattctcaaaattcatcgtcatgcgttgtgggaaatccctgatggtgttgattatgaggacgcagccgtacttgaccctatctgtaatgcctacaaatccatcgcgcagcaatcgaaattccttcctggtcaggatgtggtcgtcatcggcactggcccactcgggctgttctccgtacaaatggcgcgaattatgggggcggtaaatatcgtcgtcgttggtctgcaagaagatgtggcggtccgcttcccggttgcaaaagaactgggtgcgacggcagtagtaaatggttctaccgaagatgtggtggcgcgctgccagcaaatttgtggcaaagacaatctgggactggtgattgaatgctccggtgccaatatcgcactgaaacaagccatcgaaatgctccgcccgaacggggaagtgatggcgggcgcgatcggcgtcacgcttggcttcctgctggtgcaaattatcaacaccattctgagttacttcgtgatgattaaaccggttcttggttccagttatcgccagtacatcctgagtttatggctgccgttttatctctcgctgccgacgctggtggtcagttatgcgctgggcattgtgctgaaagggcaactggcgctggggatgctgctggcggtgcaaatagccacgggggtgctggcgtttgtggtgatgattgtgctgtcgcgccatccgctggtggtggaagtgaagcgtcagttttgtcgcagcgaaaaaatgaaaatgcttttacgggcgggcaccagacggcgtgggctctactctctctcggaaatggatgacccacaatgggtcggcaatggcatggataaatttgaaagcgccgagtgtgaaaaaaggttcaaggctcgcaaggtcctgcagtgggctgaagaatatagcttgcaggataacgatgaaaccattcttgcggtaacgagggatggggaaatgagcctgccattattgccttatgtacaaacgtcttcaggtaaacaactgctcgatggccaggtctacgaggacctaagtcatgaacagcagtatgaggcgcttgcacttaatcgcgtcaatgtacccttcacctggaaacgtagtttttctgaagtagtagatgaagatgggttactttggctggaagggaaacagaatctggatggatgggtctggcagggtaacagtattgatattacctatacaggggatgaagggatgaccaaagtcatccctgcaaaatccaaataa

SEQ ID NO: 17918 - DNA, 2739 bp, Homo sapiens
  SIMILAR (1591)..(2301): 871254mologous to Escherichia coli K12 putative ligase,accession number AE000494,Smith-Waterman Score=1056.
tcaagcaacagcgcattctgggcgcatgatccggtaaacacgtttggcattgatcgcaggcataccatcaagttctgcctgtctgcgaagcagcgcccatacccgacgataaccatacgttggcagctctccgataacatggtgtatacggagaagcacatccgtatcatcagtgtgacgactgcggcggccatccatccagtcatcggttcgttccccatccccgggcaataagggcgcgtgcgctatccacttttttgcccgtccatattcaacggcttctttgaggagttcattttccatcgttttcttgccgagcaggcgctggagttctttaatctgcttcatggcggcagcaagttcagaggcaggaacaacctgttctccggcggcgacagcagtaagacttccttcctggtattgcttacgccagagaaataactggctggctgctacaccatgttgccgggcaacgagggagaccgtcatccccggttcaaagctctgctgaacaattgcgatcttttccttgatgccatcaacattctcaatccacacgccgaagtggatgtgatgagccgctatccggtcagttcttcctggctgctcaaccgcccggtaatgggcgatccgctgttcgacgccattatccaggtcggcggatcgttttttgtcgatctctatggcgtgccgcagtttgaacatgcactttgcacgtttatggcgaaaaagccgctgtttatgattggtcacagtgttggcccgttccaggatgagcaatttaaccaactggcgaactacgtttttggtcactgcgacgcgctgatcctgcgcgaatcggtcctctttgaacgcctgagacatgcagtaccgccagcattgcccccccacccccaacatggcacatgtatacatatgtaacaaacctgcatgttgtgctttgaatttgatcaggatggagttagcgatacctttttcgataccttctttcaggatcttggtgttggttacgaacaggtcgtcaccaaccagctggattttgtcgcccagaactttggtctggtatgcgaaaccgtcccagtcagattcgtccagaccgtcttcgatagaaacgatcgggtactgtttggtcagttcttccaggaagtgagtgaattcttcagaggtgaacgctttgttgccttcgccagccagaacgtatttaccatctttgtagaattcagaagctgcgcagtccatcgccaaagtgatgtctttgcccagttcataaccagcagctttaacagcttcagcgataacagccagagcttcagcgttggaacccaggttcggcgcatagccaccttcgtcaccaacagcagtgttcatgcctttcgctttcagaacttttgccaggtgatggaaaacttcagaacccatgcggatggcttctttcacagttttcgcgccaaccggctgaatcatgaattcctggatatcaacgttgttgtcagcgttctcaccaccgttcatgatgttgatcatcggaacagagttgagaggcaagggattgagctgattcaggggtacgatgccagccagctcgagccgcagccggatctggtgattattggcaacgccatgacccgtggaaatccgtgtgtggaagcggtactggagaaaaatatccttttttttatcgaatcggatgagtatgactgcgcctttttcgacaaacgctctaaatttgttcattactgcccgcgtacgctgatcctcaacaaccttgagttcgatcacgccgatatctttgacgacctgaaagcgatccagaaacagttccaccatctggtgcgtatcgttccggggcagggccgtattatctggccggaaaatgacatcaacctgaaacagaccatggcgatgggctgctggagcgagcaggagctggtgggtgagcagggtcactggcaggcgaaaaagctgaccaccgatgcttccgaatgggaagttttgctggatggcgaaaaagtgggcgaagtgaaatggtcgctggtaggcgaacataatatgcacaatggcctgatggcgattgcagcggctcgccatgttggtgtagcgccggcagatgccgctaacgcgctgggttcgtttattaatgctcgtcgccgtctggagttgcgtggtgaagcgaatggcgtcacggtatatgacgattttgcccatcacccgacggcgattctggcaacgctggcggctctgcgtggcaaggccggtggtacggcgcttttggaaattgagagcaatgtgtgtatcacgggctgtaactactactccggtggtaatattcagttcacccgtgcctaattggatttgcccatatatttccagacatctgttatcacttaacccattacaagcccgctgccgcagatattcccgtggcgagcgataacccagcgcactatgcggatgccattcgttataatgctcgaacgcctctgcaaggttctttgctgccgttaacccgtctggtttgggcatgatactgatgtagtcacgctttatcgttttaacgaagctctctgctattccgttactctccgggctccgcaccgccgtgttcttcggctcgagtcccaacatccgggcgaactggcgtgtttcattagcccggtagcatgaaccattatccgtcagccactccactgggcacgacggaagatcggtgccgaagcggcattccaccgctcccagcat

SEQ ID NO: 17919 - DNA, 1346 bp, Homo sapiens
  SIMILAR (426)..(1040): 971254mologous to Escherichia coli K12 putative galactokinase (EC 2.7.1.6),accession number AE000295,Smith-Waterman Score=1026.
cagttcagattacagactacatccacttctacggttatcgcccggttaaatctttcgctattcgcattcctgccagttacaccattcacggaatagatgtttcgcgctggcaggagcggatcgactggcagcgggtggcaataatgcgcgacaatggtatccgcttacagtttgcttttattaaggcgacggaaggcgaaaagctggtggacccctatttttcgcgtaactggcaactaagccgcgaaaatggcctgctgcgtggggcgtatcattatttctccccgtcggtatccgcttcagttcatgcgagattatttctgcaaacggtggatttctcacaaaggcgatttcttgccgtgctggacgtagaagaacgggggagaattatcggcaaaagaatttacgcaagctggcagcaatacaatcgtggcgacagcgccatcctgcgcggcttacttgatgccatcaacattctcaatccacacgccgaagtggatgtgatgagccgctatccggtcagttcttcctggctgctcaaccgcccggtaatgggcgatccgctgttcctgcaaatgaaacaacacaacagcgcggcgggcgttgtcgggcgcgttaaaaaagtcctccgtcgccgctaccagcatcaggtattgctctcacgcgtcaccgacactggcaagctgcgcaatatcgccatcgcccagggattcaccgacttcgtgcgcctgctgtcaggttacgacgccattatccaggtcggcggatcgttttttgtcgatctctatggcgtgccgcagtttgaacatgcactttgcacgtttatggcgaaaaagccgctgtttatgattggtcacagtgttggcccgttccaggatgagcaatttaaccaactggcgaactacgtttttggtcactgcgacgcgctgatcctgcgcgaatcggtcagctttgatctgatgaaacgcagcaatatcaccaccgcaaaagtggaacatggcgtcgataccgcgtggctggctttggcaaaccacgccacgggcgcaaagctggataaacgcatcaccgccagcatcgtgccccacaaaataccaatcactaccgccgtgacggtgattttcagggtgatcaccagcccgtcgagcagatatggcaggcagctccggggattcacagataacagcccatggggagacatcggggataatttgccggctagtaaatcggagcgtgattcgcccgggtctgaaattaccaccttcattcggtttacaatgcttaattgctactggacaaactgtcgtcccagcagttctgtctttcctgtcagttcagctgctccctga

SEQ ID NO: 17920 - DNA, 1002 bp, Homo sapiens
  misc_feature (1)...(1002): n = a,t,c or g
tgctaaaggcactggcgctgggatgctgctgcggtcaaatagccacgggggtgctggcgtttgtggtgatgattgtgctgtcgcgccatccgctggtggtgaagtgaagcgtcagtttgtcgcagcgaaanaataaaatgctttacgggccgggttagttcttgtttccggtcccaccaccgtttgccgtatgcggggtaaaacgccttatccgtcctacgggttcctgtgctcgggacctgtaggcctgataagacgccgtcagcgtcgcatcaggcactgaatgccggatgcggcgtgaacgccttatccgtcctacggttctgtgctcgggtcttgtaggcctgataagacgcgtcagcgtcgcatcaggcaaaaagcggcaacgaacaaaacaaacgcagcctcacctggcatcaaatttatgaggaaaaaatgaaattacttattgtgggcaaccacacttgcggcaatcgtggcgacagcgccatcctgcgcggcttacttgatgccatcaacattctcaatccacacgccgcagtggatgtgatgagccgctatccggtcagttcttcctggctgctcaaccgcccgcatcaggtattgctctcacgcgtcaccgacactggcaagctgcgcaatatcgccatcgcccagggattcaccgacttcgtgcgcctgctgtcaggttacgacgccaatatcgcagggtcgattcgacaattcaaaggactcccggggtgccggatgcagcgtgaacgcctaatccggcctacggctcaggatttaccggtcaacgtggctcgctacgatcagcaaaatatgaatcttcgaaaagctgatcgaaaagcagctcttctttcttctggcgtccggaagaagttgacgtcttcccgcgaccgtatagattaccaggcgctgccggagcacgaaaaacacatctttatcagcaacctgaaatatcagacgctgctggattccattcagggtcgtagcccgaac

SEQ ID NO: 17921 - DNA, 1089 bp, Homo sapiens
  SIMILAR (655)..(1020): 991254mologous to Escherichia coli yejW,accession number U00008,Smith-Waterman Score=636.
ataaaaatggtactggaggcgggagaaaaaaaaggaaggggcggaggggcacaacgcggagaggatagggctcgtagaggaggcaagggcaagaggaaaaaaagagcggatgcaaaagggacaggggaatgggcgaaaggttgcggaggggcgagcgcgcccgaacgataggatggagaagaaaggggcaaacggggggggtccagaatgggagagaagaacgggagcgggcggtgaaaggtaaatagaaggggagcaggcaggaaagagaggggggtccggcagcacggagaggattgtaacgtggcggcccgacgttggacgaagatgaagggcaaagctcaaagccagtaaagaactggaatggtaaacgtttgggggggatgaacccccccagaaatgggaagctcatggtatgaggagggcccaaaatgagtgggggcgcatgaaggccaatacctcgcagaagtgccggtagctgtcccaacttcgagtatatggatacagccgcccagaaatcggttgccgcgaagatgcatgaccaggccggtgaaagatgggcaaacctgtattgattgccataaagggatagcgcacaagctgcccgatatgcgtgaagtcgagccaggtttttaacagggttattgcgtgggtatgcttgaagccagagagttactttgtgagcgggatgaacgaaccttatttagtggcttgtcatttacgctgaacgcaggagagtgggtacaaatcaccggtagcatcggcgcggggaagacaacgcttctccgtttgctgacggggttgtctcgccctgacgcaggcgaggttctctggcaagggcagcccttgcatcaggtacgcgacagctaccatcaaaacctgttatggataggccatcagccggggatcaaaacccggctgacggcgttagaaaatctgcacttttatcatcgcgatggcgataccgcacaatgtctggaagccctggcgcaggccgggcttgccggattcgaagatattcagggtacctcaacgggtcgtctcgcgtctctacaaggagaactccaaacactgttgaaagaatcatag

SEQ ID NO: 17922 - DNA, 324 bp, Homo sapiens
  SIMILAR (34)..(315): 351254mologous to Streptomyces coelicolor A3(2) putative membrane protein,accession number AL132674,Smith-Waterman Score=85.
atgcctgttactgcccttgaagaccttccagtgggacaagatatagaggtggaagacagtgatactgatgatcctgaccctgggagggccgccgtccaggtcacgagaaggcttgcgacccgctacacccctcccaagactgggagcgggcgcccagccttgcagggacacgcaggcggactcgaggagcaaacggccagtgagaacgattcaagggactcacccactcctcgccgtagcttgaccgtggctctggcaccaagaggtggcaccaaacctgccgccagccttggctttctcaccagtcgggctctgatgagttga

SEQ ID NO: 17923 - DNA, 845 bp, Homo sapiens
  SIMILAR (469)..(843): 891254mologous to Homo sapiens kinesin-like protein GAKIN,accession number AF279865,Smith-Waterman Score=599.
atgagtgtgtgcagcccctgcgatatcgagagtaatatcatcctctcgcccactggatatggcgaacaatatcacaggagggtgtgcaccacctacgatattgaaagtaatatcctctcgccccctgaatattgcgaacattattacaggggggagtgtactccctgcaatgttaaaagtaacatcatcctcttgctcctggatgttacgaacaatatcacagagactgacttgcataccaaatgtgtggtggatgtggatgcaaacaaggttattcttaatcctgtaaatacgaatctttccaaaggagatgcccgtgtatatgcctactacccatttttaaaaaggttaattgtaaaacagcctcaggcaggtctttcaggagttactacaaaagaaggcactgttatcacaggagatgacagctccatgcctgttactgcccctgaagaccttccagtgggacaagacgtggaggtggaagacggtgatactgatgatcctgaccctgtgtttgcttatgatcattgtttctggtctatggatgaatctgtcaaagaaaagtatgcaggtcaagatattgttttcaagtgccttggagagaatatcctgcagaatgcttttgatggctacaatgcatgtatctttgcctatggacagactggctctggaaaatcttataccatgatgggcacagctgaccaacctggattaatcccaagactttgcagtggactctttgaacgaactcagaaagaggaaaatgaagaacagagttttaaagtagaagtgtcctacatggaaatttataatgaaaaagttcgagaccttcttgatcccaaagg

SEQ ID NO: 17924 - DNA, 1095 bp, Homo sapiens
  SIMILAR (129)..(920): 361254mologous to Herpesvirus papio NTR,accession number AF200364,Smith-Waterman Score=173.
ttagtcgggagggggcgctgtgcgcaggcgcgaggtgacgccgcggcagggccggaaggagtgcagcggctgccacggagctcgcagctgcggcttctgaggagtaagcggcgcggtagcgaaggccgccgaacctgcctggctagccggcgacttgagtgacgagtgagtgtcggctgcggggcgcgctcgagctcctgggcgggtctgtgaggcgacgcggcctctctgaggggcgcctctgtggagctccgggggtgggggcgggggcgcgggccgtgagggccgccgagctgaggggcgcgggccgaggcccgggcgggatcgggccaaggggctgggctgggcgtctcgagcccggtgcggtggcgaggctggagcgacaaaggcgctgagcggccgggtggccccctctcgccacttcgcgaagtttcgcgggccggcccctcgggtctgctgcgcgagggcaacagcccgggagaccgcgcttccctcccccgggcccgaggccgccgcggaggcggtgtccgtgcacccgagcgcggcctggaggagcggcgggaggcgggccgtgcctgtgaaccccagcccaggcgggcggcgtttttcctcctcttccctcacatctggagcgcgtgttccgcgaaagttggcgactgtcacccggcactcgcgagggcgccgcaagtgcgtcaaacccttctgcggggcgctgggggctggcccggctcgggtgtccgggcgctgggcagcgagcgaggccgctgtccccgcgtcgaggtggttctgctcccggtggaacaggaccagggatccaagactctgggccacttgcaaccaacccggcactgtgggctcctgcgcagcctgagcctccccgacgagtgccgtcccctgctcctcggcgccggatcccattgaccgcccaagggctgaggagtgcaggcgcacagcacgggactggcaggcggctccaccctcttgatcagggctggctttgccatagattttagccatggataaactgagcgtgaggtagttctgcagcctgtacaggaagcgtggctggggaggcctcaggaaactgacagtcat

SEQ ID NO: 17925 - DNA, 604 bp, Homo sapiens
  SIMILAR (450)..(602): 941254mologous to Homo sapiens HTRM clone 693452 protein sequence,accession number Y73347,Smith-Waterman Score=251.
gaattcccgtttcgacgatttcgtgcagcggctgccacggagctcgtagctgcagctttggaggagtaagcggcgtggtagcgaaggtcgccgaacccgcctggctagccggcgagttgagtggcgactcttttgaaacagatggtcaccatgtttagatattagcagtcccgtatgtgcatgtctgcatttgaaaatgaaagagggaaacaacaatgaagaggtaattcacttgaacaactttcactgccatcggggacaagactttgtaattttcttctggaaaacccagattatccaaagagagaagacggaatcattataaatcccagtaggcggtctgctggccagccaagatgagacaaagttgcctaaaataagacttttttgactattctaaattgactcctcttgaccagcactgcttcatccaagctgctgacctcctcatggccgacttcaaagtgctcagtagtcaggacatcatgtgggccctgcacgagctcaaaggacactatgcaatcacccgaaaggccttttctgatgccattaaaaaatggcaggagctatcaccagaaaccagtggaaaaaggaaaaaaaaaaa

SEQ ID NO: 17926 - DNA, 2256 bp, Homo sapiens
  SIMILAR (1423)..(2088): 971254mologous to Homo sapiens HTRM clone 693452 protein sequence,accession number Y73347,Smith-Waterman Score=1169.
agacgtgccggaccggaattgccgggtcgacgatttcgtaggtgacgccgcggcaggctcggaaggagtgcattggctgccacggagctcgcatctgcggcttctgaggagtaagcggcgcggtagcgaaggccgtcgaacctgcctggctagccggcgacgttgagtgacgactcttttgaaacagatggtcaccatgtttagatattagcagtcccatatatgcatgtctgcatttgaaaatggaagagggaaacaacaatgaagaggtaattcacttgaacaactttcactgccatcggggacaagagtggatcaatctccgagatgggcccatcaccatatctgactcctcagatgaggaaaggattccaatgctggtcaccccagctcctcagcagcatgaagaagaggacctggatgatgatgtcatcctgacagaaacaaataaacctcagagatcacgacccaatctcatcaaaccagctgcccagtggcaagatctgaaaaggttgggagaagaaaggcctaaaaagtctagagcagcatttgaatcagataagagcagctatttttcagtgtgtaacaacccattgtttgattctggggcacaggatgattctgaggatgactacggtgaatttctggatcttgggcctcctggaatctctgaattcactaagccaagtggccaaacagaaagagaacccaagcctggaccgagtcataaccaagcagcaaatgacattgtcaaccccagatcagagcagaaagtcatcatcttggaagaaggtagccttctttacacagaaagcgatcctttggaaactcagaaccagtcatccgaagactcagagacagagctgttatcaaatctaggagagtcagctgctctagcagatgatcaggccatcgaagaagactgctggttagatcatccttacttccagtctctgaaccaacagccccgtgaaataacaaaccaggtcgttcctcaggaacggcagcctgaagcagaactgggccgcttgttgtttcagcatgaattcccagggcccgcttttccaaggccggaaccccagcaaggagagtttgaagaccagcagttagcaagtgatgatgaagagccaggtccagcctttccaatgcaagaatctcaagagcccaatttggaaaacatttgggggcaagaagctgcagaggtagatcaagagctcgttgaactactagtgaaagaaacgttgcctaaaatagacttttttgactattctaaattgacccctcttgaccagcgctgcttcatccaagctgctgacctcctcatggccgacttcaaagtgctcagtagtcaggacatcaagtgggccctgcacgagctcaaaggacactatgcaatcacccgaaaggccttgtctgatgccattaaaaaaatggcaggagctgtcaccagaaaccagtggaaaaaggaagaagagaaaacaaatgaaccagtattcttacattgatttcaagtttgaacaaggtgacataaaaatagaaaagaggatgttctttcttgaaaataagcgacgacattgtaggtcctatgaccgacgtgctctccttccagctgtgcaacaagagcaggagttctatgagcagaaaatcaaagagatggcagagcatgaagactttttgcttgccctacagatgaatgaagaacagtatcaaaaggatggccagctgattgagtgtcgctgctgctatggggaatttccattcgaggagctgacgcagggcgcaaatgctcacttgttctgcaaagagtgtctcatcagatatgcccaagaggcagtctttggatctggaaagttggagctcagctgcatggaaggcagctgcacgtgttcgttcccaaccagtgagctggagaaggtgctcccccagaccatcctgtataagtactatgagcgaaaagccgaggaggaggttgcggcagcctacgccgacgagcttgtcaggtgcccgtcctgtagctttccggctctgttggacagtgatgtgaagaggttcagctgtcctaatcctcactgccgaaagggctgctgcagcccctcaggtttctcccctcgaaactcgcagaggcaactgctgaccccccggcaggtggcagagcccacacccacctgcatttcagagccaaggaagtctagagtcagcgtgggctccgagaacccggcagcgacctggggcctcagatgtcgccgacctccctga

SEQ ID NO: 17927 - DNA, 5076 bp, Homo sapiens; identical to SEQ ID NO: 3974
  SIMILAR (1774)..(4986): 911254mologous to Homo sapiens putative p150,accession number U93563,Smith-Waterman Score=5076.

SEQ ID NO: 17928 - DNA, 2841 bp, Homo sapiens
  SIMILAR (2197)..(2832): 751254mologous to Homo sapiens p40,accession number U93572,Smith-Waterman Score=831.
atgaaggcctcaatgaattctaaatatccacttgcagatgctacgaaaagagagtttgaaaactgctctatgaaaagtttttatgtagatattcctgtttccaacgaaggcctcaaagcagtccaaataaccacttgcagtttctatgaaaagagtttttcaaaactgctctatgaaaaggcctcaaagctctacaaatgcccattgcagattctacaaaatgagtgtttcaaaactgctctatcaaaagaaagtttcaactcttttttatgtgaagatattcttgtttccaacgaaggcctcaaagcagtccaaatatccactggcagattccacgaaaagagtgtttcaaagctgctgtatgaaaagtttttatgtgaagatattcccatttccaacgaaggcctcaatgccatcaaaatatccacttgcagattctacgaaaagaatgtttcaaaactgctctatgaaaacgcctcgaagctctccaaatgtccacttgcacatactacaaaaagaatgtttcaaaactgctctatcataggaaaggttcaactctgtgaattgaatgcacatatcacaaagaagtttctcagaattcttctgtctagtttttatgtgaagatattcccatttccaacaaaggcctcaaaacagtctaaatacccccttgcagatactgcgaaaagagtgtttcaaaactgctctgtgaaaaggttctacgaaaagagcgtttcaaaactgctctatgaaaagggacacagggcacaagcccacctcctgtgtgaagatcctgccacagggtggttctttggttttctgcgggtatccagacaagaagctaaaggtgaatgcactccggaatccaggagcactggcgattttctctccttagctcagcgagcaaccccacagataacccctagccccaccccgggccacttgaatccatacaataaaatgtattggccagagaaatatgaggaagatgcacaagtggaaccccctgataaaaccgtcagatctcgtgagacttattcactaccaggagaacagtatgggggaagcgcccccatgattccaattatctaccaccaggtcccacccacaacacaggagaatgatgggaggacaattcaagatgagatttggctttggaacaaggctccctgcatcctggccactgcttcagctctaggtgtagctcaaattgatccagttacaactccagtcactgcttcagagtgtgcaagccataatcttggtagctttcatgtggtgttaggcctgtgggtttaccaaatgcaagtagttgagacttgggagcctccacctttatttcaaaggatgtatgaaaaagccaggagttggcagcctgatcctggcacaaaggttctgagggacatccagacacaccccaccacagtcactagcaaacccactcccaaacacacagatacacaggggcgcacgcgtgggaacacaagcacacacacagacacacaaagacacagacagcttgaagaagaacaagggacagagagatggagagatagaaacggaaggagagtgagaaacagcgatcgagagaaagacagagaagaacctgggagattgagagagagagcacgcaaggtggagagggaagtagagaaagggagaggggattttgtgtttgctgccctggctcctctagaagtaggactgtaccaccctcagattcctcgttggcctccgcaccccaacaaatgccaggaggtccagtacccgcagcacggcagcctgctgggtgcatgctcagtgggacagcttgggtaccctcaagctaagtcacaggggcaaaagtttacacgacattggtggcaatgggaaacagggtgcacagggacggatttcttcgtggctggcgaagacaatgtccttcccccggggaaagcagcccacgggttctggagccgaggtcttggctggcaactgtgggacctgctgccccaacttcgatggttgcggcggcgcttgatgaatgaattgaattgcctggggtccggggagcgggaagacaccccggagggcaggaaacccgcacctgcgccttccaggtctactacctgctgcagcgccctggctggagccgggctcctggtggggctgcagccaggcaaaagaggtgggatgctgccacctggcggtattgcagctgcagacccccacgaggaggaacgctgtgcctcaccagcaacagaacaaagctggacggagaatgactttgatgagttgagagaggaaggcttcagaagatcaaattactccgagctaaaggaggaagttcaaaccaatggcaaagaagttaaaaactttgaaaaaaaattagatgaatggcttactagaataaccaatgcagaagagtccttaaaggacctgatggagctgaaaaccatgacacgagaactatgtgatgaatgcacaagcctcagtaaccgatgtgatcaactggaagaaagggtatcagtgatggaagatgaaatgaatgaaatgaagcatgaagagaagtttagagaaaaaaccatacaaagaaacgaacaaagactccaagaaatatgggactatatgaaaagaccaaatctatgtctaattggtgtacatgaaagtgatggggagaatggaaccaagttggaaatcaatcagcaggatattatccaggagaacttccccaatctaacaaggcaggccaacattcacattcaggaaatacagagaatgtcacaaagatactcctcgagaagagcaactccaagacacgtcattgtcagattcactaatcttcacataaaaactacatag

SEQ ID NO: 17929 - DNA, 900 bp, Homo sapiens
  SIMILAR (874)..(716): 371254mologous to Homo sapiens Human epidermal protein- 2,accession number Y44985,Smith-Waterman Score=79.
atggggaatggccctaaagcaaaaagtactgctacaggctcatgcagaattgaacttatggctgttgaggccaacccacctcaaagaggcaaaaactgtcacagcagcaagatccagaggccttcatccgacccgggtgggatgaagagaagaattctcagcactgacccacagaaggaggcgggaggctgtggtgagatgaacagactagcgcccactctggctagctctcaagccaaacaaggacatccagtttcagttccaacacgtaaaaagcttggagttgtcactcccatccttatgataagaaaaaagctgaacaaacagaaactcagcaacctttcttggacccctcagagagctgaggttgcagaacaaactgccactgggaaatctgaagagatgggaatgcacaggctagagacatccatgggtgcaaaccgtaaccaaggagagaaggctgctgcaatctcagggataaaaacgaagacacaagggctcatggaaaaaaaagacaaagacagaaggagccgaggagggagttgccaagactcaagatcacatcgcaagcagaggaaaaaggatgcaaacaaagagatagcagatatttgggctcatccagggatgcctgctagccagggaggcaccacagaaaagcagtatgagaaggagctctcacatactggtccagggatggctgaacagattaagtttgacagtgtggaggtgtgtgtctgctgtgagctgcagcaccagtcgtccggctgcagcaacctcggggagacgctgaagctgaacccgctgcaggagaactgcaacgctgtgaggctgaccttgaaggtgaccccgctgggcgctgcttgtgcatgcatttcattccatgccttacagacagtttag

SEQ ID NO: 17930 - DNA, 373 bp, Homo sapiens
  SIMILAR (337)..(224): 391254mologous to Mycobacterium leprae No definition line found,accession number U00021,Smith-Waterman Score=68.
ttctcaccagtcaccgggagggtagaggatcaccaactgtcttcggaaagtttggaaagttttcttagtcattacgccaagtcagctggagctttatgtaacggggacaagcagaggtatgatggcattggaacggctgctcctcttttcggcagcagctctcacccgtcccctcctaactgccagggcagtgaccggccctacatcccctttgtgccctgtctgggctgggcctcgaccacggacatggttgggggcatgggctctgcaccgaggctgctccaggcattcacgtcacaaggcaagctgagcacatccacctgtgctttctgggagctctgcgtctgcatagaaagcaatgggcttcccaaag

SEQ ID NO: 17931 - DNA, 1020 bp, Homo sapiens
  SIMILAR (842)..(967): 501254mologous to Mus musculus unconventional myosin 9bc,accession number AF143687,Smith-Waterman Score=92.
tttcctctttctccctcattcttatctttcctctttctctttccctttaaatccttccctccgtcttcacccaccttcacctctgtctttgtgaaatctaaatctgctttactctaagcgtttcaataattcaggctccacagtccctcaggtgcccccagccctgctcctatactcccgtggtttcccaacagatctgcctgctgcggctgtgctccgctggcctctggggctcccgctccctgggagtcagctgggcatcatgttcctgcaccttttcagaagatgacaaagtgcaggcttgcaagggtgaatgtggctgctagagaggattcacctaaaattcgaagccaatccgagggaggagctcaacgagccctgggtctaggcccatgcagtgtgtccgaagttctgatgagctcttccggaaggtgggccataggccacgatgcccatctcacttggggttgccctcctgcatggcaaccctggcatcttacttcctcttcctcagcccctttgtgccctgtctgggctgggcctcgaccacggacatggttgggggcatgggctctgcactgaggctgctccaggtagagtccagctcacactctctggctacgggagttcatgcctctgcgccttcatctcttcaactgtcaaagggaataataatacctacgtcatggggtcctttgacatctacagagcttaaaacagtgtctgacaagcacttcataaacgttaggtattggtacgtgacccaagtcagcctgcccaacctttctctgtctccttttcccctcagaaacacagggatgagaaactctatttccttcctaagggagtttctgggggatcagagctgagaggcaggccccagccctaccttccctgccccgtctcacctactctttgcccatgggggcacttgtctctggccccaccttctgtccccccaactgcctgtgagtcctcttcggagctctggcccagcctgagctggacatgggcggagag

SEQ ID NO: 17932 - DNA, 1776 bp, Homo sapiens
  SIMILAR (370)..(1188): 381254mologous to Homo sapiens similar to human ankyrin 1(S08275),accession number D86982,Smith-Waterman Score=422.
atggcagtgcgggtgacggccgctcatacggcagaagcccaggccgaagccgggcgggaagcgggcgagggtgcagttgcggcggtggcggcggccttggcccccagcggcttcctcggcctcccggcgcccttcagcgaggaaggtaaccgggccgacccggagggtgcggccggggtgcgggcagttcatcccgggctggcagaggcccggatggcccgagctgcgggctcgaccgaccctcccagacccagacacctcgcggatctcgcgggaccctcacagccctccacgaaacccccaggaaagggctgggagcttggagccctggtcccagcactcatcctggctcagcgcgtagcctccctgggggccgccggagatggatggatgggcgtgtggaccagccgcgtgtgcggctgcgcacagctcctgggttccaccaagaagatcaatgtcaacttccaggacccggatggcttctcggctctgcaccatgcggccctgaacggcaacacggaattgatcagcctgctgctggaggcccaggccgctgtggacatcaaggacaacaaaggcaagactagccgagggcctctgggccggaaggagcccatgaagctggtgctgaaggcgggctcggccgtgaacatcccgtctgatgagggccacatccccctgcacctggcggcccagcatggtcactatgatgtgtctgagatgctgctacagcaccagtctaacccgtgcatggtggacaactcggggaagacgcccctggacctggcctgcgagttcggccgcgttggggtggtccagctgctcctcagcagcaatatgtgtgcggcgctgctggagccccggccgggagacgccaccgaccccaacggcaccagccctttgcacctcgcagctaaaaacggccacatcgacatcatcaggctcctcctccaagccggcatcgacattaaccgccagaccaagtccggcacggccctgcacgaggctgcgctctgcggaaagacagaggtggtgcggctgctgctggatagcgggatcaatgcccacgtgaggaacacctacagccagacagccctggacatcgtgcaccagttcaccacgtcccaggccagcagggagatcaagcagctgttgcgaggtgggcccaagccaggcaaaaggggcagtggctggggctggggctgggccagattcacccgcacgaatttggggggcccccttcctgattcccccaaagcccttaacgggcccttgcaggtccgggcgaccaaggattattgcaacatttacgacctgaccagcctcaacgtgaaggggggggacatcatcacagtcctcgagcagcatccggatggccggtggaagggctgcatccatgacaaccggacgggcaatgaccgggtgggctacttcccgtcctccctgggcgaggccattgtcaagcgagcaggcaagttccaccccaccctggggggcaggcaggagcccctgggcttgggggctggaagcagcgagtgtgctgaggccggcatcgacattaaccgccagaccaagtccggcacggccctgcacgaggctgcgctctgcggaaagacagaggtggtgcggctgctgctggatgtgagtgtggggcccaggggcgctgggcccagtggactcgactcggcggcggaaaagagcactggcagcatcctggacgacatcggcagcatgttagacgacctggcagaccagctggatgccatgttggagtga

SEQ ID NO: 17933 - DNA, 1893 bp, Homo sapiens
  SIMILAR (1351)..(1782): 321254mologous to Caenorhabditis elegans T01C1.3,accession number Z68010,Smith-Waterman Score=171.
gaagtatgtgatctttcagtcactcttaaagatgcctgtagatctcgaagtccctcacccccaccattatcacctatagaaactgaaggatttgaaaaattgaaagacgtcatctcagagatttcagccttagaaaataacaaacttgaagcaaacattaaccagcctccatctctcacaccagcagaaatcagcagcaataagagtgatcatcaagataaaatacttaaaactaaaaaatccagtaactcttattctttactctcaaatgacagcaataattctactacaaatcatgaaaaaggtgaaactgctgtaatttttcaagatttaatggatcgcattaatgaaaaactaaaatcaatagaaaccacggatatgacaagccttgtaaaattatctagcagtgattataatacatataatgatttaaaattgggagatttcataacatctctcttgcataatgcaaaagccagtgattatagttttatggaattattgagtcaacatgataaaaaggtagaaaataaaattattcagacaagatttcgaaagcgtcaagaaactttatttgcaatgcgcaactcctctgattcacccatgtttagaaggcagtctttacagataaaaagagaacttgctagtcttgatgaaaattttacaagaaaaaaatacaccgaaaaaagttcaaggaaattgacacaaaacaatgagatatcttcatcagacaaaggagaattctatcatgagcaagggcctaattgggatggagtgttagatctctctacaaagaaaaccagcataaaatctgaagagtcatccatatgtgatccttcttctgaaaattcagtggctgggagactacacagaaacagagaggactatgtggaaagaagtgctgagtttgcagatggtttgctctcaaaagctttgaaagacattcagtctggagcactggacataaataaagcaggcatactttatggcatacctcaaaaaactttacttcttcacttagaagccttaccagcagggaagcctgcatcttttaaaaacaaaactcgagatttccatgatagttattcatataaggacagtaaagaaacttgtgcagtgctgcaaaaagtagccttgtgggcaagagctcaagcagagcgcacagaaaaaagtaaactcaatctacttgaaacctcagaaataaaattcccaacagcttccacttacctccatcagctaactctacagaaaatggtcactcagtttaaagaaaaaaatgaaagcctccaatatgaaacttcaaatcttactgtccagttaaaaattcctcagctccgagtaagttctgtctcaaaatcacaacctgatggttctggtctgttggatgttatgtatcaagtttccaaaacctcttcagtcctagaaggatcagctctccaaaaactgaaaaatatactccctaaacagaacaaaatagaatgttctgggcctgtaactcactcaagtgttgactcttactttctacatggggacctctctcctttgtgtcttaattctaaaaatggaacagttgatggaacctctgaaaatactgaagatggaatagatcgaaaagacagtaagcagcccaggaaaaaacgtggccgctatcggcaatatgatcatgaaataatggaagaagctattgcaatggtaatgagcggaaaaatgagtgtttccaaagcacaaggaatttatggggtacctcacagcactttagaatacaaggtaaaagaaagatctggaacactgaagactcctccgaagaagaaactacgattaccagacactgggttatataatatgacagattcagggactggcagctgcaaaaacagcagcaagcctgtgtag

SEQ ID NO: 17934 - DNA, 759 bp, Homo sapiens
  SIMILAR (178)..(495): 971254mologous to Homo sapiens Human homologue of UNC-53 (Hs- UNC-53/2) sequence,accession number Y85565,Smith-Waterman Score= 520.
atgatcagagggcaagagggcaagaggactgagctctggtgcactctgatatttgaagttcagaaagagggagttacagctgccggccagcaaggtgggaggaaacctgggagcagagaggagaaactgttgctggagggagtaggaacggggccagatgctgctgggcggccaagaaacggcactgcccagtctgcagacctccgcatccgcaggcagcactcctcagacagcgtctccagcatcaacagtgccaccagccactccagcgtgggcagcaacatagagagtgactcaaagaagaagaagcggaagaactggttacgcagctccttcaagcaagctttcgggaagaagaagtccccaaaatctgcgtcctctcattcagatattgaggagatgacggattcttctttgccttcctcaccaaagttaccgcacaatgggtccacaggttccaccccactgctgaggaattctcactccaactctctttctgacaaagggagtcaaggagtcgtccttggaggaggcgatgaggccagtggaagaattgtggctggggacccctccactgctgagggagatgtcgatggactcacagctggtgtggaggctgctgacagactgaaagcccaggccatccttgctaactgcggaggagctgctggcgttggtgccccagacacacagaaatgctattctatgtcatctcccctgctcgtggccaaaaatgtgccatcagactacaaggaatga

SEQ ID NO: 17935 - DNA, 841 bp, Homo sapiens
  SIMILAR (378)..(94): 831254mologous to Homo sapiens Human homologue of UNC-53 (Hs- UNC-53/2) sequence,accession number Y85565,Smith-Waterman Score= 369.
aggctattcgacatttgggattcctaagctaatctttttatttttggaagggtgtctttctgagaaaggcagccagaggcacagcaccaacctttctgacagtgtggtcttcacactgttagttctgacaaagggagtcaaggagtcgtccttggaggaggcgatgaggccagtggaagaattgtggctggggacccctccactgctgagggagatgtcgatggactcacagctggtgtggaggctgctgacagactgaaagcccaggccatccttgctaactgcggaggagctgctggcgttggtgccccagggccaagacagccccggcctcttaccagttcctggggtcttcagtgcgcctgccggggctgaagccttcgtccttggcatggtgatgcccacctgaagctgtcatgcctcgccgccatgagcctgtctgggagatgacaggattcttcttgcccgacgtgcttttgtcggactcgtcagacacatcagaaggattccgcctccacttggaaacctgggctccatttttatgccgctgtctgagcctccgtctgatttcttgacatcatcaccagaccacagggaattcctctccacctgtgagtgcttctcagcatcagtctgtggacagagactctctgaattagtccttccccagtcccaggctgggaatccttctcactccaaaggcaaaaatgccaaaacactggagtagttaagggaaaaataagcattactttaaagatgtttggacttttgtactctggttatcttgttagaaagagtgatttttttttttttggaaaaaaaaataaaaaagtaaataata

SEQ ID NO: 17936 - DNA, 2006 bp, Homo sapiens
  SIMILAR (264)..(1928): 671254mologous to Homo sapiens Human homologue of UNC-53 (Hs- UNC-53/2) sequence,accession number Y85565,Smith-Waterman Score= 1647.
ccggcctgacctctcgatccttcagcacttcagaggttaattttgttgggggatcggatttctttcctggcctggggaatggtgatccctgctagctagtcctttagttacagagttgctgggtgcctgggattccctggcccagtgtgggctggctcagctggctaaaggacttgccatcctgtgagattcattcagcttctttgtccgctgttctccaagggccgcaatgtagagaaatgctctggcctaggaaccttacaagctgggacgacagcagctccgtcagcagcggcatcagcgacaccatagacaacctcagcactgatgacatcaacaccagcttctccatcagctcttatgccaacacacctgcctcctctcgaaaaaacctggatgtgcagactgatgctgagaagcactcacaggtggagaggaattccctgtggtctggtgatgatgtcaagaaatcagacggaggctcagacagcggcatataaatggagccaggttccaagtggaggcggaatccttctgatgtgtctgacgattccgacaaaagcacgtcgggcaagaagaatcctgtcatctcccagacaggctcatggcggcgaggcatgacagctcaggtgggcatcaccatgccaaggacgaagccttcagccccggcaggcgcactgaagaccccaggaactggaaaaacagacgacgcaaaggtgtctgagaaaggaaggctttctcctaaagcctcccaggtgaagcgctccccatcagatgcaggccggagcagtggtgacgaatccaaaaagcccctccccagcagttcttaggacaacttacttgcccaatgccaacagcttttgggttcaaagaagcaggagtggttccgccgcccggcctggccatgatcaacagccaagcggggtgacttgtcaccagcaggtcagccacactgggcaaaatcccaaaagtcatctgcactcgtcagtcggtctgctggtcggaagtcaagtatggatggggctcagaatcaggatgacgggtatctagccctaagctcccggacaaaccttcagtaccggagtttgccgaggcccagtaagtccaacagccggaacggggctgggaacaggtctagcaccagcagcatagattccaacattagcagcaagtccgcaggcctgccagtgcccaaactgagggagccttccaaaacagccctaggcagctctctaccaggtctggtcaaccaaccagacaaggagaaaggcatctcatcagacaacgagagtgtggcttcctgtaactcggtgaaagtgaatccggcagcccagcctgtgtccagtccggctcagaccagtctccagcctggagccaagtacccagatgtggcctctcccacactccgcaggctaatcttgctgatctctctcttaggaaaaacagacgacgcaaaggtgtctgagaaaggaaggctttctcctaaagcctcccaggtgaagcgctccccatcagatgcaggccggagcagtggtgacgaatccaaaaagcccctccccagcagctctaggacacctactgccaatgccaacagctttgggttcaagaagcagagtggttccgccgccggcctggccatgatcacagccagcggggtgactgtcaccagcagcagagagattgatcaagtagagaatttctgtgtggtggtaaaacatactaccaagcttcatgcgtcttttggaaaatgcattctcccgaacacttctgatgcactgaaacacacctgccaatcatcatctgtgggctgctccttcaagcaagctttcgggaagaagaagtccccaaaatctgcgtcctctcattcagatattgaggagatgacggattcttctttgccttcctcaccaaagttaccgcacaatgggtccacaggttccaccccactgctgaggaattctcactccaactctcttcccatcgtgttcaaccatcacttcctgtag

SEQ ID NO: 17937 - DNA, 490 bp, Homo sapiens
  SIMILAR (103)..(276): 811254mologous to Homo sapiens Human secreted protein, SEQ ID NO: 6777,accession number G02696,Smith-Waterman Score=254.
gcggccgcactgagagctttacgcccggaggcgtcggcgctgccactggcccgcgacgggaacggggcgaaaaggcggcggcaccatgttctccctcaagccgcccaaacccaccttcaggtcctacctcctgccaccgccccaggagaaattgtcgtaaatgaagtcaattttgtgagaaaatgcattgcaacagacacaagccagtacgatttgtggggaaagctgatatgcagtaacttcaaaatctcctttattacagatgacccaatgccattacagaaattccattacagaaaccttcttcttggtgaacacgatgtccctttaacatgtattgagcaaattgtcacagtaaacgaccacaagaggaagcagaaagtcctaggccccaaccagaaactgaaatttaatccaacagagttaattatttattgtaaagatttcagaattgtcagatttcgctttgatgaatcaggtcccgaaagtg

SEQ ID NO: 17938 - DNA, 775 bp, Homo sapiens
atgggccccggcgcccgcgtcggcctggctgtgcccggcccctccccgctcgggcgggcgctgcgccgtatccccgcccaaagggcctgggcggccgcactgagagctttacgcccggaggcgtcggcgctgccactggcccgcgacgggaacggggcgaaaaggcggcggcaccatgttctccctcaagccgcccaaacccaccttcaggtcctacctcctgccaccgccccagactgacgataagatcaattcggaaccgaagattaaaaaactggagccagtccttttgccaggagaaattgtcgtaaatgaagtcaattttgtgagaaaatgcattgcaacagacacaagccagtacgatttgtggggaaagctgatatgcagtaacttcaaaatctcctttattacagatgacccaatgccattacagaaattccattacagaaaccttcttcttggtgaacacgatgtccctttaacatgtattgagcaaattgtcacagtaaacgaccacaagaggaagcagaaagtcctaggccccaaccagaaactgaaatttaatccaacagagttaattatttattgtaaagatttcagaattgtcagatttcgctttgatgaatcaggtcccgaaagtgctaaaaaggtatgccttgcaatagctcattattcccagccaacagacctccagctactctttgcatttgaatatgttgggaaaaaataccacaattcagcaaacaaaattaatggaattccctcaggagatgga

SEQ ID NO: 17939 - DNA, 451 bp, Homo sapiens
  SIMILAR (218)..(451): 1001254mologous to Homo sapiens NIR3,accession number AF334585,Smith-Waterman Score=421.
cggccgcgccgagcggggatgctggcacgtgtgttctgtgtcctcaacaaccttctgtgagcctagggacccatttctcctcctttgacagggacatcagtggagccttctcagacccacaggggtccttggtgaattttgtcatggttatttaaggaaccttgcctagaagtcccaacttgcagttccccatcgacgggaaggcttggactccaagatgattataaaggaatatcggattcctctgccaatgaccgtggaggagtaccgcatcgcccagctgtacatgatacagaagaagagccgtaacgagacatatggcgaaggcagcggcgtggagatcctggagaaccggccgtacacagatggcccaggcggctctgggcagtacacacacaaggtgtatcatgtgggcatgcacattcccagctggttccgctccatcctgccc

SEQ ID NO: 17940 - DNA, 207 bp, Homo sapiens; identical to SEQ ID NO: 14654
  SIMILAR (1)..(159): 731254mologous to Mus musculus Pro-Pol-dUTPase polyprotein,accession number Y12713,Smith-Waterman Score=185.

SEQ ID NO: 17941 - DNA, 681 bp, Homo sapiens; identical to SEQ ID NO: 4504
  SIMILAR (1)..(417): 871254mologous to Cloning vector pZC320 SopA,accession number U26464,Smith-Waterman Score=605.

SEQ ID NO: 17942 - DNA, 1445 bp, Homo sapiens
  SIMILAR (411)..(1277): 611254mologous to Mus musculus Pro-Pol-dUTPase polyprotein,accession number Y12713,Smith-Waterman Score=844.
aatacagtccttggtgtaaactgtttagagagttatgcaaaataaatgtgtttgacacttgattcaccactcttgagcggcaaggagtttaatgacactacacataatacctttgaccatatgtggagaaccaaggaacataatgaagctggttggttgctcctaagttcagtggacaaagtgatgaaagaaaatgatgaactcagggattctaactcctggcttcagaagcaggtattaacccctcaaatctgctaagactgccctaagtgggagtcttaactcctgtagagaaaaagctgaaattgtggaaaaacagacacaatctcttaccatgtgagtggctgacctgcaacgaaagatattatagtgggaaccacagtcattcaactacaaaatttaaatacaatggtaataattggatcctgaggtggcatgggccaagtggtggcactcaagcatcaaggcaaggagacctctggccttttaccagggtaactgtgcactggggaaagggaaataatcagacatttcagggacaactggacactggctctgagctgacgttgattccaggggacccaaaacgtcattatggtcctccagttaaagtaggggcttacggagaatgcacaattggcatagacgtacttagcacctggcagaacactcaaattggcatcctgactggtagagtgagggctattatgttggcaaaggccaagtggaaagcattagagctgcctctacctagaaaaatagtaaatccaaaacaatatcacatccctggggggaccgcagagattagtgccaccatcaaggacttgaaagacgcaggggcagtgattcccaccacatctctgttcagctatcccatttggccagtgcagaagacagatggatcttggagaatgtcagtggattatcataagcttaaccaagtagtgactctaattacagatgctgtaccagatgtggtttcattgcttgagcaaattaacacatctgctggtacctggtatgcagtcattgatttggcaaatgcctttttctccatttatgtctataaagcccaccaggagcaatttgccttcagctggcaaggccaaaaatatacctttattgtcctacctcaggggtatatcaactctctgtctttgcatcctaattttattcaaagagaccttgatcactttttgcttccacaagatatcccactggtccattatattgatgacattatgctgattggatccatgacccaaaaggctgccagctttgagtggggtccagaacagcagaagaccctgcaaaaggcccaggctgctgtgcacgctgctctgccacttgggccatatgacccagcagatccaatggtgtttgaggtgtcactggcagataaggatgctgtttggagcctttggcaggcccccatatttgaataa

SEQ ID NO: 17943 - DNA, 1746 bp, Homo sapiens
  SIMILAR (1104)..(835): 451254mologous to Xylella fastidiosa phage-related protein,accession number AE003986,Smith-Waterman Score=183.
tcatcttctaacttctcccctaatcccggttccggttcgggtgtttcttccgggttcgcgaatgttgatgttattaccatccttgagtttgaactcaggggcaatggatcgcagcgtgtctcgagcttcttccagatcgatgatttgctcagtgatagccttcgtgactgactcaacgttattcttcgtgatctctgattcctctttcttactaggaacagacaaaggctcaaactcgatcgaccactcctcctcatcaacaatgaacggcaacaagaactcaagaagtggcctgtaatcttcctcgcgcttgcgatcgactagcttatagaaagtctcaagcgctgtgttttggctcgctgatacgccgcctacgttcttattcttgatgataatctcatgaatcccggatagggagacaatgcggtccatcttgcttgataagaactcaggaactccgctgatatcagagttgagaacgtcatattcctcagtctcagcatcgataccgatcgcacgacctacgccggagttatcatcaacctgagcaagtcgcaggcgcgcggcatactgagcatcatcatcatcacacatttcggcaagacctttgaccttccatacagcctgttgcttacgtcgcaagatctgagtggccagagattcacagtaatcatagtcacagattgcatcaatcagtgatttgttcaataccgacgctccccatccttgattctgtttgcgaatctgaggggttactcgctcaccatcagcaataaaaattcgcttaaccatcccggcgagtcgcttcattctctcgataggatcatcaatggtcagcaattctatgttcgccgcatccatgaagttatcgacgatatcatcatgcggatgggtgtcatcgtaagtaaaggcgctgtgctcagcgataatttcagcaagcatagggtgctcttctggcagaaccacacgcccggctttaataactggctgagcatccatagctcgggtaactttatctttgttacgctgcaatggagtgatggatatcggagtctttttccttaggttctggattaagcccgtaccgctcgccttatcgcgaatgccgtcgataaagtaaaccttatcattcttcttgccccacaaacaaaataccgtgtagtcgtttagctcgcctgtcttctgagcggtatcggcagtgatgaatcggtaatcatatttaccaggatctggctcatcagcgtcaaggctgttgccgtaataagtccaccactctgagttaaacacggagccacccagcgcgatcggcttctgctgatactgagaatcaaaggtatactgatctgcttctcgtaaagctagcaggtcgtgcacactttccttgctgggccaaaaggaataatgcttaacaccgtccaattcaacatactcagacgacaaaacgtctcgctcaaagtaaggctgcaaccagtcaggaagcgtctttccgtattcttcagtaacaagcgccgggattgatatttggtcgaactcgatacccatgccgccattcatcatgaaccatgttgaatcctgagcatgtagtcgttgctgaattgcaataataggcgtctcgttatgcatacgacgggatcgaatggtgtttttcaatagcatgtgcgtacgctcacgcttaacctttgagaacatatcatcaggcttgtcgatatcgtcgagcattaccatgccggagaatcccggagtcat

SEQ ID NO: 17944 - DNA, 1097 bp, Homo sapiens
  SIMILAR (3)..(263): 441254mologous to Xylella fastidiosa phage-related protein,accession number AE003986,Smith-Waterman Score=173.
ataaggcgagcggtacgggcttaatccagaacctaaggaaaaagactccgatatccatcactccattgcagcgtaacaaagataaagttacccgagctatggatgctcagccagttattaaagccgggcgtgtggttctgccagaagagcaccctatgcttgctgaaattatcgctgagcacagcgcctttacttacgatgacacccatccgcatgatgatatcgtcgataacttcatggatgcggcgaacatagaattgctgaccattgatgatcctatcgagagaatgaagcgactcgccgggatggttaagcgaatttttattgctgatggtgagcgagtaacccctcagattcgcaaacagaatcaaggatggggagcgtcggtattgaacaaatcactgattgatgcaatctgtgactatgattactgtgaatctctggccactcagatcttgcgacgtaagcaacaggctgtatggaaggtcaaaggtcttgccgaaatgtgtgatgatgatgatgctcagtatgccgcgcgcctgcgacttgctcaggttgatgataactccggcgtaggtcgtgcgatcggtatcgatgctgagactgaggaatatgacgttctcaactctgatatcagcggagttcctgagttcttatcaagcaagatggaccgcattgtctccctatccgggattcatgagattatcatcaagaataagaacgtaggcggcgtatcagcgagccaaaacacagcgcttgagactttctataagctagtcgatcgcaagcgcgaggaagattacaggccacttcttgagttcttgttgccgttcattgttgatgaggaggagtggtcgatcgagtttgagcctttgtctgttcctagtaagaaagaggaatcagagatcacgaagaataacgttgagtcagtcacgaaggctatcactgagcaaatcatcgatctggaagaagctcgagacacgctgcgatccattgcccctgagttcaaactcaaggatggtaataacatcaacattcgcgaacccggaagaaacacccgaaccggaaccgggattaggggagaagttagaagatga

SEQ ID NO: 17945 - DNA, 1503 bp, Homo sapiens
  SIMILAR (1)..(573): 881254mologous to Escherichia coli, LBB84, plasmid pXT107, IS10L/R-1, Peptide PlasmidTransposonInsertionMutant, 402 aa transposase,accession number S67119,Smith-Waterman Score=878.
atgtgcgaactcgatattttacacgactctctttaccaattctgccccgaattacacttaaaacgactcaacagcttaacgttggcttgccacgcattacttgactgtaaaactctcactcttaccgaacttggccgtaacctgccaaccaaagcgagaacaaaacataacatcaaacgaatcgaccgattgttaggtaatcgtcacctacacaaagagcgactcgctgtataccgttggcatgctagctttatctgttcgggcaatacgatgcccattgtacttgttgactggtctgatattcgtgagcaaaaacgacttatggtattgcgagcttcagtcgcactacacggtcgttctgttactctttatgagaaagcgttcccgctttcagagcaatgttcaaagaaagctcatgaccaatttctagccgaccttgcgagcattctaccgagtaacaccacaccgctcattgtcagtgatgctggctttaaagtgccatgcttgggtgacgttctttgctggtccagactatacgggggggctgggtttgtggcaatcataaaagacaacagaatgctaaccagccccgttaaacctggagctaaacttgagggcgtgcgtgtttacgatcgatttgcaatcaccgttgaaaagagagtaaccaatgctcgatcgcctcgctatggtgagcctgagggggacaatgtatctcctggcgattatcttcaaccttacttaatccaccacacaagaatttttattgctgatggtgagcgagtaacccctcagattcacaaacagaatcaaggatggggagcgtcagtattgaacaaatcactgattgatgcaatctgtgactatgattactgtgaatctctggccactcagatcttgctacgtaagcaacaggctgtatggaaggttgatgataactccggcgtaagtcgtgcgatcggtatcgatgctgagactgaggaatatgacgttctcatctctgatatcagcggagttcctgagttcttatcaagcaagatggaccgcattgtctccctatccgggattcatgagattatcatcaagaataagaacgtaggcggcgtatcagcgagccaaaacacagcgcttgagactttctataagctagtcgatcgcaagcgcgagaaagattacaggccacttcttgagttcttgttgccgttcattgttgatgagaaggagtggtcgatcgagtttgagcctttgtctgttcctagtaagaaagaggaatcagagatcacgaagaataacgttgagtcagtcacgaaggctatcactgagcaaatcatcgatctggaagaagctcgagacacgctgcgatccattgcccctgagttcaaactcaaggatggtaataacatcaacattcgcgaaccggaagaaacaaccgaaccggaaccgggattaggggagaagttagaagatgataatcctcgcgttcgcatcacagtggacgtatcgtga

SEQ ID NO: 17946 - DNA, 6217 bp, Homo sapiens
  SIMILAR (199)..(1836): 771254mologous to Loligo forbesi neurofilament-like protein,accession number X66695,Smith-Waterman Score=1973.
atggaggacaatctaatctcaatcaacaaaatcaagatcctgttagctgtatctgatggtgaaattgacgaaacattcagcctaaagcagttgatgtttaactcagtcccggtgcaaaacgaggatggatcgttcaacttcgaaggggtaaaggctgaattcaggccgggaactcagacgcaggaatacatcaagggaatggaagatagctctagtgaggtaactgtaaatcgtgaggttactaccgataacccatacacgatctcagtaaccaacaaaacgctgtcggcaatccgtatcaaaatgttcatgcctcgcggcgtacgaattgaaagtaacggtgataaaaatggcgttcgagttgagtacgaggtgcagcaagcggttgatggcggttcgtttgagactgttcttactgacgtaatcgaaggtaaaacaatgtcaggttatgatcgaagccgtcgcgtaaacctgcctaacttcaacaatcaggtaatattcagagttgttcgaaagacgcctgattccaatgactcgaatgtcgttgatgcaatccaggtaagaagctatgctgaggtcattgatgccaagttccgatatcctctgactggtcttcttttcgtagagttcgattcgaagatgttccccaaccagttacctacgatctcaattcgtaagcgctggaagattgtaaacgttccgtcgaactacgatccagaatcgcgaacatacaacggcaattgggatggcactttcaaaaaagcatggactaataatccggcatgggttctttatgacctgatgattaatcagcgttatggtctggatcagaaagagcttggaatctccgtagacaaatgggcgctctatgaggcggcgcaatattgcgaccagatggtccctgacggcaaaggcggcacggaacctcgctacctttgtgacgtgataatccagtctcagactgatgcgtacaaggtggttcgagatatttgctcaatcttccgtggaatgagtttttggaatggtgaaagcatttctgtaatcatcgacaggccgcgtgaacctgcgtacatcttcactaacgacaacgtagttaatggtgacttctcatatactttcgcaagcgagaagagcatgtacacgacgtgcaacgtgatgtttgatgatgagcaaaacatgtatcaacaggacgttgagccagtattcgatcgtgaggccactctacggttcgggaacaacgtaacgagcattacagcgatcgggtgcacacgtcgaagcgaggccaaccgacgcgggagatggattctgaaaaccaacctccgcagcactacggtaaacttcgctaccggactggaagggatgattccgacaatcggagacgtggtggcaatatctgataacttctggtcaagtaacttgacgatgaacctgtcagggcgattgctcgaagtgtcaggtagtcagattttcctgccgttccgcgttgatgcgcgcgcaggtgactttattatcgtaaataagccagatggcaagcccgtgaagcgcacaatctcaagtgttagtgcggatggtaagaccatagagattaacatcggctttggctttcctgtgaagcctaacacggtattcgcaatcgaccgcaccgaccttgcgttgcagcagtacgtagttacaaaaatcgacaagggcgatgatgatgaggaatttacctacaaaatcacggcggtggagtacgatcctaataagtacgatgaaattgattacggggttaacatcgacgaccgaccgacaagcatcgttgagccagatcagatccctaagcctgaaaacgtgaaagtgtcctcagagtcgagaatcgtccaggggatgagcgtagaaacgatgattgttagctgggataaagtgccgtacgcagttttctatgacgtacagtggagaaaggataacggcaactggcaaaacgttccgcagacagcaaacaaagaggtttatgttgaagggatttacgctggcaactatcaggttcgcgtgcgctccgtcgctggttcgggcacgacttcaggctggtcaaatatcgtcgcggcaacgttgacgggtaaacagggtgaaccgggccgaccgattaacctcacagctacggatgatgttgtttttggtatccgtacaaaatgggggttctctgatggttctggagatacagcctatacagagttgcaacagtcaccggatggaacagtggataacgcaagtttgctttcattgattccgtatccgcagcatgagtattatcactcaccgatgccggggaggacggttgacaggatcggtaacgtatctcagtggactgattttgtcagaggcatggcatcaacaaacgttgacgatatcatcggcgagatttctgtcgatatcgaaaactcgccgggttacgagtggcttgttgataacgcaaccgacaacgcgtcgcagaacgcagctaatgcagaggcagcaattgagaacgcactagctaatgacaaagacgcgatctacatgaagaaggagaacggaaaacgaaaagcagagtacaccaaatcactgaagctaattgctgatgagactgaggcgcgagtaacagcagttgagcagttagggcaagttttgattagcgcaagcaatagcgaattgcgtgaagttatcgcaactgaaaccggagcgctatcgcgtgaaattgaccaactcaaggcagagattggtgatgatattcaggcaagtttgactgatatcagagaggctatagcaaacgagactgaggcgagaacgcaagctgacttgtcattaagccgaggcttgggaataatgaggcagcactttctcaaaaacttgattcgtggagcaatgcggattcgactggtgcaattccagggtggtaatttcaaagagctatacaagaaaaaattcggcactgtactagcgaaaaaccgcgcgatgacgccagaacaactattcgatctgtcggtgaagtatttcgaatgggccgaggacaacgcgataaaggcgtcagaatcagccagctttcagggtggcgtttatgaatcgcttgttcataagccgcgcgtcttcacctggaccggataccgactatttatcggtgcaagcgaggccgcaatcattaagtggaagcgtgaggaagaatacagtgaggttatggagttcgtggaatccgtaatcaacgagcaaaaatttcagcttgccgcaaacggcgttattaacgcctcatttatcggcaaggatctcggaatcgacaagccagcttcaataaacatcgaaaactcggcagcttcagcgtcgaccgctgtcgccactactgaggaagcaatgaaagaggctaagttggcgatcaagaaaatgagcgaggccaatttcgaaaaaatgattcggatctggtttcagcttatgcaggctcagcagttccagcctaactggcatcacctttacctatgtcacgaagtggaggaaattattgcaggccgacgcggtaacactatctttaacgtcacgccaggctccggtaaaactgaagtgttctcaattcaccttccggtgtacgcaatgctcaagtgtaaaaaggtgcgaaaccttaacgtatcgtttgccgacagcttagttaagcgcaacagtaagcgcgtccgtgagattatcagcagcaacgaatttcaagagctatggccctgcaaatttggcacatcgaaagacgaagagatgcaggttcttaacgaagacggaaaggtttggtttgagctaatctccgcagcggctggtggtcgtattactggttcgcgtggtggctacatgactccgggattctccggcatggtaatgctcgacgatatcgacaagcctgatgatatgttctcaaaggttaagcgtgagcgtacgcacatgctattgaaaaacaccattcgatcccgtcgtatgcataacgagacgcctattattgcaattcagcaacgactacatgctcaggattcaacatggttcatgatgaatggcggcatgggtatcgagttcgaccaaatatcaatcccggcgcttgttactgaagaatacggaaagacgcttcctgactggttgcagccttactttgagcgagacgttttgtcgtctgagtatgttgaattggacggtgttaagcattattccttttggcccagcaaggaaagtgtgcacgacctgctagctttacgagaagcagatcagtatacctttgattctcagtatcagcagaagccgatcgcgctgggtggctccgtgtttaactcagagtggtggacttattacggcaacagccttgacgctgatgagccagatcctggtaaatatgattaccgattcatcactgccgataccgctcagaagacaggcgagctaaacgactacacggtattttgtttgtggggcaagaagaatgataaggtttactttatcgacggcattcgcggtaagtgggaagcgccggatatggagaggcaatttacagctttcgtcaatcaggcatggaggcacaataaatcaatgggggtacttcgtaaaatctatgtggaagataaggcgagcggtacgggcttaatccagaacctaaggaaaaagactccgatatccatcactccattgcagcgtaacaaagataaagttacccgagctatggatgctcagccagttattaaagccgggcgtgtggttctgccagaagagcaccctatgcttgctgaaattatcgctgagcacagcgcctttacttacgatgacacccatccgcatgatgatatcgtcgataacttcatggatgcggcgaacatagaattgctgaccattgatgatcctatcgagagaatgaagcgactcgccgggatgggctgtcaattgacggccctttttattggaggaaacatgaaaattgttaagcatgatggatataacgatatttttaacggcggtgcagacggatcgcctaagccattctttatgtctgatgcatcatatcacgtcggatctttctacaacgacaacgcaaccgcgaagcgaattgtggatgttatcccggaagagatggtgacggctggatttaaaatgtcaggcgtcaaggatgaaaaagagttcaagtctctgtgggatagttacaaaattgattctagcttggttgacgttctttgctggtcgagactatacggtggggctgctattgtggcaatcatcaaagacaacagaatgctaaccagccccgttaaacctggagctaaacttgagggcgtgcgtgtttacgatcgatttgcaatcaccgttgaaaagagagtaaccaatgctcgatcgcctcgctatggtgagcctgagatatacaatgtatctgcctggcgataatcttcaaccttacttaatccaccacacaagaatttttattgctgatggtgagcgagtaacccctcagattcgcaaacagaatcaaggatggggagcgtcggtattgaacaaatcactgattgatgcaatctgtgactatgattactgtgaatctctggccactcagatcttgcgacgtaagcaacaggctgtatggaaggtcaaaggtcttgccgaaatgtgtgatgatgatgatgctcagtatgccgcgcgcctgcgacttgctcaggttgatgataactccggcgtaggtcgtgcgatcggtatcgatgctgagactgaggaatatgacgttctcaactctgatatcagcggagttcctgagttcttatcaagcaagatggaccgcattgtctccctatccgggattcatgagattatcatcaagaataagaacgtaagccgcgtatcaagggagccaaaaccacagccgctggagactttctataagctagtcgatcgcaagcgcgaggaagattacaggccacttcttgagttcttgttgccgttcattgttgatgaggaggagtggtcgatcgagtttgagcctttgtctgttcctagtaagaaagaggaatcagagatcacgaagaataacgttgagtcagtcacgaaggctatcactgagcaaatcatcgatctggaagaagctcgagacacgctgcgatccattgcccctgagttcaaactcaaggatggtaataacatcaacattcgcgaaccggaagaaacaaccgaaccggaaccgggattaggggagaagttagaagatgaaaattaa

SEQ ID NO: 17947 - DNA, 2007 bp, Homo sapiens
  SIMILAR (789)..(40): 221254mologous to Xylella fastidiosa hypothetical protein,accession number AE003986,Smith-Waterman Score=120.
tcatgaataacagacactcttgtcgctctggaaattccgaggatttagagggtacttcccaggaaccagcacgcctttagtgcctgcgccgtcaatatcctcaagctctgcgatagagtcgatttcgataccggagttctgagacttgaaatagtccagataagacatggtagtctcaggcatacgaatcgccagcaccttacgcatggacggcgggatcagaatgttggtagctcggtgctggcctcgagtaatcgtctcgatggtttcgatcgcctgagtcaattccgcttcagccgtttccggtttctgagttgcgccatccatccacttaccggaggttatttttttgatgtttggatgattgtacacgggcacaatcttgtgcggcgcggaacctttgaacaccaggcggttaacaagctgatcatgcgccaactggcacgcacttgccttacgggttgacagtgggcgaccagttgcctgacctgctttgatttcgtcgattgagatcagatacgcgttacccagacggaacaccttgccaaactcagaagtacccagggcatcaacaagcggcaggtcatcggtgtagtcagcgataatctgagccgtaccaaccttatcaaaggtcatatattcaaacgtcttgtcggtcggagatagatcggttgtaaccgggaatacgcgtagagcggagcctaccgggtagtcttcttcataggactggcttttgatgcggtgtagttccttagcggtccagatacccatcgttgcggctgcatcctgttttacgccagcctctggcgttggcactgcttctacgctataagcaatggtcgccgtcgtcttgctggcatcgttagccgtccaggtaatattgaaatcaccgactgactctccaccaacaggagttacaagacctgagtccggatcgacagtggcgatattggtagcgtcgattgaccatttgccagtcttatcagttgcattagccggaagagcattagcgcgaagcattgagtgagagtatttccccccggcggcgaaatcaggctccatcgcctggcgcgcaaggtttaattcacgcatagcattacggctaacagagagaacaacgttgtcctccttcatgatgttgtgcacgagtctgtaatatttgctaaccagtccgcgatcgacttctttatacagtgcatcaccattttcatcacaaagaatacgagtacctaaaagcggttcctctcgaaccaggaggaaacgctcagatacaccgataccgcgctggcctgcgtccatgatacccttgattgtttcatcctgagcaattacgcagattgaaccgaccggacaaagagacaagttattgtccttgcactgccgccactttcgcaagaccttcaggtgtaggatctgatacccgcgaaacaatatcagccatcttcttgatcttctcttcagtttttttttgtcctcgtacagagccgccgtcgtgttaccctccgggtcgtttttgatttccttctcgacctgacgtagctgactggttaaacggatacgttcatttttacgctcttcattcagtcgctgaatctccgcacgcataggcgtaatcgccgctgagttaatcgctgatttgcctgttgatggtggctgactgattaccatgtaaagcgctgtcggctgttcttctccatgatattgcacccaaaacttcccgagcatcgcggctgagatgcaaccgataaaatgagcatacgcggatgaaaccgggaactggactgattcagcttttgcttttgcatattcgaataccaagttatcgccacctaaagaaatcagagggaacttatcgtttccgctgttgatatcgatcggatcttgccaaaaagaaactgaatccccgtaactgttttcacgaattgcgatcgccaccggattcactccagtgctatttgcgatctcaataatctgttggtaattcagttttggcttaatattaaacat

SEQ ID NO: 17948 - DNA, 4974 bp, Homo sapiens
  SIMILAR (4085)..(1227): 221254mologous to Streptococcus gordonii streptococcal hemagglutinin,accession number AB029393,Smith-Waterman Score=181.
atgtcagatggcttggactcaacagccacctgggcgctccttctcagggacacctgcatacgtgttcccagatggcctatggggttattgtcacatgccagcacccacagctatgtgctggccccacatgcagatgcacaggtacctttgaggtcccacctacaagccagcacccacagctatgtgctggccccacatgcagatgcacaggtacctttgaggtcccacctacacgccagcacccatagctatgtgctggccccacatgcagatgcacaggtacctttgaggccccacctacacgccagcacccacagctatgtgctggccccacatgcagatgcacaggtacctttgaggtcccacctacacaccaacacccacagctatgtgctggccccacatgcagatgcacaggcacctttgaggtccaacctacacgccagcacccacagctatgtgctggccccacatgcagatgcacaggcaccttttaggccccacctacacgccagcacccatagctatgtgctggccccacatgcagatgcacaggcacctttgaggtcccacctacacgccagcacccacagctatgtgctggccccacatgcagatgcacaggcacctttgagatgcacaggcacctttgaggccccacctctaatgacaccggccagtgccctcggcaccaggggtgaggcccagtgtggaagagctttgcaaggcttttcccctggacctcacagctgccctgagaataagtgctcgctgcccaaaggaggcatcgcttggttaagtagcttgcacagagcacatgcaggagggaacagggctttgtcagcagtcaaagctgctgtgctgggggctcctggctatgtgcgaggcatcatgctaggcccagtgaagcctgcagtgaggactggtgtcctcatgagaagaggaagagaccccaggagtacgtgcacactgaggaaaggccatgtgaggacacagggaaaaggcagccatcaggcagccaagatgaggcttcaggagaaaccaaacctgtggcgtcttgatcttggatttccagtctgtggtgcagcagacagcagtaatcagagcggtctgggaaccactcagtctgtgtcagtgcagcctggtgagttcagaagactcctttgttttgagctgtggaacaagaggaaaggaattttccacaggagattaaaaatgaaggcaaagcaaagattcgattcagtaaaaatcaaggcgcactttgatgataacggttttttagttgaccgcccaatcgtggcgcgaatcggtgctcaggtttacaagactccgcacggcgatcgcgttgagttccgtccggcgtccgaagttttcaagcaagactccttgcaaagttttgcggggaagccaattactgttggtcacgtaacggtaactccgcagaatgctagggacgttgatgtcggatcgtgtgctggtgctggtattgcttcacgggttggcgttgaaatttctttgagtattgacagcgactacgcgatcagcaaagcgaagcgtgcggaggccggggaattatctgtagggtacacgtcggtagatattgataagccaggctggggttcaaacgagactggagaatatatcttcgaagaggatatgaaacaggacgaagcgccgcctgaaggttgggtgaaattcgacgcggtacagactaatatcaaggagttcccgtatgataataacgttcaattaactaacgaggacaagcaaatgaaaaaaattaagatcgactcagttgatgtggaagtaaccgaagacgttgcgaaccatatcgaaaaattaaccgcgcagattgccaccattcaaaggaaagctgatggcttcgaagctgagcgcgatgcgctgaaggttaaggttgactccctgccggaactggttaaggccgaggtagagaagcaaaaagccgatgccgccgcacgcgcagaagttaccgcagtagcagaaaccgcaggcgtcaaacatgatggtcttgatatcaaagacgtcaaaattgctgtggttaaagccatgcttgataaagatgttagtgaaaaatcagacgcatatatcgacgctatgtttgatgtgcctaaagattctgatatcatggctattcagcgtaaagcagtaaaaggcgactctatcgaaggcggtaagccggaagagacaaacgacaccgctcctgtaccgccaaattccacgtgtaagcaaagtaatgtaaggggaaatatcatggcacagattaatgcatcttatcagcgagatatggcgattgcgctcccgggtatggttgcggatacttcaaagtacaatattgacggcgcttgcgtcgttaatgaaggtgatgtttttgttggcgctgccgtacaggttgttcaagctcaggcggttgatggtcataagttggttaaggctcttactaccggaaccactccttatggcgtggcaatccgatctcactggcagactgttaatgctcaaaatcagatggtttacgaagatggcggcgctatcaacgtgatgacttcaggccgagtatggatgctttccaaatccaccgaagcaccaactttcggctctgccgttaaacttgatgttgatggtcaagagaaatctgatggcacaatcgaaacaacctggacctacgctggcggctggactaaatacaaagatattcagcttgtagaggttgtcggcatcgttgatggtgtaaaagttgttacggcgctttctgatggtggaactccttacggtatcgctttccgttcccaatatgaacacctgagcggtaaaatcctcgacggtgaagtgtgcaacgtcgtttctcacggtcgcgtgtgggcgcttacttctcttgatgaggctcccagcttgttctcaaagttgcagcttggatctggtggagttgttactggtggatctggttccgcaggatggacctttgctggcggctttgttaagcacgaggacgggtacgtcattgaggttcaggtgaaacaaaatgctttcatcgttccaccgcctcctccccctgtcgttcttgttgagtccgctacaatcaccactgacaaggaaagtcctcaaccaaacaatgttacgatccagtgtgtagctaatgctcttccggctaatgcaactgataagactggcaaatggtcaatcgacgctaccaatatcgccactgtcgatccggactcaggtcttgtaactcctgttggtggagagtcagtcggtgatttcaatattacctggacggctaacgatgccagcaagacgacggcgaccattgcttatagcgtagaagcagtgccaacgccagaggctggcgtaaaacaggatgcagccgcaacgatgggtatctggaccgctaaggaactacaccgcatcaaaagccagtcctataaagaagactacccggtaggctccgctctacgagtattcccggttacaaccgatctatctccgaccgacaagacgtttgaatatatgacctttgataaggtttacaagactccgcacggcgatcgcgttgagttccgtccggcgtccgaagttttcaagcaagactccttgcaaagttttgcggggaagccaattactgttggtcacgtaacggtaactccgcagaatgctaaggacgttgttgtcgaatcgtgtgctggtgctggtattgcttcaggggttggcgatgtggaagtaaccgaagacgttgcgaaccatatcgaaaaattaaccgcgcagattgccaccattcaggggaaagctgatggcttcgaagctgagcgcgatgcgctgaaggttaaggttgactccctgccggaactggttaaggccgagcgtagagaagcaaaaagccgatgccgccgcacgcgcagaagttacaaaattgattctagcttggttgacgttctttgctggtcgagactatacggtggggctgctattgtggcaatcatcaaagacaacagaatgctaaccagccccgttaaacctggagctaaacttgagggcgtgcgtgtttacgatcgatttgcaatcaccgttgaaaagagagtaaccaatgctcgatcgcctcgctatggtgagcctgagatatacaatgtatctcctggcgataatcttcaaccttacttaatccaccacacaagaatttttattgctgatggtgagcgagtaacccctcagattcgcaaacagaatcaaggatggggagcgtcggtattgaacaaatcactgattgatgcaatctgtgactatgattactgtgaatctctggccactcagatcttgcgacgtaagcaacaggctgtatggaaggtcaaaggtcttgccgaaatgtgtgatgatgatgatgctcagtatgccgcgcgcctgcgacttgctcaggttgatgataactccggcgtaggtcgtgcgatcggtatcgatgctgagactgaggaatatgacgttctcaactctgatatcagcggagttcctgagttcttatcaagcaagatggaccgcattgtctccctatccgggattcatgagattatcatcaagaataagaacgtaggcggcgtatcagcgagccaaaacacagcgcttgagactttctataagctagtcgatcgcaagcgcgaggaagattacaggccacttcttgagttcttgttgccgttcattgttgatgaggaggagtggtcgatcgagtttgagcctttgtctgttcctagtaagaaagaggaatcagagatcacgaagaataacgttgagtcagtcacgaaggctatcactgagcaaatcatcgatctggaagaagctcgagacacgctgcgatccattgcccctgagttcaaactcaaggatggtaataacatcaacattcgcgaaccggaagaaacaaccgaaccggaaccgggattaggggagaagttagaagatgaaaattaa

SEQ ID NO: 17949 - DNA, 1093 bp, Homo sapiens
  SIMILAR (590)..(859): 701254mologous to Homo sapiens tesmin,accession number U86074,Smith-Waterman Score=375.
aatacatggctggctagtagttactatttgtgaagttggattgattggttttggaacaacttgtttgacagcctgagctgagacaattggaactgacatccgcactggggttgtattaacaaccactggctttgcttgctgaagaggctgagtgtttgtactgggattctgactaactggctgggttgagctactggctgatgtggcagtaacaagtcggacataatgaaacttgcttccaggcacttgaatctgctggacattgggagcagttgccagaggaataattgtcttaaactgtgatgtgctcactcctccaacagtgatggtctgcacagctgatttcactgccttatttggcgatttcaaaggtgagatggctattttatttggtgtctgtgttgtagaatttaaagttgatccaataacaccactttcagatattgttatggtctttgatggagttccgggagtagactgtgaaagaaccctacctgcaaatgagaggcagcacatcagtttgacttttttcaataatagtataaaaatttatgtgatgatgctctacactcacaaggactgcagaatgtattgtgattgctttgcaaatggtgaattttgcaacaactgcaattgtactaattgttacaacaatttggaacatgaaaatgaaaggcaaaaagcaataaaggcatgccttgacagaaatccagaagcctttaagcctaagatagggaaaggaaaggagggagaatctgatcgacgtcatagcaaagggtgtaattgcaaacgatcaggatgtcttaaaaactactgtgaatgctatgagaacattattttcatttggtattgttgtaggtatcgtcagatcctggaaaaagccattcagttatctggagcagaacaactagaagctttgaaagcttttgtggaagcaattatcgagagcgtagaaagccgtactagcggaatgacaatacagcggagttgtttggctctgcaacatacggatctagaatgttcgtctatctatgggttacagaaggcgctgcggaatttacactatcagcgaactcgcacagcacagctatga

SEQ ID NO: 17950 - DNA, 2280 bp, Homo sapiens
  SIMILAR (1573)..(2124): 991254mologous to Homo sapiens angiostatin binding protein 1,accession number AF286598,Smith-Waterman Score=903.
atgtttaaggtaattgcttcagagcaaagcaaagtcaaactgggaccaaaaacgaccaagaccttgagttaccatcccagaaacggatctctcacactgatcctcagtaagatttggaaatgccaaggccttgctgtggttcttaaaataatttttcaacctaatctaatagggtgttcaaaaataattgtgatgtttgcaatagagtgtattaagctgtccttgcattgctataaagaagtaccggagacaggagaatatgatgagagggactttggagggtcccttcgtgttgtcagactgcccagcgcaacagttggaagccaggcaccaccagcaatagagatgagaaattctgaagaacagccaagtggagggaccacggtattgcagcgtttgctacaagagcagcttcgctatggcaatcctagtgagaatcgcagcctgcttgccatacaccagcaagccacagggaatggccctcctttccccagtggcagtgggaacccgggccctcagagtgatgtgttgagtccccaagaccaccaccaacagcttgtggctcatgctgctcgacaagaaccccaggggcaggaaatccagtcagaaaacctcatcatggagaagcagctgtctcctcgaatgcaaaataatgaagaactcccgacctatgaagaagccaaggtccagtcccagtactttcggggccaacagcatgccagtgttggagctgccttctatgtcactggagtcaccaaccagaagatgaggactgagggacgcccatcagttcagcggctcaatcctggaaagatgcaccaagatgagggactcagagaccttaagcaagggcatgtccgttccttgagtgaacgactaatgcagatgtcactggccaccagtggagttaaggcccatccacctgttaccagtgctcccctctccccaccacaacccaatgacctctacaagaatcccacaagttccagtgaattctacaaggcccaagggccacttcctaaccagcatagcctgaagggcatggaacaccgaggccccccaccagaatatcccttcaagggcatgccaccccaatctgtagtgtgcaagccccaagagccagggcacttctatagtgagcatcgcctgaaccagccagggagaacagaggggcaactgatgaggtatcagcatccccctgagtatggagcagccaggccagcgcaggacatctcattgccattgtcagccaggaactcgcagcctcacagccctacttcttctctgacctctggggggtccttgcccttgctacaatctccaccatccactagattgtctcctgcccgacaccccttggtcccaaaccagggagaccattcagctcacctgcctaggccgcagcagcatttccttcctaatcaggctcaccagggggatcattaccgtctctcccaacctggcctgagtcagcagcagcagcaacagcagcagcagcaccatcatcaccatcaccaccaacaacagcagcagcagcagccacagcagcagccaggagaagcctattcagctatgcctcgggctcagccatcctctgcttcttatcagccagtgccagcagacccttttgccattgtttccagagcccagcagatggttgagatcctctcagacgagaaccggaacttgaggcaagagttggaaggatgctatgagaaggtggcaagactgcagaaggtggagacagaaatccagcgcgtctcggaggcatatgagaacctcgtgaagtcatcctccaaaagagaggccctagagaaagccatgagaaacaagctagagggcgagattcggaggatgcatgatttcaacagggatctgagagagcgtctagagactgccaacaagcagcttgcagagaaggaatatgaggggtcagaggacaccagaaaaaccatctcgcagctctttgcaaaaaataaagaaagccagcgtgagaaggagaagctggaagcggagctggccactgcccgttctaccaatgaggaccaaagacgacacatcgaaatccgagatcaggccctgagtaatgcccaggccaaggtggtaaagctggaagaagaggtatggtttcctcagacagcctccccaccccctaccaatttgacctcgctggagattttcgatggatgtctggcatatcctctcacaaggctcagggcagcccaggcttctggctggctgctgtcttatgatgatccggagtggaagcggcttgggtaa

SEQ ID NO: 17951 - DNA, 448 bp, Homo sapiens
  SIMILAR (94)..(447): 951254mologous to Homo sapiens dJ20B11.1 (ortholog of rat RSEC5 (mammalian exocyst complex subunit)),accession number AL031770,Smith-Waterman Score=576.
caaaaatgacaaaggagacattattgtcaccactaagtcaggtggcagaggaacctcaacagtctctttcaagctactcaaacctgagaaaatagaagtaaattttcgcagaaggacttagaaatgctattccatggaatgagggctgattttacaagtgagaatttctcagcagcctggtatcttatagagaatcactcaaacaccagttttgagcagctcaaaatggcagtcaccaacctaaagagacaggctaacaagaagagtgagggcagcctggcctatgtgaaaggcggtctcagtacattcttcgaagcacaggatgccctctcagccatccatcaaaaactagaagcagatggaacggaaaaagtagaaggatccatgacgcagaaactggagaatgttctgaacagagcaagtaatactgcagacactgtatacgaaa

SEQ ID NO: 17952 - DNA, 2031 bp, Homo sapiens
  SIMILAR (154)..(570): 691254mologous to Homo sapiens dJ20B11.1 (ortholog of rat RSEC5 (mammalian exocyst complex subunit)),accession number AL031770,Smith-Waterman Score=449.
tcctgctgttgagtcatcttggcctatactagggcgtggtttgagaggatcatgaataacaaagaccctcctattttggtactaatccttttttctttctcttttaacagattacttctctaacaggatcaccagtttgctccacaaagcacaatgtctcgatcacgacaacccccccttgtgaccggcatctctccaaatgaagggataccatggacgatcttattgttcttgtctttgaattttgttatgcacatgcgtttattttcaggcttgaccatttgtggacataattgcctcctgacggcagaatggatgtctgcaagtaaaatagtatgtcgagtgggacaagccaaaaatgacaaaggagacattattgtcaccactaagtcaggtgcaggcacgctttgtctgtgctcccgtgcctggggtaggcttcatcttattaagcatatgctcctcatttctgtaggcattttggatcagtctgctgtgtgggttgatgaaatgaattattatgatatgcgcactgacaggaacaaaggaatgtcaccaagatgtgaggagcctgggtttgctggctgttctgttgcccttagcataaaacacatttccttagcaattgtggttgaaactggacataatgatgttctcaggcagaaagatggtgtctcttcttggtttcccttcttgaaagtatggagacctttcccagatgtgctccaacagaccttcctccgacatcactgttcaaaaacaagtttatccaatcaagagcagggggaatatgacaagcgcggttggcttatggtggttgatctctccccagtctgcatggacagtagaggtggctgcattttaggggtgttctccatgtccaggtgtgcaagcaccttgctagagagagtgggctccaggccattggaagttgtgccttgtgtctggtttataccttatgagttgggcttgtccagtgttttggggtaggggacacatcttagagggggcggcaaatcagacgaacaaagtaaaccccaagatggtggagaccaacatgcgagacagtatagtccctttgaggctgccgaagcgtcaggtttcatgcctagagtggcagaaatgagccctgagggacaagcagattcagttcatagacatgcttggatttcatcctttcttgcatgttagaagtgtcaaactttggtttctttatttcatttcagttttgagcagctcaaaatggcagtcaccaacctaaagagacaggctaacaagaagagtgagggcagcctggccttgtaaactgagccggggggccagggtcacctcatcttgacctgctcatcagtgatgggttttgtcagcatcagaaaatgtggctacatgatttcctttaatgctaattttgacttagaaagcaacctgtggagcagggctactgtggggtgtgacatctcagcgcagtgtctgttatctccacccattaaaatggcctacattttaactagatttttttttctagccatccatcaaaaactagaagcagatggaacggaaaaagtagaaggatccatgacgcagaaactggagaatgttctgaacagtaagttttgtcctactacccagaactatttatggatttattaaaatttccctaaaatacatttctttataacaattcccccttttctagaaacattttttaacaacatgatgttgattgctgtcttaggatatgtttttcctaattcaggtcaacttgacagacgtttatttaactctggttgtgtcaagccccgtgctaagccagcctgggaggtacagttcccctccagccctttaattcacacgtcgctgtgtaaatgacaggtgctctggatgatcagccacactgcctccttcaaggccaccagcgatagtcactgtacgtctgttaccagttctcagcagacagcaaagtgtgcagttgtgctacctccttatctcccagtgacaaaccctcctgacattttacaaaaatggatgatcggg

SEQ ID NO: 17953 - DNA, 1393 bp, Homo sapiens
  SIMILAR (410)..(1393): 981254mologous to Homo sapiens growth arrest-specific 7,accession number BC001152,Smith-Waterman Score=1677.
cgcgcactaattcccgggtcgacgatttcgtgtgagaggatgcagagtgggagaccttaaaaccgtctgatctggctgctaaagcgagtgtctgacgaccacccattaacaccagcgagtagcgtttgctcacggctttaggataagaagcctggaatggtcccccctccgccgggagaagaaagccagacggtcatccttccacctggctggcagagctacctgtcgcctcagggccggcggtactatgtcaacacgaccaccaatgagaccacctgggaacgtcccagcagttctcctgggattccagccagccctggctctcacaggagctctctgcctccaacagtgaatggataccacgcatcagggaccccagcgcaccctccagaaactgcccacatgagtggtcgaaaatccaccgggggattcccagaacctgggatcctcatcgccaagcaaaaagcagagcaaggaaaacaccatcacaataaactgtgtgacgttccctcacccagacacgatgccggaacagcagctgctgaaaccaaccgagtggagctactgcgactacttctgggctgataagaaggacccccaaggcaacggcacggtggctgggtttgaactactgctccagaaacagctgaagggcaaacaaatgcagaaggaaatgtcagaattcatccgggaaaggataaagattgaagaagactatgcgaagaacttagctaagctctctcagaactccttggcttcacaggaggaaggctccttgggagaggcgtgggcccaggtgaagaagagcctggcggacgaagcagaagttcacctcaagttctctgccaagcttcacagcgaggtggagaagcccctgatgaacttccgtgagaacttcaagaaagacatgaagaagtgcgaccaccacattgccgaccttcgcaagcagctcgccagccgctatgcctcggtggagaaggcccggaaagccctcacagagcggcagagagacctggagatgaagacccagcagctggagatcaagctgagcaacaagacagaggaggacatcaagaaggcgcggagaaagtccacacaggctggagacgacctcatgcgctgtgtggatctctacaaccaggcccagtccaaatggtttgaagagatggtgaccaccacattggagctagagcggctggaggtggagagggtagagatgatccggcagcacctgtgccagtacacgcagctgcggcatgaaacagacatgttcaaccaaagcacagtcgagcccgtggatcagctgcttcgaaaagtggacccggccaaagacagggagctgtgggtcagagagcacaagacgggcaacatccgccctgtggacatggagatc

SEQ ID NO: 17954 - DNA, 438 bp, Homo sapiens
  SIMILAR (217)..(390): 621254mologous to Homo sapiens MLL/GAS7 fusion protein,accession number AF231998,Smith-Waterman Score=163.
atggctgtactggaaggcattgaaaaaccagagatggaggaaactctgggggcagcagagagccggcacaagccaagaaaagtggacgagccccagcaggaggccactgggggccagaggcttgtaggccaggtgccgtatttgagagggcgaaccagccgtggcttcgaccctcaaggagataaggtgtcaaggtgcatcaagagcctctctctgtccagcgctgcactgtgtgctgggcccctaaagggggctgagaaaggtggggagatgggtggagaagtgaatggataccacgcatcagggaccccagcgcaccctccagagactgcccacatgagtgtccgaaaatccaccggtgattcccaggtcctggtgtgtgatgttcccccaccggtgtccatatggtcccattgttcatctcccacttatgagtga

SEQ ID NO: 17955 - DNA, 926 bp, Homo sapiens
  SIMILAR (255)..(923): 921254mologous to Homo sapiens Human LAPH-2 protein sequence,accession number Y00877,Smith-Waterman Score=1083.
tcaaggcgttcgatcttgtggcctgcggtcgtgtgttcgtttcgttcgggctgtggcttccgttcggtctgttcgtgatggatgggagtgtgcgatgtgttcgttgccttcgtgtgtcctgttcggtgtcggtccggaatgatgggatggagatggtcgcggggagtccaggccgtcggggtcctcggagcaaccacccgagcagacggagtacacggagcagcggccccggccccgccaacgctgccgccgggatgctccagaccttgtatgattacttctggtgggaacgtctgtggctgcctgtgaacttgacctgggccgatctagaagaccgagatggacgtgtctacgccaaagcctcggatctctatatcacgctgcccctggccttgctcttcctcatcgttcgatacttctttgagctgtacgtggctacaccactggctgccctcttgaacataaaggagaaaactcggctgcgggcacctcccaacgccaccttggaacatttctacctgaccagtggcaagcagcccaagcaggtggaagtagagcttttgtcccggcagagcgggctctctggccgccaggtagagcgttggttccgtcgccgccgcaaccaggaccggcccagtctcctcaagaagttccgagaagccagctggagattcacattttacctgattgccttcattgccggcatggccgtcattgtggataaaccctgggtctatgacatgaagaaagtttgggagggatattccatacagagcactatcccttcccagtattgggactacatgattggactttcctttcactggaccctggtctttagcattggctctgatgtacagcgaaagggttttcaggaaccgaatatccaccctgtggcccccattattttcataaatttttccggg

SEQ ID NO: 17956 - DNA, 693 bp, Homo sapiens
tgcgacctcctctggcttacctcagagacggcgacgcccgagctgggttgaacggactgcagctggcggtgctggctatgttaagctctaggaagatgttctgtaagaagagtgggcaatcctattctcccagtagagttctgatcacagagaatgacgtgaaggagggcctacagcgatcccacattttatatgaccgggcaggtgaggagcattacaactgcatctccgccctgcacaagtccatgcggggctcagaccagaacgcctccctctactggctggctcgcatgctcgagggaggagaggacccactctacgtggcacggaggcttgtcaggtttgccatgcgaggacataggtctggcagacccgtctgcgttaacacaagcggttgctgcctaccaaggctgtcattttatatgcatgcctgaatgtgaggagctactggcccagtgtgtggtctactttgccagagccccaaagtccattgaggtgtacagcgcctacaacaacgtcaaagcctgcctgaggaaccaccaggggccactgccccccgtgcccctgcacctgaggaacgcgcccactaggctgatgaaggatttgggctatggcaaaggctacaagtacaaccccatgtacagcgagcctgtggatcaggagtacctgcctgaagagttgaggggggtagat

SEQ ID NO: 17957 - DNA, 2020 bp, Homo sapiens
  SIMILAR (1571)..(1726): 1001254mologous to Homo sapiens putative helicase RUVBL,accession number AF218313,Smith-Waterman Score=274.
atggtctccctgagacatgtgccaggagaagcgatcactgtgtcctgccatcggggacagaaggttgtgtcaacgacccctcagatgcctttgtccctgtggtcctgtgattccaggaagctgccttaccaggaccaagatggcgaaggaggtgtggtcaaacgccgacctgacggaaaggatgcccgtcaaaagcaaaaggacatcagccctcgcagcagcccaagtgtcgatgcctataatgcagaggtcctcaaccattttggcaccagggactggttttgtggaagacagtttttccaagacaggggagtggatgctttcaagacgattcaagcccattatatttaccattaccttctcgccacaggtcagtaccagtctgtggcccagggggttgggacccctgctacagtgcagagctcccaggtgattctgatgcaagtgatccacacaccacatgttgacaaatactgctctagaagtttactgaaagaactcctcagagggctgctcatccagactcagcaggagaaatactggggccactgtgcgctgtccactcggcagctgaccacagggcctcatgctacgccgcttcctctttttggcagagggcgtttcggccaggttcacaagtgtgaggagacggccacaggtctgaagctggcagccaaaatcatcaagaccagaggcatgaaggacaagctgcaccaggtgcagtgccccgtgtgccagcaggagatgcccgccgcgcacatcaactcgcacctggaccgctgtctgctgctccacccggcggggcacgcggagcccgcggccgggtcgcaccgcgccggggagcgggccaagggggccctcgccgcccggcgccaagaggcggcggctgtcggagagctcggcgctgaagcagccagccaccccgacggcagccgagagcagcgagggcgagggtgaggagggcgacgacggcggcgagaccgagagccgcgagagctacgacgcgccgcccacacccagcggcgcccgccttatccccgacttcccggtggcccgctccagcagccccgggaggaaggggtcggggaagaggccggcggccgccgccgcggcggggagcgcgtctccgcgcagctgggacgaggcggaggcgcatgatgaggatgaggccgtgggcgacggcgatggcgacggggacgcggacgcggacgggcgaggacgacccggggcactgggacgcggacgctgccgaagccgccaccgcccttcggggccagtggcgggggccgcccgcacccccgggcgctggctgccgaggagatccgacagatgctacagggcaagccgctggccgacacgatgcgtcctgacacgctgcaggattacttcgggcagagcaaggcctcaggcaccgtgtatgaaatctaacaatgcgctcatcgtcatccttcgcaccgtcaccctggatgctccagtcctgctcgctgcgctactgggagcccctatcgactacgcgatcatggcgaccacacccggcctgtggatctacccactagtcaatcaccatcttggtgaggagcattacaactgcatctccgccctgcacaagtccatgcggggctcagaccagaacgcctccctctactggctggctcgcatgctcgagggaggagaggacccactctacgtggcacggaggcttgtcaggtttgccagcgaggacatatgtaagttcaaggagggggcaccctcctcacgagaaagcggaggatggtgttcccgtgagtctcactcctcccagaggagcacctggtctgtgctcagcataagcccatgtccacaatacgactggcgccagccacaaaccctggcagctgagctcgctgttaaattactaggatctaaagaaggtacaaagataagcaagaagtgggtatttgcccttgtggagtttacggcgaaaatcctgtttgatggtggttccgaaatcggcaaaatcccttataaatcaaaagaatag

SEQ ID NO: 17958 - DNA, 404 bp, Homo sapiens
  SIMILAR (25)..(402): 871254mologous to Homo sapiens ribosomal protein L10,accession number L25899,Smith-Waterman Score=583.
gcggaaaccatcaagtaagccaagatgtttgcatacttgtacatccaggagctatggagaaagaagcacacggatgacatgcgctttcttctgagggtccgctgcaggcagtaccgccagctatctgctctccacagggctccccgccccacccggcctgataaatcgcgccgactgggctacaaggccaagcaaggctacgatatatataggattcgtgtgctccggggtggccgaaaacgcccagttcctaagggggcaacttacggcaagcctgtccatcatggtgttaaccagctaaagtacgctcgaagccttcagtccgttgcagaggacccagctggacgccactgtggggctctgaaagacctgaatacttactgggttggcgaagaatccacata

SEQ ID NO: 17959 - DNA, 407 bp, Homo sapiens
  SIMILAR (28)..(405): 881254mologous to Homo sapiens ribosomal protein L10,accession number L25899,Smith-Waterman Score=574.
tttcgtgctaccatcacgtctgccaagatgggtgcatacaagtacatccaggaactatggagaaagaaacaggctgatgtcatgcgctttcttctgagggtgcgctgctggcagtaccgccagctctatgctctccacagggctccccgccccacccgggctgataaagcgcgccgactgggctacaatgacaagcaaggctacgtgatatataggattcgtgttcgccgtggtgggcgaaaacgcccagatcctaagggtgcaacttacggcaagcctgtccatcatggtgataaccagctaaagattgctcgaagccttcaatccgacgcagaggagccagctggacgccactgtggagctctgagagaacagagttcttactgagttggtgaacattccacata

SEQ ID NO: 17960 - DNA, 431 bp, Homo sapiens
  SIMILAR (62)..(415): 831254mologous to Homo sapiens ribosomal protein L10,accession number L25899,Smith-Waterman Score=528.
  misc_feature (1)...(431): n = a,t,c or g
gtgctgcggccgtaagccaggncgcccacgcgttcgggcagccatcaggtaagccaagaagggtgcttacaattacatccaggagctatggagaaagaagcgggcggatgtcatgcgctttcttctgagggtccgctgctggcagtaccgccagctctctgctctccacagggctccccgccccacccggcctgataaagcgcgccgactgggctacaaggccaagcaaggttacgttatatataagattcgtgttcgccgtggcggccgaaaacgcccagttcctaagggtgcaacttacggcaagcctgtccatcatggtgctaaccagctaaagtctgctcaaagccttcagaccggtgtacaggagcgacctggacacccctgatatgctatgagagtcctgaaggcttaccgagcacgcccagacg

SEQ ID NO: 17961 - DNA, 432 bp, Homo sapiens
  SIMILAR (11)..(172): 941254mologous to Homo sapiens ribosomal protein L10,accession number L25899,Smith-Waterman Score=277.
ataagccaagatgggtgcatacaagtacatcctggagctatggagaaagaagcagtctgatgtcatgcgctttcttctgagggtccgctgctggcagtaccgccagctatctgctctccacagggctccccgccccacccggcctgataaagtgcaccgactgggctacaaacaagtcattaaaagaaggattgaagggaactttccaggagaatttatagataaggctttacgactaataagaacactcagtgagattccaaaatataagatcagcattcaaaaaccagtagtgccttctgtttccaagaaagatatacctcattaagaaaggaagcccatgaagatcagcaacaagagagaaacaagcagaaggcggtgcataaaatccaagcacctcactagagtcatccaagaagcactgctgcttac

SEQ ID NO: 17962 - DNA, 888 bp, Homo sapiens
  SIMILAR (115)..(312): 721254mologous to Homo sapiens ribosomal protein L10,accession number L25899,Smith-Waterman Score=230.
ggaattcggcggcagccatcaggtaggctgcgttgaggatctttgctcttccatccgcctttgatcgtcttcctcttcagccatccaggtaagccaagatgggtgcatacatagtacatccacgagctatggagaaagaagcagtctgatgtcatgcgctttcttctgagggcccgctgctggcagtaccctgctctccacagggctggcacagagtggcagctctctgctctccacagggctccccgccccacccggcctgataaagcgcgccgactgggctacaaacaaggccaagcaaggttacgttatatataggattcgtgttcgccgttatatataggattcatgttcgccgtggtggctgaaaacggcccagtttcctaaggggtgcaactttacgggcaagcctgtccattcatgggtgtttaaccagcttaaaagttttgcttcgaaagcctttcagttccgttggcaggagggaggcgaagcttgggacggcacttgtggggggcttcttgaggagttcctgaatttttttaattgggtttgggttgaaagatttccacataacaaaatttttttgaagggttaatcctcatttgatcccattccataaaagctaatcagaagaaaatcctgacacccagtgggatcaaccaaaccagtcccacaagcacaggggagatgcgtggggctgacatctgcaaggcccgaaaagagccgtggccttggaaaaagggccacaagttccaccacactattggtgggctctccgccgggcaacttggagaaggcgcaatactctccaagctccaccgttaccgctaatataagtaaagtttgtaaaattcatacttaataaacaatttaggacagtcaaaaaaa

SEQ ID NO: 17963 - DNA, 2058 bp, Homo sapiens
  SIMILAR (415)..(212): 941254mologous to Homo sapiens Human normal ovarian tissue derived protein 88,accession number Y59811,Smith-Waterman Score= 350.
ttttttagtagtgtaaatagtttattatttgctcatatgccatgaaaagaccagaaaagtaacatgaattgcttttataaaacattctaatattgctaagaagcaggcccattaatagacaaacagaaaagaacatgccaacgttgtctatttgtagattaataaataggcaattattttaatatacatatatgtcagcattgaactttggaaaacagctgctttagtagtggaagtccaacttggtcaaattgctatttttaatcgaagtgaatgttgagtccacagaaagacaaaatcgtggcatgttctttttaaagtaaagtacacatttatgggaatgtgcccgcaggtggcagtttaatctttctgtaaataggtacactaaagtgaaatgtggtaggtaacttgttccctaaactgtccttatagttaaatatatatattaaaaaaaactataagttaaaataacattcagattgtatagcataggctgatgcattttaaaacaatatttacaatattacccagaggcttaggtgggaattaaagagaagtgtaaaaccccataaaaaactgcaccgattttatagcaaaatatctgtacatttaaaaagatcatataactacacatcccaaggaaaagggaccttcacccaaggggttcacataagctcaacataaaataggaacttcagcggttaaatcctatgcaatacactttacaattaatatattgatgtaccaagaagataagccagaagcagaatgtatattatgaaaagtacaaatttagcttcagtccagtttttgactttggaatggatcaagtgccctgccagagaggaaggaaaataacagtggcttagtgggccatctagtcccattacgtattatttaagcttaataccatgttaatacttttcagcaacttaaactgcaattctccataagtagtctgggaaatgcatgaaaaacttagcctcgatacacgatgccaagtgtatcttcttgaatttataaaaaataagaaaaaattgcgattgtcagaggagagtaaggccaggttcctaacactactctgctagcagatgtaaccttgaatgcttgttgatagagctagtaaacttccttgcaaggcaccaatttctgttctcagaattaataatggtcctcagaaatgataatgctgattattgagatgttaattttaatgctaataaatacacttgcattatttaaaaagctgcctctagctgaagaacacagtactgcaaataagtcttatacactatatccccacattcatactagtgaatgcctctcacagagcatcgttctctagcacagaagtagtagaatgtgaaactggaaacaaaggattgagtgacctttgtgccactgcagttgcatcctgtttgcactttgccagggcctggttatagacaaaaggagtttcatcatgtgactttccttcttccaaattgcaagtaaaatacaaagttgatggatatggctaaaacaaaattccttcgaagacatctcagcaaaggacccacagcagatgcattgatgttatttacaacatcaggaaaccaggtgggccatgatgggacaatcacaatggcagcagttttatacagtatttctttggcattatgggtcagagaatttctgaatgaagaaaacaaaggtcttgatgttctagtggaatatctctcatttgcacagtacgcggtaacttttgactttgaaagtgtggagagtactgtggagagctcggtggacaaatcaaagccctggagtaggtccatcgaggacctgcacagagggagcaacctgccctcacctgtgggcaacagtgtctcccgctctggaagacattctgcactgcgcttaaagtgtttctatcttatttcaggcatgatctggcaagaggacattatttctctaagtgtttacgatcactccgggtattcagtcattgttgtagaatccatatgtcagattgcagccagtgaatatgtggctttcagacctttggatttggttgtctaa

SEQ ID NO: 17964 - DNA, 2544 bp, Homo sapiens
  SIMILAR (149)..(1705): 1001254mologous to Homo sapiens zinc finger protein,accession number L35269,Smith-Waterman Score=2808.
gcagtactcatcttggccctgggaagaaactcaagaagaagcttttgaaacataaagcttggatggggtttgacctctgcagggcagcgcccagctataggagttcccctgctgagcagagaagatgactgcagaattgagagaagccatggccctagccccatggggcccagtgaaggtgaaaaaggaggaggaagaagaagaaaacttcccaggtcaggcatccagccaacaagtgcactccgagaacatcaaagtctgggccccagtgcagggtcttcagacaggccttgatggatcagaagaggaagaaaagggtcagaacatatcctgggatatggcggtagtcctgaaagcaactcaggaggcacctgctgcttcaacccttggcagctactcattaccagggactctggccaagagtgagatactggagactcatgggaccatgaactttctaggtgctgaaaccaagaacctacagttactggttccaaaaactgagatatgtgaggaagctgaaaaacccctcatcatatcagaaagaatccagaaagctgatcctcaaggacctgagttaggagaagcttgtgaaaagggaaacatgttaaagaggcagagaataaagagagaaaagaaagatttcagacaagtgatagtgaatgactgtcacttacctgaaagcttcaaagaagaggaaaaccagaaatgtaagaaatctggaggaaaatatagccttaattctggcgctgttaaaaatccaaaaacccagcttggacaaaagccttttacgtgtagcgtgtgtgggaaaggatttagtcagagtgcaaacctcgttgtgcatcagcgaatccacactggagagaaaccctttgaatgtcatgagtgtgggaaggccttcattcagagtgcaaacctcgttgtgcatcagagaatccacactggacagaaaccttatgtttgctcaaaatgtgggaaagccttcactcagagttcaaatctgactgtacatcaaaaaatccactccttagaaaaaacttttaagtgcaatgaatgtgagaaagcctttagttacagctcacaacttgctcggcaccagaaagtccacattacggaaaaatgctatgaatgtaatgaatgtgggaaaacatttactaggagctcaaacctcattgtccaccagaggatccacactggggagaagccctttgcctgtaacgactgtggcaaagcctttacccagagtgcaaatcttattgtacatcagcgaagccatactggtgagaagccatatgagtgtaaagagtgtgggaaagcctttagttgtttttcacaccttattgtgcaccagagaattcacactgcagagaaaccttacgactgcagcgaatgtgggaaagccttcagtcagctctcttcccttattgtccaccagagaattcacagtggagatcttccttacgtgtgtaatgaatgtgggaaggccttcacatgtagctcatacctacttattcatcagagaattcataatggagaaaaaccttacacatgtaatgagtgtgggaaggccttcagacagaggtcgagcctcaccgtgcaccagagaacccacactggggagaagccctatgaatgtgagaagtgtggtgcagctttcatttccaactcacacctcatgcgacaccatagaacccatcttgttgaataacaagtaaggaagaggaagacctccagcattggtcataaccttctgcctccctaatgagacacctctttgctgttttcttcctcctctataaaagtgagggctgtgtccttaaaagttatagttttcaggaatgcagcagaagacacaagaaaagcatttcgagaggctaatttaaaacaaaaagtaagcacctaaagggaaggactttgttttaactgtaccttaagcggtcatgttctctgaagtggaatgtggctttcctaggaatgggtcgtacaaagctaagtggtaatgatgctatttggggaaaggtcttttttgcttaattttgttttttaaaactctgatgattgcttgagcaacaggcaggttatctgcctggttgaattctggttgaaccgtgtattctaatatttctggttaagtggtgactgggtaaggaaaccacttggggtagcagttcaacaatcacttacgaatgtttataagctttccatttcctaggtaattttttaaaagccagtcaaaacaaaaactttactgaaaatggacagaaaataggaaatggactttttccttactgtctatcctcctgaaccttggtattgtaaagatctggggacctctgggtctgttctgaccattccctagtctccatggccaagcactcaaggattgatggacaccacacaccagctatattcatttgccaagatcaacagctccttctccaaacaactcaagcccccaattcccatcgcattccatttgggtgagatgcaactaacagccccttcctggatgaaggagtcaaagaataaagcttgcctagaggc

SEQ ID NO: 17965 - DNA, 1968 bp, Homo sapiens
  SIMILAR (1)..(888): 1001254mologous to Cloning vector pZC320 SopA,accession number U26464,Smith-Waterman Score=1548.
atgaaactcatggaaacacttaaccagtgcataaacgctggtcatgaaatgacgaaggctatcgccattgcacagtttaatgatgacagcccggaagcgaggaaaataacccggcgctggagaataggtgaagcagcggatttagttggggtttcttctcaggctatcagagatgccgagaaagcagggcgactaccgcacccggatatggaaattcgaggacgggttgagcaacgtgttggttatacaattgaacaaattaatcatatgcgtgatgtgtttggtacgcgattgcgacgtgctgaagacgtatttccaccggtgatcggggttgctgcccataaaggtggcgtttacaaaacctcagtttctgttcatcttgctcaggatctggctctgaaggggctacgtgttttgctcgtggaaggtaacgacccccagggaacagcctcaatgtatcacggatgggtaccagatcttcatattcatgcagaagacactctcctgcctttctatcttggggaaaaggacgatgtcacttatgcaataaagcccacttgctggccggggcttgacattattccttcctgtctggctctgcaccgtattgaaactgagttaatgggcaaatttgatgaaggtaaactgcccaccgatccacacctgatgctccgactggccattgaaactgttgctcatgactatgatgtcatagttattgacagcgcgcctaacctgggtatcggcacgattaatgtcgtatgtgctgctgatgtgctgattgttcccacgcctgctgagttgtttgactacacctccgcactgcagtttttcgatatgcttcgtgatctgctcaagaacgttgatcttaaagggttcgagcctgatggcttctctaaacctggctgccagaggggctacactctgaagcctttctccccagttcaccctaacaacaagcccttcagacacacccaccagtgtgcccacgtcaatttaccattgccatggcaacaccccggagttactgcacctttccatggcagtgacccaatgacccaaaagtactactccttccctagaaagttctgcataagccgccccttaatctgcatgcgattaaaaatggctatttatcaagattttcaggagctaaggaagctaaaatgggagaaaaaaatcactggatataccaccgttgatatatcccaatggcatcgtaaagaacattttgaggcatttcagtcagttgctcaatgtacctataaccagaccgttcagctggatattacggcctttttaaagaccgtaaagaaaaataagcacaagttttatccggcctttattcacattcttgcccgcctgatgaatgctcatccggagttccgtatggcaatgaaagacggtgagctggtgatatgggatagtgttcacccttgttacaccgttttccatgagcaaactgaaacgttttcatcgctctggagtgaataccacgacgatttccggcagtttctacacatatattcgcaagatgtggcgtgttacggtgaaaacctggcctatttccctaaagggtttattgagaatatgtttttcgtctcagccaatccctgggtgagtttcaccagttttgatttaaacgtggccaatatggacaacttcttcgcccccgttttcaccatgggcaaatattatacgcaaggcgacaaggtgctgatgccgctggcgattcagaaagttctgcataagccgccccttaatctgcatgcgattaaaaatgggtataaatatgaccgcaaaactgtttttcaagcaggtgacgagcgactttccccttacatcaagtgcacagacccctctccgagcctctcacccccaagaaaatgggcccgtccccggaactgcggcgcggccgacctgaagacccctccccgaccggctttagaatctcggaacggcttctga

SEQ ID NO: 17966 - DNA, 1726 bp, Homo sapiens
  SIMILAR (214)..(1686): 1001254mologous to Homo sapiens HF.10 finger protein (AA 1- 491),accession number X07289,Smith-Waterman Score=2658.
gaattcgggccagcctcctgctgcagagccagtgaactcaggtcgggcttctcagctgcgcacataggcagtactcatcttggccctgggaagaaactcaagaagaagcttttgaaacataaagcttggatggggtttgacctctgcagggcagcgcagctataggagttcccctgctgagcagagaagatgactgcagaattgagagaagccatggccctagccccatggggcccagtgaaggtgaaaaaggaggaggaagaagaagaaaacttcccaggtcaggcatccagccaacaagtgcactccgagaacatcaaagtctgggccccagtgcagggtcttcagacaggccttgatggatcagaagaggaagaaaagggtcagaacatatcctgggatatggcggtagtcctgaaagcaactcaggaggcacctgctgcttcaacccttggcagctactcattaccagggactctggccaagagtgagatactggagactcatgggaccatgaactttctaggtgctgaaaccaagaacctacagttactggttccaaaaactgagatatgtgaggaagctgaaaaacccctcatcatatcagaaagaatccagaaagctgatcctcaaggacctgagttaggagaagcttgtgaaaagggaaacatgttaaagaggcagagaataaagagagaaaagaaagatttcagacaagtgatagtgaatgactgtcacttacctgaaagcttcaaagaagaggaaaaccagaaatgtaagaaatctggaggaaaatatagccttaattctggcgctgttaaaaatccaaaaacccagcttggacaaaagccttttacgtgtagcgtgtgtgggaaaggatttagtcagagtgcaaacctcgttgtgcatcagcgaatccacactggagagaaaccctttgaatgtcatgagtgtgggaaggccttcattcagagtgcaaacctcgttgtgcatcagagaatccacactggacagaaaccttatgtttgctcaaaatgtgggaaagccttcactcagagttcaaatctgactgtacatcaaaaaatccactccttagaaaaaacttttaagtgcaatgaatgtgagaaagcctttagttacagctcacaacttgctcggcaccagaaagtccacattacggaaaaatgctatgaatgtaatgaatgtgggaaaacatttactaggagctcaaacctcattgtccaccagaggatccacactggggagaagccctttgcctgtaacgactgtggcaaagcctttacccagagtgcaaatcttattgtacatcagcgaagccatactggtgagaagccatatgagtgtaaagagtgtgggaaagcctttagttgtttttcacaccttattgtgcaccagagaattcacagtggagatcttccttacgtgtgtaatgaatgtgggaaggccttcacatgtagctcatacctacttattcatcagagaattcataatggagaaaaaccttacacatgtaatgagtgtgggaaggccttcagacagaggtcgagcctcaccgtgcaccagagaacccacactggggagaagccctatgaatgtgagaagtgtggtgcagctttcatttccaactcacacctcatgcgacaccatagaacccatcttgttgaataacaagtaaggaagaggaagacctcccccgcccgaattc

SEQ ID NO: 17967 - DNA, 1737 bp, Homo sapiens
  SIMILAR (766)..(1734): 551254mologous to Homo sapiens zinc finger protein,accession number AF011573,Smith-Waterman Score=1042.
cacgagccttgatggaccagcaatacaagttccagtccttgtcaaggatcaggacactctccagaaggtggtgagtgccccaggaacaacacttcctcctgtacttcctggcagccacatagcagctgaaatttgcccgcatcctcctactgacctagtggcattcaacctccaggatcctcagcatgattctcctgcccctgaagcttctgccctttcccaggaagagaacccaagaaatcaattaatggcacttatgctcctaacagcccagccccaggagttggtgatgttcgaggaggtgtcagtatgcttcacttcagaggaatgggcatgtctgggcccaatccagagggccttgtactgggatgtgatgctggagaattatggaaatgtgacctccctagacaattacgttaccatgagacatctggaccccaggaagccctgagccggctcagggaactctgtcgccggtggctgagaccagaagcacgcaccaaggcacagatcctggagctgctggtgctggagcagtttctgagcatcctgcctggggagattcggacctgggtacagctccatcaccctggaagtggcgaggaggctgtggccctggtagaggagctgcagaaagaccttgatggaccagcaatacaagacctcgcagtgtttcatatggttttggctgctgtggctgtcatggcagccagtgttaccctttctgtccgtgcttatcctttctttgatatccagcatcctcagacacagaaacctcagttgctagatctttgtttacagcttggacaaaagccttttacgtgtagcgtgtgtgggaaaggatttagtcagagtgcaaacctcgttgtgcatcagcgaatccacactggagagaaaccctttgaatgtcatgagtgtgggaaagcctttagtcagagtgcaaacctcgttgtgcatgagcgaatccacacgggagagaaaccctataagtgtaaggagtgtggaaaagctttcactcatagctctaaccttgttgtacatcggagaatccactccttagaaaaaacttttaagtgcaatgaatgtgggaaagcctttagttacagctcacaacttgctcggcaccagaaagtccacattacggaaaaatgctatgaatgtaatgaatgtgggaaaacatttactaggagctcaaacctcattgtccaccagaggatccacactggggagaagccctttgcctgtaacgactgtggcaaagcctttacccagagtgcaaatcttattgtacatcagcgaagccatactggtgagaagccatatgagtgtaaagagtgtgggaaagcctttagttgtttttcacaccttattgtgcaccagagaattcacactgcagagaaaccttacgactgcagcgaatgtgggaaagccttcagtcagctctcttgccttattgtccaccagagaattcacagtggagatcttccttacgtgtgtaatgaatgtgggaaggccttcacatgtagctcatacctacttattcatcagagaattcataatggagaaaaaccttacacatgtaatgagtgtgggaaggccttcagacagaggtcgagcctcaccgtgcaccagagaacccacactggggagaagccctatgaatgtgagaagtgtggtgcagctttcatttccaactcacacctcatgcgacaccatagaacccatcttgttgaataa

SEQ ID NO: 17968 - DNA, 708 bp, Homo sapiens
  SIMILAR (400)..(621): 731254mologous to Homo sapiens HF.10 finger protein (AA 1- 491),accession number X07289,Smith-Waterman Score=253.
atgtctgggcccaatccagagggccttgtactgggatgtgatgctggagaattatggaaatgtgacctccctaggggaaagaatagtcaagttcctgaagaagatggtaaaaatgagtcaaaatctccaagaatagggaagccaagggctgagggcttctctaaacctggctgccagaggggctacactctgaagcctttctccccagttcaccctaacaacaagcccttcagacacacccaccagtgtgcccacgtcaatttaccattgccatggcaacaccccggagttactgcacctttccatggcagtgacccaatgacccaaaagtactactccttccctagaaagttctgcataagccgccccttaatctgcatgcgattaaaaatgggtataaatatggccgcaaaactgcccttccaaccggtggcgaacggcctttccccttccatcaagtgcccaggtcagaacatatcctgggatatggcggtagtcctgaaagcaactcaggaggcacctgctgcttcaacccttggcagctactcattaccagggactctggccaagagtgagatactggagactcatgggaccatgaactttctagagcggcagaccacactgagaagctatggaattgcagagaagagtgcagactgtgttaccatggacttgcagccctttctgccttttactggcctttaa

SEQ ID NO: 17969 - DNA, 1461 bp, Homo sapiens; identical to SEQ ID NO: 8627
  SIMILAR (433)..(1446): 921254mologous to Homo sapiens putative p150,accession number U93572,Smith-Waterman Score=1645.

SEQ ID NO: 17970 - DNA, 1098 bp, Homo sapiens; identical to SEQ ID NO: 3491
  SIMILAR (1)..(1062): 951254mologous to Homo sapiens putative p150,accession number U93563,Smith-Waterman Score=1753.

SEQ ID NO: 17971 - DNA, 1248 bp, Homo sapiens
  SIMILAR (1248)..(118): 941254mologous to Homo sapiens putative p150,accession number U93563,Smith-Waterman Score=1920.
tcacttagcattaggtatatctcctaatgctatccctccccgctcccccgacctcacaacagtctccagagtgtgatgttccccttcctgtgtccatgtgttctcattgttcaattcccatctgttgtttcctgactttttaatgattgccattctaactggtgtgagatggtatctcattgtggttttgatttcaatttctctgatggtcagtgacgatgagcattttttcatgtgtcttttggctgcataaatgtcttcttttgagaagtgtctgttcatctcctttgcccactttttgatgggcttgtttgtttttttcttgtaaatttgtttgagttcattgtagattctggatattagcccttcgtcagatgagtaggttgcgaaaattttctcccattctgtaggttgcctgttcactctgatggtagtttcttttgttgtgcagaagctctttagtttaattagatcccatttgtcaattttggcttttgttgccattgcttttggtgttttagacatgaagtccttgcccacgcctgtgtcctgaatggtattgcctaggttttcttctagggtttttatggttttaggtctaacgtttaagtctttaatccatcttgaattgatttttgtataaggtgtaaggaagggatccagtttcagctttctccatatggctagccagttttcccagcaccatttattaaatagggaatcctttccccattgcttgtttttctcaggtttgtcaaagatcagatagttgtaggtatgtggcgttatttctgagggctctgttctgttccattgatctatatctctgttttggtaccagtaccatgctgttttggttactgtagccttgtagtatagtttgaagtcaggtagtgtgatgcctccagctttgttcttttggcttaggattgtcttggcaatgcaggctcttttttggttccatatgaactttaaagtagttttttccaattctgtgaagaaagtcattggtagcttgatggggatggcattgaatctataaattaccttgggcattatggccattttcacggtattgattcttcctatccacgagcatggaatggtcttccatttgtttgtatcttcttttatttccttgagcagtggtttgtagttctccttgaagaggtccttcacatcccttgtaagctggattcctaagtattttattctctttgaagcagttgtgaatgggagttcactcat

SEQ ID NO: 17972 - DNA, 1977 bp, Homo sapiens
  SIMILAR (1)..(1125): 941254mologous to Homo sapiens putative p150,accession number U93563,Smith-Waterman Score=1911.
atgagtgaattcccattcacaattgcctcaaagagaataaaatacctaggaatccaacttacaagggatgtgaaggacctcttcaaggagaactacaaaccactgctcaaggaaataaaagaggatacaaacaaatggaagaacatcccgtgctcatggataggaagaatcaatattatgaaaatggccatactgcccaaggtaatttatagattcaatgccatccccatcaagctgccaatgacattcttcacagaattggaaaaagctactttaaagttcatatggaaccaaaaaagagccagcattgccaagtcaatcctaagccaaaagaacaaagctggaggcatcacactacctgacttcaaactatactacaaggctacggtaaccaaaacagcatggtactggtaccaaaacagagatatagaccaatggaaaagaacagagccctcagaaataataccacacatctacaaccatctgatctttgacaaatctgagaaaaacaagcaatggggaaaggattccctatttaataaatggtgctgggaaaactggctagccatatgtagaaagctgaaactggatcccttccttacaccttatacaaaaatcaattcaagatggattaaagacttaaacgttagacctaaaaccataaaaaccctagaagaaaacctaggcattaccattcaggacataggcatgggcaaggacttcatgtctaaaacaccaaaagcaatggcaacaaaagccaaaattgacaaatgggatctcattaaactaaagagcttctgcacagcaaaagaaactaccgtcagagtgaataggcaacctacaaaatgggagaaaatttccacaacctactcatctgacaaagggctaatatccagaatctacaatgaactccaacaaatttataagaaaaaaaacaaccccatcaaaaagtgggcgaaggacatgaacagacacttctcagaagaagacatttatgcagccaaaaaacacatgaaaaaatgctcaccatctctggccatcagagaaatgcaaatcaaaaccacaatgagataccatctcacaccagttagaatggccatcattaaaaagtcaggaaacaacagggacatggatgaattggaaatcatcattctcagtgaactatcgcaagaacaagaaaccaaacgctgcatattctcactcatagagaataaaatacctaggaatccaacttacaagggatgtgaaggacctcttcaaggagaactacaaaccactgctcaaggaaataaaagaggatacaaacaaatggatgaacattccatgctcatgcgtaggaagaatcaacattgtgaaaatggccatactgcccaagaattggaaaaagctactttaaagttcatatggaaccaaaaaagagcccacatcgccaagtcaatcctaagccaaaagaacaaagctggaggtatcacactacctgacttcaaagtatactacaaggctacagtaaccaaaacagcatgccttccatctccatggttacgcggcggtggctgcgagcgcccaactgctccgaccgtcgcggtgagggccccaggacagaagcagacagacacggctcctgctgtcgattccgatccagagctggaacagcggtccattcctgccggaggcgccaccccagggctgcagggctgccctctagcctttgcgcggaagccggacctcgggagacttagtaattggagggtgggtgcagggaaggtgctgagccgcgtccctagcgacccggcagcggcgcgcatgcgcacacagatccggagcgcgcacacagatccggagcgcgcacacagatccggagcgcgcacacagatccggagcgcgcacacagatccggagcgcgcacacagatccggagcgcgcacacagatccggagcgcgcacacagatccggagcgcgacggactctcccactga

SEQ ID NO: 17973 - DNA, 1962 bp, Homo sapiens
  SIMILAR (1074)..(7): 891254mologous to Homo sapiens putative p150,accession number U93563,Smith-Waterman Score=1679.
tcacccactttttgatggggttgattttttcttgtaaatttgtttaagttctttgtagattctggatattagccctttgtcagataggtagattgtaaaaattttctgccattctgtaggttgtctgttcactctgatggtagtttcttttgctgtgcagaagctcttcagtttaattagatcccatttgtcaattttggcttttgttgccattgcttttggtgttttagtcatgaagtccttgccaatgcctatgtcctgaatggtattgcctaggttttcttctagggtttttatggttttaggtctaacatttaagtctttaatccatcttgaattaatttttgtataaggcataaggaagagatccagtttcagctttctatatatgcctagccagttttcccagcaccatttattaaatagggaatcctttccccattgcttgtttttctcaggtttgtcaaagatcagatggttgtagatgtgtggtattatttctgagggctctgttctgttccatgggtctatatctctgttttggtaccagtaccatgctgttttggttactgtagacttgtagtatagtttgaagtcaggtagcgtgatccctccagctttgttcttttggcttaggattgtcttggcaatgcaggctcttttttggttccacatgaactttaaagtagttttttccaattctgtgaagaaaatcattggtagcttgatggggatggcattgaatctataaattaccttgggcagtatggccgttttcacaatattgattcttcctacccatgagcatggaaggttcttcctttttttgtgtccttttgtttcgttgagcagtggtttgtagttctccttgaagaggtccttcacatcccttgtaagttggattcctaggtattttatactctttgaagcaattgtgaatgggagttcactcatgatttggctctctgtttgtctgttgttggtgtataagaatgcttgtgatttttgcacattgattttgtatcctgagactttgctgaagttgcttatcagcttaaggagatttgagctgttattcctttccatgtttagtgcttccttcaggagctcttgtaaggcaggcctggtggtggcagaatctctcagcatttgattgtctgtaaaggactttatttctccttcacttatgaagcttagtttggctggatatgaaattctgggttgcaaattctttactttaagaatgttgaatattggcccccactctcttctggcttgtagagtttctgcagagagatcagctgttagtctgatgggcttccctttgtgggtaacccgacctttctgtctctctgcccttaacattttttccctcatttcaactttggtgaatctgacaattatgtgtcttggagttgctcttctcgaggagtatttttgtggcattctctgtatttcctgaatttgaatgttggcctgccttgctaggttggggacgttctcctggataacatcctgcagagtgttttccaacttggttccattctccccatcactttcaggtacaccaatcagaagtagatttggtcttttcacatagtcccatatttcttggaggctttgttcatttctttttactattttttctctaaacttctcttctctcttcatttcattcatttgatcttcaatcactgataccctttcttccacgtgatcgaattggctactgaagcttgtgcatgcatcacgtggttctcttgccaaggttttcagctccatcaggtcatttaaggtcttctctaagctgtttattcgtttgaagccttcttctctcaactcctcagagtcattctccatccagctttgttccatcgctggcgaggagctgcattcctttggaggagaagaggcgctctgatgtttagaattttcagcttttctgctctggtttctccccat

SEQ ID NO: 17974 - DNA, 1644 bp, Homo sapiens
  SIMILAR (712)..(1641): 951254mologous to Homo sapiens putative p150,accession number U93564,Smith-Waterman Score=1559.
atggggaaaaaacagagcagaaaaactggaaacactaaaaagcagagtgcctcttctcctccaaaggaacgcagctcctcaccagcaatggaacaaagctggatggagaatgactttgacgagctgagagaagaaggcttcagacgatcaaactactctgagctatgggaggacattcaaaccaaaggcaaagaagttgaaaactttgaaaaaaatttagatgaatgtataactagaataaccaatacagagaagtacttaaaggagctgatggagctgaaagccaaggctcgagaactacgtgaagaatgcagaagcctcaggagccaatgcgatcaactggaagaaagggtatcagtgatggaagatgaaatgaatgaaatgaagcgagaagggaagtttagagaaaaaagaataaaaagaaacgaacaaagcctccaagaaatacgggactatgtgaaaagaccaaatctacgcctgattgctgtacctaaaagtgacggggagaatagaaccaagttggaaaacactctgcaggatattatccaggagaacttccccaatctagcaaggcaggccaacattcagattcaggaaatacagagaacaccacaaagatactcctcgagaagagcaactccaagtcacataattgtcaggttcaccaaagttgaaatgaaggaaaaaatgttaagggcatccagagagaaagtgttggaagttctggccagggcaattaggcaggagaaggaaataaagggtattcaattaggaaaagaggaagtcaaattgtccctgtttgcagatgacatgattgtatatctagaaaaccccattgtctcagctgaaaatctccttaagctgataagcaacttcagcaaagtctcaggatacaaaatcaatgtacaaaaatcacaagcattcttttacaccaataacaggcaaacagaaagccaaatcattagtgaactcccattcataagtgcttcaaagagaataaaatacctaggaatccaacttacaagggatgtgaaggacctcttcaaggagaactacaaaccactgctcaatgaaataaaagaggatacaaacaaatggaagaacattccatgcttgtgggtaggaagaatcaatatcatgaaaatggccatactgcccaaggtaatttatagattcaatgccatccccatcaagctaccaatgactttcttcacagaattggaaaaaactactttaaagttcatatggaaccaaaaaagagcccgcatcgccaagtcaatcctaagccaaatgaacaaagctggaggcatcactctacctgacttcaaactatactacaaggctacagtaaccaaaacagcatggtactggtaccaaaacagagatatagatcaatggaacagaacacagccctcagaaataacgccatgtatctacaactacctggtctttgacaaacctgagaaaaacaagcaatggggaaaggattccctacttaataaatggtgctgggaaaactggccagccatatgtagaaagctgaaactggatcccttccttacaccttatacaaaaatcaattcaagatggattaaagacttaaacgttagacctaaaaccataaaaaccctagaagaaaactag

SEQ ID NO: 17975 - DNA, 1191 bp, Homo sapiens
  SIMILAR (702)..(4): 941254mologous to Homo sapiens putative p150,accession number U93563,Smith-Waterman Score=1171.
tcagttttcccagcaccatttattaaatagggaatcctttccccattgcttgtttttctcaggtttgtcaaagatcagatagttgtagatatgtggcgttatttctgagggctctgttctattccattgatctatatctctgttttggtaccagtaccatgctgttttggttactgtagccttgtagtatagtttgaagtcacgtagcatgatgcctccagctttgttcttttggcttaggattgacttggcgatgcgggctcttttttggttccatatgaactttaaagtagttttttccaattctgtgaagaaagtcattggtagcttgatggggatggcattgaatctataaattaccttgggcagtatggccattttcacaatattgattcttcctacccatgagcatggaatgttcttccatttgtttgtatcctcttttatttcactgagcagtggtttgtagttctccttgaagaggtccttcacgtcccttgtaagttggattcctaggtattttattctctttgaagcaattgtgaatgggagtttactcatgatttggctctctgtttgtctgttattggtgtataagaatgcttgtgatttttgtacattgattttgtatcctgagactttgctgaagttgcttatcagcttaaggagattttggactggacccttctggtctacgatcaccctggtggagctctggaggatgaagggcagccatgctgttttggttactgtagccttgtagtatagtttgaagtcaggtagcgtgatgcctccagctttgttcttttggcttaggattgacttggtgatgcgggctcttttttggttccatatgaactttaaagcagttttttccaattctaatttcttgagagtttttagcatgaagcgttgttgaattttgtcaaaggccttttctgcatctattgagataatcatgtggtttttgtctttggttctgtttatatgctggattacatttattgatttgcatatattgaaccagccttgcatcccagggatgaagcccacttgatcatggtggataagctttttgatgtactgctggatttggtttgccagtattttattgaggatttttgcatcaatattcatcaaggatattggtctgggataagtctcttcttcaatatttttattaactcccat

SEQ ID NO: 17976 - DNA, 1677 bp, Homo sapiens; identical to SEQ ID NO: 7848
  SIMILAR (463)..(1662): 881254mologous to Homo sapiens putative p150,accession number U93563,Smith-Waterman Score=1844.

SEQ ID NO: 17977 - DNA, 1816 bp, Homo sapiens
  SIMILAR (743)..(1810): 891254mologous to Homo sapiens putative p150,accession number U93563,Smith-Waterman Score=1679.
aataaacagcttagagaagaccttaaatgacctgatggagctgaaaaccttggcaagagaaccacgtgatgcatgcacaagcttcagtagccaattcgatcacgtggaagaaagggtatcagtgattgaagatcaaatgaatgaaatgaagagagaagagaagtttagagaaaaaatagtaaaaagaaatgaacaaagcctccaagaaatatgggactatgtgaaaagaccaaatctacttctgattggtgtacctgaaagtgatggggagaatggaaccaagttggaaaacactctgcaggatgttatccaggagaacgtccccaacctagcaaggcaggccaacattcaaattcaggaaatacagagaatgccacaaaaatactcctcgagaagagcaactccaagacacataattgtcagattcaccaaagttgaaatgagggaaaaaatgttaagggcagagagacagaaaggtcgggttacccacaaagggaagcccatcagactaacagctgatctctctgcagaaactctacaagccagaagagagtgggggccaatattcaacattcttaaagtaaagaatttgcaacccagaatttcatatccagccaaactaagcttcataagtgaaggagaaataaagtcctttacagacaatcaaatgctgagagattctgccaccaccaggcctgccttacaagagctcctgaaggaagcactaaacatggaaaggaataacagctcaaatctccttaagctgataagcaacttcagcaaagtctcaggatacaaaatcaatgtgcaaaaatcacaagcattcttatacaccaacaacagacaaacagagagccaaatcatgagtgaactcccattcacaattgcttcaaagagtataaaatacctaggaatccaacttacaagggatgtgaaggacctcttcaaggagaactacaaaccactgctcaacgaaacaaaaggacacaaaaaaaggaagaaccttccatgctcatgggtaggaagaatcaatattgtgaaaacggccatactgcccaaggtaatttatagattcaatgccatccccatcaagctaccaatgattttcttcacagaattggaaaaaactactttaaagttcatgtggaaccaaaaaagagcctgcattgccaagacaatcctaagccaaaagaacaaagctggagggatcacgctacctgacttcaaactatactacaagtctacagtaaccaaaacagcatggtactggtaccaaaacagagatatagacccatggaacagaacagagccctcagaaataataccacacatctacaaccatctgatctttgacaaacctgagaaaaacaagcaatggggaaaggattccctatttaataaatggtgctgggaaaactggctaggcatatatagaaagctgaaactggatctcttccttatgccttatacaaaaattaattcaagatggattaaagacttaaatgttagacctaaaaccataaaaaccctagaagaaaacctaggcaataccattcaggacataggcattggcaaggacttcatgactaaaacaccaaaagcaatggcaacaaaagccaaaattgacaaatgggatctaattaaactgaagagcttctgcacagcaaaagaaactaccatcagagtgaacagacaacctacagaatggcagaaaatttttacaatctacctatctgacaaagggctaatatccagaatctacaaagaacttaaacaaatttacaagaaaaaatcaaccccatcaaaaagtgggtga

SEQ ID NO: 17978 - DNA, 1395 bp, Homo sapiens
  SIMILAR (897)..(7): 901254mologous to Homo sapiens putative p150,accession number U93563,Smith-Waterman Score=1432.
ttaattgtaaatttgtttgagttctttgtagattctggatattagccctttgtcagatgagtagattgcaaaaattttctcccattctgtaggttgcctgttcactctgatggtagtttcttttgccatgcagtagctctttagtttaattagatcccatttgtctattttggcttttgttgccattgctttgagtgttgtagtcacgaagtccttgcccatgcctatgtcctgaatggtattgcctaggttttcttctagggtttttatggttttcggtctaacatgtaagtctttaatccatcttgaattaatttttgtaaaagttgtaaggaacggatccagtttcagtgttctacatatggctagccagttttcccgacaccatttattaaatagggaatcctttccccatttcttgtttttgtcaggtttgtcaaagatcagatagttgtagatgtgtggtgttatttctgtgggctctgttctgttccattggtctatatctctgttttggtacaagtaccatgctgttttggttactgtatctttgtagtatagtttgaagtcaggtagcatgatgcctccagctttgttcttttggcttaggattgtcttggcaatgcacgctcttttttggttccatatgaactttaaagtaattttttccaattctgtgaagaaagtcattggtagcttgatggggatggcattgaatctataaattactatgggcagtatggccatcttcacaatattgattcttcctacccatgagcatggaatgttcttccgtttgtttgtatcctcttttatttcattgagcagtggtttgtagttctccttgaagaggtccttcatatcccttgtaagttggattcctaggtattttattcttggacagtcaccatctggatagttatcagggatgtaaactgtaaacttaaatacgccatcttggtaaagtccatgccgtatgaatattactccaaaccacactttgggtctgtcctgcctctcaggcgtgcggctgaccctcaaggcctctccctcatctgacttagaggttcccagaaccttagaccatttgcccccaccccatttctcagctgaggaaacctccaccaccccttgggccctctgtctccaggagcctggccagccaagactcacatcctcaggtgagtggcaaccaccagaagtggttgtctcagggttagtgccattatttattttcttctttttggtgtcggttgctcctgtaccaacactagggctggtctggggaggagagtctctcaactgttgggacagacctggaagaagggattgctgatttgcatgtttcatggctgcctctgctagcccatgagtcagcagcccactccaattcat

SEQ ID NO: 17979 - DNA, 1056 bp, Homo sapiens
  SIMILAR (801)..(4): 971254mologous to Homo sapiens putative p150,accession number U93563,Smith-Waterman Score=1357.
ctagcaccatttattaaatagggaatcctttccccattgcttgtttttctcaggtttgtcaaagatcagacagttgtagatatgcggcgttatttctgagggctctgttctgttccattgatctatatctctgttttggtaccagtaccatgctgttttggttactatagccttgtagtatagtttgaagtcaggtagcgtgatgcctccagctttgttcttttggcttaggattgacttggtgatgcaggctcttttttggttccatatgaactttaaagtagttttttccaattctgtgaagaaagtcattggtagcttgatggggatggcattgaatctataaattaccttgggcagtatggccattttcacgatattgattcttcctacccatgagcatggaatgttcttccatttgtttgtatcctcttttatttcattgagcagtggtttgtagttctccttgaagagctccttcacgtcccttgtacgttggattcctaggtattttattctctttgaagcaattgtgaatgggagttcactcatgatttggctctctgtttgtctgttattggtgtataagaatgcttgtgatttttgtacattgattttgtatcctgagactttgctgaagttgcttatcagcttaaggagattttggggtgagacaatggggttttctagatatacaatcatgtcatctgcaaacagggacaatttgacttcctcttttcctaattgaataccttttatttccttctcctgcctaattgccctggccagaacttccaacacgcatgatccttcatgccctgccacagcccaacccttcctgcaagttgaagcctcatgtcccacatagcccatggccttttgatgttgtataagggctctaatatggagaacatccagaaaactcaaaggcccttgaccagccacttctcttcctctccctgactgctccactttaatgcgactcaaacatacttcacagagctccgtactctctctttgggtcacctcatccactctcatagcttttggtaccat

SEQ ID NO: 17980 - DNA, 1464 bp, Homo sapiens; identical to SEQ ID NO: 8951
  SIMILAR (790)..(1449): 911254mologous to Homo sapiens unknown,accession number AF149422,Smith-Waterman Score=1098.

SEQ ID NO: 17981 - DNA, 2016 bp, Homo sapiens
  SIMILAR (940)..(1980): 961254mologous to Homo sapiens putative p150,accession number U93563,Smith-Waterman Score=1798.
atggaggaaactgcccccatgattcaattatctccacctggccctgctcttgacatgtggggaattattacaattcaagatttcaataagtgtatgactcttaaattccggttaaaaaatttttcaaggatcaacaaaattgatacaccgctagcaagactaataaagaagaaaagagagaagaatcgaatagacacaataaaaaatgataaaggggatatcaccagtaatcccacagaaatacaaagtaccatcagagaatactacaaacacctctacacaaataaactagaaaatctagaagaaatggataaattcctcgacacatacaccctcccaagactaaaccaggaagaagttgaatctctgaatagaccaataacaggctctgaaattatggcaataatcaatagcttaccaaccaaaaagagtccaggaccagatggattcacagccaaattctaccagaggtacaaggaggaactggtaccattccttctgaaactattccaatcaatagaaaaagagggaatcctccctaactcattttatgaggccagcatcatcctgataccaaagccgggcagagacacaaccaaaaatgagaattttagaccaatatctttgatgaacattgatgcaaaaatcctcaataaaatactggcaaaccgaatccagcaacacatcaaaaagcttatccaccatgatcaagtgggcttcatccctgggatgcaaggctggttcaatatacgcaaatcaataaatgtaatccagcatataagcagaaccaaagacaaaaaccacatgattatctcaatagatgcagaaaaggcctttgacaaaattcaacaacccttcatgctaaaaactctcaataaattagggaataaaatacctaggaatccaacttacaagggatgtgaaggacctcttcaaggagaggtccttgaaccactgctcaatgaaataaaagaggatacaaacaaatggaagaacattccatgctcatgggtaggaagaatcaatatcgtgaaaatggccatactgcccaaggtaatttatagattcaatgccatccccatcaagctaccaatgactttcttcacagaattggaaaaaactactttaaagttcatatggaaccaaaaaagagccctcatcgccaagtcaatcctaagccaaaagaacaaagctggaggcatcacgctacctgacttcaaactatactacaaggctacagtaaccaaaacagcatggtactggtaccaaaacagagatatagatcaatggaacagaacagagccctcagaaataacgctgcatatctacaactatctcatctttgacaaacctgagaaaaacaagcaatggggaaaggattccctatttaataaatggtgctgggaaaactggctagccatatgtagaaagctgaaactggatcccttccttacaccttatacaaaaattaattcgagatggattaaagacttaaacgttagacctaaaaccataaaaaccctagaagaaaacctaggcattaccattcaggacataggcatgggcaaggactacatgtctaaaacaccaaaagcaatggcaacaaaagccaaaattgacaaatgggatctaattaaactcaagagcttctgcacagcaaaagaaactaccatcagagtgaacaggcaacctacaaaatgggagaaaattttcgcaacctactcatctgacaaagggctaatatccagaatctacaatgaactcaaacaaatttacaagaaaaaaacaaacaaccccatcaaaaagtgggtgaaggacatgaacagacacttctcaaaagaagacatttatgcagccaaaaaacacatgaaaaaatgctcaccatcactggccatcagagaaatgcaaatcaaaaccacaatgagataccatctcacaccagttagaatggcaatcattaaaaagtcaggaaacaacagggacatggatgatattggaaatcatcgttctcagtaa

SEQ ID NO: 17982 - DNA, 1770 bp, Homo sapiens
  SIMILAR (1571)..(1660): 801254mologous to Homo sapiens putative p150,accession number U93574,Smith-Waterman Score=119.
ttagtattcattaagtggaagtggctcatgataaagatcttcatcctcatcatcttcatgttgagttgtctggggaggaagaggaggggttggtcttgctgtctcagcagtcatagagatgcaagaaagtccacgtataagtggacctgctcggttaaacccacgttgttcaagggtcagctgaatttgatttctagcttcctctgttaactgttcatggggacttggaatatcacttgaatttctgatactgtcagccgtaggcatcctgcctgcacttttaaaattagaaattctgaatttaaacatgaagtccttgcccacacctatgtcctgaatggtgttgcctaggttttcttctagggtttttatggttttaggtctaacatgtaagtctttaatccatcttgaattaatttttgtataaggtgtaaggaagggatccagtttcagctttctacatatggctagccagttttcccagcaccatttattaaatagggaatcctttccccattgcttgtttttctcagatttgtcaaagatcagatggttgtagatacgtggcattgtttctgagggctctgttctgttccattgatctatatctctgttttggtaccagtaccatgctgttttggttactgtagccttgtagtatagtttgaagtcaggcagcgtgatgcctccagctttgttcttttggcttaggattgacttggcaatgcgggctcttttttggttccatatgaactttaaagtagttttttccaattctgtgaagaaagtcattggtagcttgatggggatggcattgaatctataaattaccttgggcagtatggccattttcacaatattgattcttcctacccatgagcatgaaatgttcttccatttgtttgtatcctcttttatttcgttgagcagtggtttgtagttctccttgaagaggtctttcacatcccttctaagttggattcctaggtattttattctctttgaagcaattgtgaatgggagttcactcatgatttggctctctgtttgtctgttattggtgtataagaatgctcgtgatttttgtacattgattttgtatcctgagactttgctgaagttgcttatcagcttaaggagattttgggctgagacaatggggttttctagatatacaatcatgtcatctgcaaacagagacaatttgacttcctcttttcctaattgaataccctttatttccttctcctgcctaattgccctggccagaacttccaacactatgttgaataggaatggtgagagagggcatccctgtcttgtgccagttttcaaagggaacgcttccagtttttgcccattcagtatgatattggctgtgggtttgtcatagataactcttattattttgagatacatcccatcaatacctaagttattgagagtttttagcatgaagggttgttgaattttgtcaaaggccttttctgcatctattgagataatcatgtggtttttgtttttggttctgtttatatgctggattacatttattgatttctgtatgtcgatgtctaaaacgccaaaagcaatggcaacccaagccaaaattgacaaatgggatctaattaaactaaagagcttgtctccaacaaccgagctccctgagtgagcaattcctgtcccttttaagggcttgcaactccacttggtaacctgattgttaatcactctttgttggtctacttcgcttttctgtctcaacttcat

SEQ ID NO: 17983 - DNA, 4755 bp, Homo sapiens
  SIMILAR (3699)..(2671): 721254mologous to Homo sapiens putative p150,accession number U93572,Smith-Waterman Score=1309.
ctactccggcttctctttgtcctgcttctgctcctcctccagtgccaaggttcgctcacgctcctttaccagctggacgccacagtaggtgacaaacaggatggacagcgtggtctgggggaaccctgtgagtagcaggcgccgggcaaccagctctgtgaatttgaggctgttcaggctcacaaggttgtacatgatgatggcccagaagttcatggctccaaacagggcccggaccctacgggacatctgcactgacagagaggcctcaattcgtgctaggggcccccactctgccagtttttgcatccagagctcaaagttgaggccaaagcagttaaggaatgaccacaggtagacaatgtcacaaggcccaagccacagtgtggtgatggcaaatgtggccactgtggctgccagctctgggatcacagcggaatgctccccaccaatgtggttatacacatatttgcaaagccagtcgttgatgccacggtcaaagtgcgtttccgcaaagacgtagagtgcggtgatgcacttgggaggctggggtgggtccaggtggtcgaggcatgccacagtgttgacaacaccaaagaggacggccgccttcacccagtcatacaccaggtttgaataggctaggccagcgagggcactgtctgggaggcggttggcgaacttgaggtcgctggggatagtgaggatgtagaagaagtgaaagaagatgtcgacggccatgatggccaccacgcttaggcctgcctgggctcggatgtgccacagctcaccctcgcgtctcactggctccacctggctcacctgagcatggaagcgatcaaaggtcatgatgggcccgaagaagaagaagggcaggtagaagttgtacttgagcaggtcagctaaggagtagtggcggtcagggtgggcacagctctccagtgcaaagctggtgcaacgcagcactgtgaagctgctgcccccatgaaacagcacctcttgaagatcaaaagtgcctgttacaaacccgctctgccaagagattagggggtccatcttgaaggaggccaggctggccaagccaaggccaagacagagccagggctggcccaaaagcgaggccacatagaggcccacacagtgaccaagcagcagcagcaggtaccaagggcccattgtgcccatcacagccaaggccccgtacacagcatacatccaggagcggagctttggggcaaccatcgtgcagagtttagcaaacagcacatgtccggagagggcaaagatgatgacgttgcgaaaggaggtgaaccacatcacccactcgaagtcagccacatccatcttccggccaatgtactcccagccaggtcgcacagactcccggaaggccttcctgtgggccccatcttgtgaagcctcaaggaggccccggccagcataggccagggccccactcagcaccagagagtagaggcccagctcagccgccggcaatgctgtcttgatgcccatagcctggacagggccttgatcctcccctaaatcttcatccccagccctgtagccatctcccctgggccccccagcagccgacggtctcctcgtacagatggaggggtcatgggccagataggggcagggacctaggatgagggcgatgaacacctgcccgagggactgcatctgtccattcacagccgccttgccatcccagagctctcgcctctgccagtgggctgctgggcctccctgctgctgtaacccagccagcccagggtctcctgcagtgtcccaccagggcttctcttctgccttcctggcctggcccaggatctcatggtacatccggaagtcctcctcctttccccgcagggcactgcccagggcagcctttagcatttcattctcctccacctggatggccagcctggttgtcagctcttccatttgggattccacgggcacatcggagagctgggcaaaggatgggtccttcttctcgctcccggttgggttgtgcctgttgttagaggtgggcagacctgttttggtcctgggagctgctctctgggaggctgatgccttccctggctccaggcgtatcttctccagatgttgctccagcaccacggtgcggtgtcgctcctcctgcagcttcctctctgactccaggagcttgctgttgctctcctccacccgtttctgcaggacagtgacaaactcggtgagccggtcacgctccacctcggcagcctgccagagggccttgatctctgacacttgtgcctgccagcctttttgttctggggagtccgagaaccgagaagatccaagcctgccaacatgatcgcctgctgaggccggggacttggtcaggcctgggtcctccaggaactgggtataggcagggctgacctcgcggccactggacccctcacccactcctttattccgaagatagtgcacattgagttgtccgatctccatctccagctgtcgcactttggcctcccgctcagctaccatggcctgcagctgggcgactaggctgttgctccgctgagcctcgctgttcagttgctggtccaggtggtgctgggacactcgcgttttctcctcctgcagactcaggctgcctaggatctcctgtagctgcttcagctggtctctgatggtagtttcttttgccatgcagaagctctttagtttaattagatcccatttgtctattttggcttttgctgccattgcttttggtgttttagtcatgaagtccttgcccatgcctatgtcctgaatggtatttcctagcttttcttctagggtttttatggtcttaggtctaacatttaaatctttaatccatcttgaattaatttttgtataaggtgtaaggaagggatccagtttcagctttctacatatggctagccagttttcccagcaccacttattaaatagggaatccttcccccatttcttgtttttgtcaggtttgtcaaagatcagatggttgtagatgtgtggtgttatttctgaggcctctgttctgttccattggtctatatatctgttttggtaccagtaccatgctgttttggttactgtagccttgtagtatagtttgaagtcaggtactatgatccctccagctttgttctttttgcttaggattgtcttggcaatgtgggctcttttttgattccatatgaactttaaagtagttttttccaattctgtgaagaaagtcattggtagcttgatggggatggcactgaatctataaattactttgggcagtatggccattttcatgatattgactcttcctacccatgagcatggaatattcttccatttgtttgtgtcctcttttatttcattgagcagtggtttgtagttcttcttgaagaggttcttcacatcccttttaagttggattcctaggtattttattctcatgagggcgtcgatgagctcgtcatcatgccggcccttctccaccagggttcccatctgactcttgagggtcttcatctcacttgacagcagcttgttccgagacctcatgccctcgaacttcttttttagctcttcaagctctctctggaggacatcccgttcactggcaagtttctccaagccttcctgtttttccctttccaggctgcggatcctcagcaggtttttctcctgtgccgacagcttccttgggtctggatagacagacaactcatcactggctgttcccgcagactggctccgggcctggcccaattgcttctcaagctcttgaaccttgctctgcaaaacaagaatttgttgagcccgacccctccaggtccctggcgaagataggagctgctgaacgttgatgtcttccccaacctctctggccaaaaccttctgtgccatccgcagctcctgcttcacagactggatctggtttcggaggtcactcatcttcaagttggtggccaccagcctgtcctgcagggccttcacctctggggtctccagctcttgagtttcatgaactgtcactggtttagtaaaatgggctctggggaataagtccccatttccaatagccacttttactctgtagatttggagccccacgaaagggaaagtgttcataatatgaactgccccataaagaacaggattccactgggcagtagtgagctccctgtccctggagtaaggtggagtctggatgtgtccccagtgaggatgttcccgctccagctcctggatgcgattggtcagctgcttcaccctggtttttgcaccctctgattctgccatcaacagccggttcttttttgatagctccacaattttggtggcgaccacgtctccggctacaccggctgtccctgtgaaggcaaatctgtcctcttctattttctttttgaggtgtttgatttcaaagtccctttccttcagcagcttatacaatcgcccgttctcgtccaccgtttccctgagctcatttcgaaggtgttcaatctcatcttcaagcaccctcttctcaaagctatttttcgagtttggctcccctgcgtggagaaggctgaggccatctgaaacctccaagggctcctcttggtcgtcagctctgcttttgaggctcagttctttttccctctttttctccatctgcttctgtaaccgtttgtgctgcatctcctgcattgccttgaactggagccgcaaagtgttctgtgagctttcatctgctgccat

SEQ ID NO: 17984 - DNA, 2793 bp, Homo sapiens; identical to SEQ ID NO: 4231
  SIMILAR (691)..(2094): 821254mologous to Homo sapiens putative p150,accession number U93563,Smith-Waterman Score=2025.

SEQ ID NO: 17985 - DNA, 3480 bp, Homo sapiens
  SIMILAR (2406)..(835): 761254mologous to Homo sapiens putative p150,accession number U93563,Smith-Waterman Score=1984.
ttaccattcattaaatggaagtggaccatcataaaggtcttcatcctcgccatcttcacattgagtaggcaaagaccaaatgtatccagacagcaaacagaaccactggaaggtacaggaatcagtatatctagaggtagccaagcaagttcccaggtggcccacagctgggggcggggagtggtgtcccaaatatgcctgcgcatcagagggggacatgcagctcgacaccactctggcctcactccctggagattctaattcagggagtcccacctccagttctttcttcctcagctgcctttccttcccaactcccaccctctcctcctgccccaccctagcacctgttccatttcgcattcctgcagggctttcctctcccattgagctctcacctgagaagacagatttgccagtgaaagccccagagagttttgccatcacaccttttttctttcttggttctgttgtatggggtggggtctggcctgccacattgttacatgtcaccatggcaaggctgaactgtgcttcccagaattcccttttctgcataattccagttagggtgggccacaagagacatcttgcacaggacaggacagcatcatattgtctgtgcattcggtagctcggcactgtggcagccgtgcatgtgttgtcatttgtctgccggctcatgttgctggtgagagacggcagcaggcctgcagctactacacttctcctggatcctctctcagcttttgcaaatcctgctggggacttttgaaaaggaactcctgaatgtagatggcccctcttgtccttgtcaacataagattctttggctccatgacctctaaagaggctgttgtttcctgactttttaatgatcgccattctaactggtgtgagatggtatctcattgtggttttgacttgcatttctctgatgatcagtgatgatgagcattttttcatgtgctttttgtctgcataaatgtcttcttttgagaagtgtctgttcatgtccttcgcccactttttgatggggttgtttgtttttttcttgtaaatttgtttgagttcattgtagattctggatattagccctttgtcagatgagtaggttgcaaaaattttctcccattctgtaggttgcctgttcactctgatggtagtttcttttgctgtgcagaagctctttagtttaattagatcccatttgtcaattttggcttttgttgccattgcttttggtgttttagacatgaagtccttgcccatgcctatgtcctgaatggtaatgcctaggttttcttctagggtttttatggttttaggtctaacatgtaagtctttaatccatcttgaattaatttttgtataaggtgtaagtacaggatccaatttcagctttctacatatggctagccagttttcccagcaccatttattaaatagggaatcctttccccattgcttgtttttgtcaggtttgtcaaagaacagatagttgtagatatgcggcgttatttctgagggctctgttctgttccattggtctatatctctgttttggtaccagtaccatgctgttttggttactgtagccttgtagtatagtttgaagtcaggtagcatgatgcctccagctttgttcttttggcttaggattgacttggcaatgcaggctcttttttggttccatatgaactttaaagtagttttttccaattctgtgaagaaagtcattggtagcttgatggggctggcattgaatctataaattaccttgggcactatggccattttcacaatattgattcttcctacccatgagcatggaaagttcttccatttgtttgtatcctcttttatttcattgagcagtggtttgtagttctccttgaagaggtccttcacgtcccttgtaagttggattcctaggtattttattctctttgaagcaattgtgaatgggagttcactcatgatttggctctctgtttgtgtctcatcaatacctaatttacggagagtttttagcatgaagggttgttgaattttgtcagaggccttttctgcatctattgagataatcatgtggtttttgtgtttggttctgtttatatgctggattacgtttattgattttcgtatgttgaaccagccttgcatcccagggatgaagcccacttgatcatggtggataagctttttgatgtgctgctggattcggtttgccagtattttattgaggatttttgcatcaatgttcatcaaggatattggtctaaaattctctttttttgttgtgtctctgccaggctttggtatcaggatgatgctggcctcataaaatgagttagggaggattccctctttttctgttgattggaatagtttcagaaggaatggtaccagctcctccttgtacctctggtagaattcggctgtgaatccatctggtcctggactttttttggttgataagctattaattattgcctcaatttcagagcctgttattggtctattcagagattcagcttcttcctggtttagtcttgggagggtgtatgtgtcgaggaatttatccatttcttctagattttctagtttatttgcatagaggtgtttatagtattctctgatggtagtttgtatttctgtgggatcagtggtgatatcccctttaccattttttattgcatctatttgattcttctctcttttcttctttattagtcttgctagcagtctatcaattttgttgatcttttcaaaaaaccagctcctacgtgcaggtgccaggattgggggctgttccttgggtgctgctgacaagaatggcatcaggtcccttgttccgctcccaccttctaaacctcttcctgtgcctgctactggttgcttcagtcctcctgataaccttgtgacacagaggctgttatttccatttcctcgatgagaccagtaaggtggagaggggcttatcacctgtctgacattgtattgcttgtgagtagcaaatgctggaattggaatccagatgtttctgattccagagttgctctcttctgctgctgctttccagcccatcccatcaagtgagctgaggggagatgtctgattgcagaggccctcacagtccctgagttctaattcactgcgtttggcctgggggtagtacctgaggccatagatgacacttgaagtcaggtggcagccaagctgacgttctgggcactgaacccatttgcagcacaaccaggaagcccacagattggggttttgggagcctgatgcagccattaaggagagggggctggcatgaagaatgcagtcagaagcacagctggaaaagtagggctcaaagcagagtttgaggccaggagggagctggactgagctgccgctgagctgctccacgctgccctggccgctggtgccagctctctcctctccattctgcacttcagaggttcccat

SEQ ID NO: 17986 - DNA, 1784 bp, Homo sapiens
  SIMILAR (1)..(1590): 961254mologous to Homo sapiens putative p150,accession number U93572,Smith-Waterman Score=2646.
atgaaaaatgataaaggggatatcaccaccgatcccacagaaatacaaactaccatcagaaaatactacaaacacctctatgcaaataaactagaaaatctagaagaaatggataaattcctcaacacatacactctcccaagactaaaccaggaagaagttgaatctctgaataggccaataacaggatctgaaattgtggcaataatcaatagcttaccaaccaaaaagagtccaggaccagatggattcacagccgaattctaccagaggtgcaaggaggaactggtaccattccttctgaaactattccaatcaatagaaaaagagggaatcctccctaactcattttatgaggccagcatcatcgtgataccaaagccgggcagagacacaaccaaaaaagagaattttagaccaatatccttgatgaacattgatgcaaaaatcctcaataaaatactggcaaaccgaatccagcagcacatcaaaaagcttatccaccatgatcaagtgggcttcatccctgggatgcaaggctggttcaatatatgcaaatcaataaatgtaatccagcatataaacagagccaaagacaaaaaccacatgattatcttaatagatgcagaaaaagcctttgacaaaattcaacaatgcttcatgctaaaaacattcaataaattaagtattgatgggacgtatctcaaaatcataagagctatctatgacaaacccacagccaatatcatactgaatgggcaaaacctggaagcattccctttgaaaactggcacaagacagggatgccctctctcaccactcctattcaacatagtgttggaagttctggccagggcaattaggcaggagaaggaaataaagggtattcaattaggaaaagaggaagtcaaattgtccctgtttgcagacgacatgattgtatatctagaaaaccccatcgtctcagcccaaaatctccttaagctgataagcaacttcagcaaagtctcaggatacaaaatcaatgtacaaaaatcacaagcattcttatacaccaataacagacaaacagagagccaaatcatgagtgaactcccattcacaattgcttcaaagagaataaaatacttaggaatccaactcacaagggacatgaaggacctcttcaaggagaactacaaaccactgctcaatgaaataaaagaggatacaaacaaatggaagaacattccatgctcatgggtaggaagaatcaatatcatgaaaatggccatactgcccaaggtaatttatagattcaatgccatccccatcaagctaccaatgactttcttcacagaattggaaaaaactactttaaagttcatatggaaccaaaaaagagcccgcatcgccaagtcaatcctaagccaaaagaacaaagctggaggcatcacactacctgacttcaaactatactacaaggctacagtaaccaaaacagcatggtactggtaccaaaacagagatatagatcaatggaacagaacagagccctcagaaataacaccgcatatctacaactatctgatctttgacaaacctgagaaaatgagtataatagatacagggggatggtatgaggcaccagtcagttccttcttcaaggagggactatgccgcacaggtactgagaatcaggttaacagacagcctccagctgccagtcccttcaaggtttacgtcagctgcacggggtcacttcaccctaggccacactacttcttggagcatccatatccaag

SEQ ID NO: 17987 - DNA, 1071 bp, Homo sapiens
  SIMILAR (328)..(726): 851254mologous to Homo sapiens beta-galactoside alpha-2,3- sialyltransferase,accession number L13972,Smith-Waterman Score=599.
atggccatactgcccaagataatttatagattcaatgccatccccatcaagctaccaatgactttcttcacagaattggaagaaactacgttaaagttcatatggaaccagaaaagagcctgcactgccaagacaaccctaagcaaaaagaacaaagctggaggcatcatgccacctgacttcaaactatactacaaggctacagtaaccaaagcagcatggtactggtaccaaaacagagatatagaccaacggaacagaacagaggcctcagaaataacaccacgcatctacagtctatgggaggtcgccatcaggacagtgaagatggtgaccctgcggaagaggaccctgaaagtgctcaccttcctcgtgctcttcatcttcctcacctccttcctgaactactcccacgccatggtggccaccacctggttccccaagaagatggccctggagctcttggagaacctgaagagactgatcaagcacaggccctgcacttgcacccactgcatcaggcagcatgggctctcagcctggttcgatgagaggttcaaccagatagtgcagctgctgctgactgcccagaacgcgctcttggaggacaacacctaccaatggtggctgaggctccagcaggagaagaagcccaatatcatcaacaataccatcaaggaattcagagcagtacctgggaatgtggacccaatgctggagaagaggatgaacaaggcacccacggcagggtttgaagctgctgccgggagcaaaaccgcccaccatctggtgtaccctgagagcttccgggagctgggggacaatgtcagcatggtcctggtgcccttaaagaccatgaacttggagtgggtggtgagcaccaccaccacgggtgccatttcccacacctacaccccggtcctcgtgaagatcagagtgaaacaggataagatcctgatctaccacccagccttcatcaagtatgtcttcgacaactggctgcagagccacaggcggtacccactcaccagcatcctctcggtcatcttctcaatgcatgtctgcgattag

SEQ ID NO: 17988 - DNA, 2024 bp, Homo sapiens
  SIMILAR (865)..(1389): 921254mologous to Homo sapiens putative p150,accession number U93563,Smith-Waterman Score=833.
atggggaaaaaacagagcagaaaaactgaaaattctaaaaatcagagtgcctctccccctccagaggaatgcagctcctctccagcaatggaacaaagctggatggagaatgactttcacgaattgagagaagaaggcttcagatcaaacttctccgagctaaaggaggatgttcgaacccatagcaaagaagctaaaaatcttgaaaaaagattagatgaatggctaactggaataaccagtgtagagaagtccttaaatgacctgatggagctgaaaaccatggcacgagaactatgtgacaaatgcacaagcttcagtagcaaattccatcaactggaagaaagggtatcagtgactgaagatcaaatgaatgaaatgaagagctggttttttgaaaagatcaacaaaattgatagactgctagcaagactaataaagaagaaaagagagaagaatcaaatagaggcaataaaaaatgataaaggggatatcaccaccgatcccacagaaatacaaactaccatcagagaatactataaacacctctacacaaataaactagaaaatctagaagaaatggatacattcacgggcacatacaccctcccaagactaaaccaggaagaaattgaatcactcaataaaccaataacaggctctgaaattgaggcaataattaatagcttaccaaccaaaaaaagtccaggaccagacggattcacagctgaattctaccagaggtacaaggaggagctgcttgttcaacatacgaaaattgataaaccttattcagcttataaaccgaacccaagacccgtgaccgccactagactaagtcgaattggacgcagagttcatcaatatctagaaaaccccattgtctcagcccaaaatctccttaagctgaaaagcaacttcagcaaagtctcagggtacaaaatcaatgtgcaaaaatcacaagcattcttatacatcaagaagagacaaacagagagccaaatcatgagtgaactcccattcacaattgcttcaaagagaataaaatacctaggaatccaacttataagggatgtgaaggacctcttcaaggagaactacaaaccactgctcaatgaaataaaagagggcacaaacaaatggaagaatattccatgctcatggataggaagaatcaatatcgtgaaaatggccatactgcccaaggtaatttatagattcaatgccatccccatcaagctaccaatgactttcttcacagaattggaaaaaattactttaaagttcatatggaaccaagaaagagcctgcattgccaagacaatcctaagcaaaaagaacaaagctggaggcatcatgctacctgacttcaaactatactacaaggcttacagtaatcaaaacagcatgggactggtaccaaaacagatatctagaccaatggaacagaacagagccctcagaaataaccccacacatctacaaccatctgatctttgacaaacctgacaaaaacaagaaatggggaaaggattccctatttaataaatggtgctgggaaaactggctagccatatgtagaatgctgaaacttgatcccttccttacaccttacacaaaaattaattcaggatggattaaagacttaaattttagacctaaaaccataaaaactctagaagaaaacctagacaataccattcaggacacaggcatgggcaagaacttcatgactaaaacaccaaaagcaatggcaacaaaagccaaaattgacaaatgggatctaattaaactaaagagcttcagcacagcaaaagaaactgccatcagagtgagcaggagaaagaattgctcagttgttgacataaagctgggaagcagtacagtgaaaagaactggaggctttggtagcactaatccaacaggaaaggctatatattgggttaatcaagtgtctgacaaaagacctatttgtacagtagacctgctgttggatgcttaccggttgacacacaggactggtt

SEQ ID NO: 17989 - DNA, 2746 bp, Homo sapiens
  SIMILAR (1138)..(2586): 901254mologous to Homo sapiens putative p150,accession number U93568,Smith-Waterman Score=2372.
atgggcaaggtaaacctgctgatggagagtcatgaatgccagagtgagaatttcagaattgattcagtaacaatcagtaaacgaacattttgcctgcagtacactgttaggcactccatgtcctcaaacacaaggtctggccttgtacacaaacaaccagagaagtggcaagaatcaccacataatgtagaagaaaacctgagctgggccttacagggtggggaaggattaacaaggagaagaaaagaacagaatgagcaatcttatatggagttaaaaattggttatggtgtagaaaagctttttggaatttctgaagcaatttcagtggcctctgctgatgatacccagacaaacacggtctggagtggacctccagcaaactccaacaaacctgcagctgaggtcctgactgttagaaggaaaactaataaacagaaaggacatccacatcaaaaccccatctgtatgtcaccatcatcaaagaccaaagaaatacaaactaccatcagagaatactataaacacctctatgaaaataaactacaaaatctagaagaaatggataaattactggacacatacaccctcccaagactaaaccaggaagaagttgaatccctgaatagaccaataacaggctctgaaattgaggcaataatgaatagcctaccaaacaaaaaaagtccaggaccagatggattcacagccgaattctaccagaggtacaaagaggagctggtaccattccttctgaaactattccaatcgatagaaaaagagggaatcctccctaactcattttatgaggccagcatcattctgataccaaagcctggcataaaaacaacaaaaaaagagagttttagaccaatatccctgatgaacatcgatgcaaaaatcctcaataaaatactggcaaaccgaatccagcagcccatcaaaaagcttatccaccacgatcaagttggcctcatccctgggttgcaaggctggttcaacatacacatatcaatagacataatccatcatataaacagaaccaatgacaaaaaccacataattatctcaatagatgcagaaaagggctttgacaaaattcaacagcccttcatgctaaaaactctcaataaactagcccaaaatctccttaagctgataagcaacttcagcaaagtctcaggatacaaaattaatgtgcaaaaatcacaagcattcctatacactaataacagacaaacagagagccaaatcatgagtgaactcccattcacaattgcttcaaagagaataaaatacctaggaatccaacttacaagggatgtgaaggacctcttcaaggagaactacaaaccactgctcattggaataaaagaagacacaaataaatggaagaacattccatgctcatggataggaagaatcaatatcgtgaaaatggtcatactgcccaaggtaatttatagattcaatgccatccccatcaagctaccaatgactttcttcacagaattggaaaaaattactttaaagttcatatggaaccaaaaaagagcccacattgccaagacaatcctaagccaaaagaacaaagctggaggcatcacgctacctgacttcaaactatactacaaggctacagtaaccaaaacagcacggtactggtaccaaaacagagatatagaccaatggaacagaacagagccctcagaaataataccatacatctacaaccatctgatctttgacaaacctgacaaaaacaagaaatggggaaaggattccccatttaataaatggtgctgggaaaactggctagccttatgtagaaagctgaaactggatccttatacaaaatttacaccttacacaaaaattaattcaagatggattaaaggcttaaatgttagacctaaaaccataaaaaccctagaagaaaacctaggcaataccattcaggacataggcatgggcaaggacttcatgactaaaacaccaaaagcaatggcaacaaaagccaaaattgacaaatgggatctaattaaactaaagagcttctgcacagcaaaagaaactaccatcagagtgaacacgcaacctacagaatggaagaaaatttttgcaatctactcatctgacaaagggctaatatccagaatctacaaagaactcaaacaaatttacaagaaaaaaacaaacaaccccatcaaaaagtgggtgaaggatatgaacagacacttctcaaaagaagacatttatgcagccaacagacacatgaaaaaatgctcatcatcactggccatcagagaaatgcaaatcaaaaccacaatgagatactatctcacactaattagaatggcaatcattaaaaagtcaggaaacaacaggtgctggagaggatgtggagaaataggaacacttttacactgttggtgggactgtaaaccagttcaaccagtgtggaagacagtgtggcaattcctcagggatctagaactagaaatactatttgacccagccatcccattactgggtatatacccaaaggaatataaatcatgctgctataaagacacatgcacacaaacctcacaagtccttcagcttcagtacatatctctgtactacgagtcccacgtgtatgcttcagtccagggggcctctaagctccaacagctctatgcggatgcctccaacgacacacccaaccctgaatccattcctgatctccttgccccaaacctag

SEQ ID NO: 17990 - DNA, 1254 bp, Homo sapiens
  SIMILAR (190)..(1200): 861254mologous to Homo sapiens ORF2 contains a reverse transcriptase domain.; ORF2,accession number M80341,Smith-Waterman Score=1590.
atggtcttgatgatcgtggatgtttgtcggtgttgtggcattgaagagttagtagtatttttatacggagaaacttctccagaaagccatcttctatctgtcacctttcctgatttaaccatgatcaaatgtattcaagaggtgtcaaaagacccaagatccctagtaatagcccggaagttcagtgatgaggacctcttcaaggagaactacaaaccactgctcaacgaaatcaaagaggacacaaacaaatggaagaacattccatgctcatggataggaagaatcaatatcgtgaaaatggccatactgcccaaggtaatttatagattcaatgccatccccatcaagctaccaatgactttcttcacagaattgggaaaaaaaactactttaaagttcatatggaaccaaaaaagagcccgcattgccaagacaatcctaagcaaaaagaacaaagctggaagcatcacgctacctgacttcaaactatattacaaggctacagtaaccaaaacagcatggtactggtaccaaaacagagatatagaccaatggaacagaacagaaccctcagaaataataccacacatctacaaccatctgatctttgacaaacctgacaaaaacaagcaatggggaaaggattccctatttaataaatggtgctgggaaaactggctagtcatatgtagaaagctgaaactggatcccttccttacaccttatacaaaaattaattcaagatggattagagacttaaatgttagacctaagaccataaaaaccctagaagaaaacctaggcaataccattcaggacataggcatgggcaaggacttcatgcctaaaacaccaaaagcaatggcaacaaaagacaaaatagacaaatgggatctaattaaactaaagagcttctgcacagcaaaagaaaccaccatcagagtgaacaggcaacctacagaatgggagaacatttttacaatctacccatctggcaaagggctaatatccagaatctacgaagaacttaaacacatttacaagaaaaaatcaaacaaccccattaaaaagtgggaaaaggatatgaacagacacttctcaaaagaagacatttattctgccaaaagacacatgaaaaaaatgctcatgatcactggccatcagagaaatgcaaatcaaaaccacaatgagacaccatctcacaccagttagaatggcaatcattaaaaagtcaggaaacaacaggtgctg

SEQ ID NO: 17991 - DNA, 1464 bp, Homo sapiens
  SIMILAR (694)..(1461): 931254mologous to Homo sapiens beta-galactoside alpha-2,3- sialyltransferase,accession number L13972,Smith-Waterman Score= 1268.
gagacattatcagctctttaaggattgcagaagaataggctactttattttctgaaaaggtaaatatatgcaagcaaagccaacatgccacgaatggcgttggtctaccacacagccgtgtctgggacacagttgggggtcatcccccagcaggagtgaagtcgagcttagcggcccttgtgtcctcccttggaattcctgccatcccttttgattgagcctccacctctgggatttttcttccatttttctcctctcttaaggagggagttcctgctacccatcgtgggaggccaccatcaggactgcgaagatggtgaccctgcggaagaaggaccctgaaagtgctcaccttcctcgtgctcttcatcttcctcacctccttcttcctgaactactcccacaccatgggtggccaccacctggttccccaagcagatggtcctggagctctccgagaacctgaagagactgatcaagcacaggccttgcacctgcacccactgcatcgggcagcgcaagctctcggcctggttcgatgagaggttcaaccagaccatgcagccgctgctgaccgcccagaacgcgctcttggaggacgacacctaccgatggtggctgagcctggagtctgtgatgttcagtgtcaccatgggattctgtttacaaaggccttttggggacaaacagggtactacacagcctgtttatataaaccaaacaggaagggaccttacacaacagcagaggctccagcgggagaagaagcccaataacttgaatgacaccatcaaggagctgttcagagtggtgcctgggaatgtggaccctatgctggagaagaggtcggtgggctgccggcgctgcgccgttgtgggcaactcgggcaacctgagggagtctttttatgggcctgagatagacagtcacgactttgtcctcaggatgaacaaggcgcccacggcagggtttgaagctgatgttgggaccaagaccacccaccatctggtgtaccctgagagcttccgggagctgggagataatgtcagcatgatcctggtgcccttcaagaccatcgacttggagtgggtggtgagcgccatcaccacgggcaccatttcccacacctacatcccggttcctgcaaagatcagagtgaaacaggataagatcctgatctaccacccagccttcatcaagtatgtctttgacaactggctgcaagggcacgggcgatacccatctaccggcatcctctcagtcatcttctcaatgcatgtctgcgatgaggtggacttgtacggcttcggggcagacagcaaagggaactggcaccactactgggagaacaacccatccgcgggggcttttcgcaagacgggggtgcacgatgcagactttgagtctaacgtgacggccaccttggcctccatcaataaaatccggatcttcaaggggagatga

SEQ ID NO: 17992 - DNA, 4878 bp, Homo sapiens
  SIMILAR (712)..(2880): 951254mologous to Homo sapiens putative p150,accession number U93563,Smith-Waterman Score=3575.
atggggaaaaaacagagcagaaaaaccggaaactctaaaaagcagagcgcctctcctcctccaaaggaatgcagctcctcaccagcaacggaacaaagctggacggagaatgactttgacgagttgagagaagaagacttcagacgatcaaactactccgagctacaggaggaaattcaaaccaaaggcaaagaagttgaaaactttgaaaaaaattcagacgaatgtataactggaataaccaatacagagaagtgcttaaaggagctgacggagctgaaagccaaggctcgagaactacatgaagaacgcagaagcctcaagagccgatgcgatcaactggaagaaagggtatcagtgatggaagacaaaatgaatgaaatgaagcgagaagggaagtttagagaaaaaagaataaaaagaaacaaacaaagcctccaagaaatatgggactatgtgaaaagaccaaatctacgtctgattagtgtacctgaaagtgacagggagaatggaaccaagttggaaaacactctgcaggatattatccaggagaacttccccaatctagcaaggcaggccaacattcagattcaggaaatacagagaacgccacaaagatactcctcgagaagagcaactccaaggcacataattgtcagattcagcaaagttgaaatgaaggaaaaaatgttaagggcagccagagagaaagaaatacaaactaacatcagagaatactacaaacaccgctacgcaaataaactagaaaatctagaagaaatggataaattcctcaacatatacacccttcgaagactaaaccaggaagaagttgaatctctgaacagaccaataagaggctctgaaattgtggcaataatcaatagtttaccaaccaaaaagagtccaggaccagatggattcacagccgaatactaccagaggtataaggaggaactggtaccattccttctgaaactattccaatcaatagaaaaagagggaatcctccctaactcattttatgaggccagcatcatcctgataccaaagccgggcagagacacaaccaaaaaagagaattttagaacaatatccttgatgaacattgatgcaaaaatcctcaataaaatactggcaaaccgaatccagcagcacatcaaaaagcttatccaccatgatcaagtgggcttcatccctgggatgcaaggctggttcaatatacgcaaatcaataaatgtaatccagcatataaacagaaccaaagacaaaaaccacgtgattatctcaatagatgcagaaaaggcctttgacaaaattcaacaactcttcttgctaaaaactctcaataaattaggtattgatgggacatatctcaaaataaaaagagctatctatgacaaacccacagccaatatcatactgaatgggcaaaaactggaagcattccctttgaaaactggcacaagacagggatgccctctctcaccactcctattcaacatagtgttggaagttctggccagggcaattaggcaggagaaggaaataaagggtattcaattaggaaaagaggaagtcaaattgtccctgtttgcagatgacatgattgtatatctagaaaaccccattgtctcagcccaaaatctccttaagctgataagcaacttcagcaaagtctcaggatacaaaatcaatgtacaaaaatcacaagcattcttatacaccaataacagacaaacagaaacccaaatcatgagtgaactcccattcacaattgcttcaaagagaataaaatacctaggaatccaacttacaagggacgtgaaggacctcttcaaggagaactacaaaccactgctcaatgaaataaaagaggatacaaagaaatggaagaatattccatgctcatgggtaggaagaatcaatatcatgaaaatggccatactgcacaaggtaatttatagattcaatgccatccccatcaagctaccaatgactttcttcacagaattggaaaaaactactttaaagttcacatggaaccaaaaaagagcccgcattgccaagtcaatcctaagccaaaagaacaaagctggaggcatcatgctacctgacttcaaactatactacaaggctacagtaaccaaaacagcatggtactggtaccaaaacagagatatagatcaatggaacagaacagagccctcagaaataacgccgcatatctacaactatctgatctttgacaaacctgagaaaaacaagcaatggggaaaggattccctattcaataaatggtgctgggaaaactggctagccatatggagaaagctgaaactggatcccttctttacaccttatacaaaaattaattcaagatggattaaagacttaaacgttagacctaaaaccataaaaaccctagaagaaaacctaggcattaccattcaggacataggtatgggcaaggacttcatgtctaaaacaccaaaagcaatagcaacaaaagccaaaattgacaaattggatctaattaaactaaagagcttctgcacagcaaaagaaactaccatcagagtgaacaggcaacctacagaatgggagaaaattttcgcaacctactcatctgacaaagggctaatatccagaatctacaatgaactcaaacaaatttacaagaaaaaaacaaacaaccccatcaaaaagtgggcaaaggacatgaacagacacttctcaaaagaagacatttatgcagccaaaaaacacatgaaaaaatgctcaccatcactggctatcagagaaatgcaaatcaaaaacacaatgagataccatctcacaccacttagaatggcaatcattaaaaagtcaggaaacaacagtaaaatactggcaagccgaatcccgcagcacatcaaaaagcttatccaccatgatcaagtcggcttcatctctgggatgcaaatcttgtttaacataagcaaatcaataaatgtaatccatcgcataaacagaaccaatgacaaaaaccacatgattatctcaatagatgcagaaaataccttcgacaaaattcaacagctcttcatactaaaaactctcaataaactaggtattgatggaatgtatctcaaaataataagagctatttatgacagacccacagccaatatcatactgaatgggcaaaaactggaagcattccctttgaaaaccggcacaagacaaggatgccctctctcaccactcctattcaacatattaatggaagctctggccagggcaatcaggcaagagaaagaaatgatgcgtattcaggtaggaaaagaagaagtcaaattgtccctgtttgcagatgacatgattgtatatttagaaaatcccatcgtctcagccccaaatctccttaagctgataaggaacttcagcaaagtctcagaatacaaaatcaatgtgcaaaaatcacaagcattcctgtacaccaataacagacaaacagagagccaaatcatgagtgaactcccattcactattgcttcaaagagaataaaatacctaggaatccaacttacaagggatgtgaaggacctcttcaaggagaactacaaaccactgctcaacgaaatacaagaggacacaaacaaatggaagaacattccaagctcatggataggaagaatcaatatcgtcaaaatggccatactgcccaaggtaatttatagattcaatgccatccccatcaagctaccaatgactttcttcacagaattgggaaaaactactttaaagttcatatggaaccaaaaaagagctcgcattgccaagacaatcccaagccaaaagaacaaagctggaggcatcatgctacctgacctcaaactatactacaaggctacagtaaccaaaacagcatggtattggtaccaaaacagagatatagatcaacggaacagaacagagccctcagaaataataccacacatctacaaccatctcatctttgacaaacctgacaaaaacaagaagtggggaaaggattccctatttaataaatggtgctgggaaaactggctagccatatgtagaaagctgaaactggatcccttccttacaccttatacaaaaattaattcaagatggattaaagacttaaatgttagacctaaaaccataaaaaccctagaagaaaacctaggcaataccattcaggacataggcatgggcaagcacttcatgtctaaaataccaaaagcaatggcaacaaaagccaaaattgacaagtgggatctaattaaactaaagagcttctgcactacaaaagaaactaccatcagagtgaacaggcaacctacagaatgggagaaaatttttgcaatctacccatctgacaaacagctaatatccagaatctacaaagaacttaaacacatttacaataaaaaaaaaaaaaaaaacaaccccatcaacaagtgggcgaaggatatgaacagacacttctcaaaagaagacatttatgcagccaacagacacatgaaaaaatgctcatcatcactggccatcagagaaatgcaaatagaaaccacaatcagataccatctcacaccagttagaatggcaatcattaaaaagtcaggaaacaacagaattgaacatggggaaatgatgagggtagcaggtcattttgaaatggaccttcgggtagtatttggggtggaaaaatcccctttctccaaccacattttggctaccccagcaacaccacccccacagaggtatcagcgctttgtgatgtccaagccaccccaggactaccattggataggggtgccccattctggccaaacaaagctgaagggtggggctcctcattacccaggg

SEQ ID NO: 17993 - DNA, 5053 bp, Homo sapiens
  SIMILAR (231)..(1433): 911254mologous to Homo sapiens putative p150,accession number U93570,Smith-Waterman Score=1925.
aaataccaactaccatcagagaatactgtaaagacctctatgcaaataaagtagaaaatctagaagaaatggataaattcctcgacacatacaccctcccaagactaaaccaggaagcagttgaatctctgaatagaccaataacaggctctgaaattgaggcaataattaatagcctacaaccaaaaaaagttcaggaccagatgaattcaaagccgaattctaccagagtgttggaagttctggccagggcaatcaggcaggagaaagaaataaagtgtattcgattaggaaaagaggaagtcaaattgtctctgtttgcagatgacatgattgtatatttagaaaaccccattgtctcagcccaaaatctccttaagctgataagcaacttcagtaaagtctcaggatacaaaatcaatgtgcaaaaatcacaagcattcttatacaccaataccagacaaacagagagccaaatcatgagtgaactcccattcacaattgcttcaaagagaataaaatacctaggaatccaacttacaagggatgtggaagacctcttcaaggagaactacaaaccactgctcaatgaaataaaagaggacccaaacaaatggaagaacattccatgctcatggataggaagaatcagtatcctgaaaatggccatactgcccaaggtaattgatagattcaatgccatccccatcaagctaccaatgactttcttcacagaattggaaaaaactactttaaagttcatatggaaccaaaagagagcccacattgccaagacaatcctaagccaaaagaacaaagctggaggcatcatgctacctgacttcaaacaatactacaaggctacagtaaccaaaacagcatggtactggtaccaaaacagagatagagaccaatggaacagaacagagccctcagaaataataccacacatatacaaccatctggtctttgacaaacctgacaaaaacaagcaatggggaaaggattccctatttaataaatggtgctgggaaaactggctagccatgtgtagaaagctgaaactggattccttccttacaccttatacaaaaattaattcaagatggattaaagacttaaatgttagacctaaaaccataaaaaccctagaagaaaacctaggcaataccattcaggacataggcatgggcaaggacttcatgtctaaaacaccaaaagcaatggcaacaaaagccaaaattgacaaatgggatctaattaaactaaagagcttctgcacagcaaaagaaactaccatcagagtgaacaggcaacctacagaatgggagacaatttttgcaatctactcatctgacaaagggctaatatccagaatccacaaagaactcaagataatttacaagagaaaaacaaacaaccccatcaaaaagcaaacaggatctggaatggacatccagcaaactgcagcagacctgcagcagaggagcctgaccgtcaggaggaaaactaacaaacagaaaggaatagcatccacatcaacaaaaaggacgtccacaccaaaaccccatccaaaggtcatcaacatcaaagaccaaagaaagcaggaaagatctaaaattgacaccctaacatcacaattaaaagaactagagaagcaagagcaaacacattcaaaagctagcagaaggcaagaaataactaagatcacagcagaactgatggagacagagacacaaaaaacccttccaaaaatcaatgaatccaagaactggttttttgaaaagatcaacaaaattgatagacctgcagcaagactaataaagaagaaaagagagaagaatcaaatagacgcaataaaaaatgataaaggggatatcaccaccaatcccacagaaatacaaactaccatcagagaatactataaacagctctacgcaaacaaactagaaaatctagaagaaatggataaattcctgaacgcatacatcctcccaagactaaaccaggaagaagttgaatctctgaataggccaataacaggctctgaagttgaggcaataattaatagcctaccaaccaaaaaaagttcaggaccagacggattcacagccgaattctaccagaggtacaaggaggaactgagaataaaatacctaggaatccaacttacaagggatgtgaaggacctcttcaaggagaactacaaaccactgctcaaggaaataaaagaggacacaaacaaatggaaaaacattccatgctcatggataggaagaatcaacatcatgaaaatggccatactgctcaaggtaatttatagattcaatgccatccccatcaagctaccaatgactttcttcacagaattggaaaaaactactttaaagttcatatggaaccaaaaaagagcccgcattgccaagtcaatcctaagcaaaaagaacaaagctggagtaatcacactacctgacttcaaactatactacaaggctacagtaaccaaaacagcatggcactggtaccaaaaacagatatatagaccaatggaacagaacagaggcctcagaaataacaccacacatctacaaccatctgatctttgacaaacctgacaaaaacaagcaatggggaaaggattccctatttaataaatggtgctgggaaaactggctagccatatgtagaaacctgaaactggatcccttccttacaccttatacaaaaattaattcaagatggattaaagacttaaatgttagacctaaaaccataaaatccctagaagaagacctaggcaataccattcaggacataggcatgggcaaggacttcatgtctaaaacaccaaaagcaatggcaacaaaagccaaaattgacaaatgggatctaattaaactaaagagcttctgcacagcaaaagaaactaccatcagagaatttgagcagtttaacaggaggctaaatgaagtttctaagagagttcgcatacccttgcctgtgtctaatatactttgggaacattgtatacgattggctaatcgaactattgtagaaggatatgccaatgtcaagaaatgcagtaatgagggtcgtgccctgatgcaattggattttcaacagtttttaatgaaacttgaaaaactaacagatattagacccattcctgataaagaatttgtagaaacttatattaaagcttattacctaactgagaatgacatggaacggtggatcaaagagcacaggttgaggggaagaagagagtctgtagagaagagagacccagaacttcatctgtgtgttctgctgtgcatccttgacagcacctggcacagaatctcagctaagatggatgaaatgcaagtactcaggccctttgaactagaatttttgcctaaactgaaagagttgaaatacctgagactgggcgatttacaaacgaaagaggcttataatggacttaccattccacgtggctggggaagcttcacaatcatggtggaaggcaaggaggagcaggtcatgtcttacatggatggcagcaggcaaaaagagaatgaggaagacactgcagatgacatgattatatatctagaaaaccccattgtctcagcccaaaatctccttaagctgataagcaatttcagcaaagtctcaggatacaaaatcaatgtacaaaaatcacaagcattcttatacaccaataacagtcaaacagagagccaaatcatgagtgaactcccattcacaattgcttcaaagagaataaaatacctaggaatccaacttacaagggacgtgaaggacctcttcaaggagaactacaaaccactgctcaatgaaataaaagaggatacaaacaaatggaagaacattccatgctcatgggtaggaagaaatcaatatcatgaaaatggccatactgcccaaggtaatttatagattcaatgccatccccatcaagctaccaatgactttcttcacagaattggaaaaaactactttaaagttcatatggaaccaaaaaagagcccacattgccaagtcaatcctaagccaaaagagcaaagctggaggcatcacgctacctgacttcaaactatactacagggctacagtaaccaaaacagcatggtactggtaccaaaacagagatatagaccaatggtacagagcagaggcctcagaaataatgccacatatctacaactacctgatctttgacaaacctgagaaaaacaagcaatggggaaaggattccctatttaataaatggtgctgggaaaactgcctagccatatgtggaaagctgaaactggatcccttccttacaccttatactaaaattaattcaagatggattaaagatttaaatgttagacctaaagccataaaaatcctagaagaaaacctaggcaataccattcaggacacaggcatgggcaaggacttcatgtctaaaacaccaaaagcaatggcaacaaaagccaaaattgacaaatgggatctaattaaactaaagagcttctgcacagcaaaagaaactaccatcagagtgaacaggcaacctacaaaatgggagaaaatttttgcaacctactcatctgacaaagggctaatatccagaatctacaatgaactcaaacaaatttacaagaaaaaaacaaacaactccatcaacaagcgggcgaaggatatgaacagacacttctcaaaagaagacatttatgcagccaaaagacacatgaaaaaatgctcatcatcactggccatcagagaaatgcaaatcaaaaccacaatgagataccatctcacaccaccagaggtggaagtggttctggaaactttgatcatggtcatggaggtggtggtcgtggaggaagcttcagttgtcatggtggctttggtggcagtcatggtggtggtggttatggtggcggtggggatggctataatggatttggtaatgatggaagcaattttggaggtggtggaagctacaatgattttggcagttacaacaatcagtcttcaaattatggacccatga

SEQ ID NO: 17994 - DNA, 8062 bp, Homo sapiens
  SIMILAR (6013)..(4190): 791254mologous to Homo sapiens putative p150,accession number U93572,Smith-Waterman Score=2278.
tcatcttgaattaatttttgtataaggtgtaaggaagggatccagtttcagctttctgcatatgactagccagttttcccagcagctttttaaaaatagggaatcctttccccatttcttgtttttgtcagatttgtcaaagatcaggtggtagtagatgtgtgatatgatttctgagggctctgttctgttccattggtctatatctctgttttggtaccagtaccatgctgttttggttactgtagccttgtagtatagtttgaagtcaggtagcatgatgcctccagctttgttcttgtggcttaggattgtcttggcaatgcaggcttttttttggttccatgtgaactttaaagtagttttttccaattctgtggagaaagtcattggtagcttgatggggatggcattgaatctataaattaccttgggcagtatgaccattttcatgatattgattcttcctatccatgagcatggaatgttcctccatttgtttgtatcctcttttatttcgttgagcagtggtttgtaattctccttgaagaagtccttcacatcccttgtaagttggattcctaagtattttattctctgtgaagaaattgtgattgagagttcacttatgatttggctctctgtttgtctgttgttgctgtataaaaatgcctgtgatttttgcacattgattttgtatcctgagactttgctgaagttgcttatcagcttaaagagactttgggctgggatgatggggttttctaaatatacaatcatgtcatctgcaaacagggacaatttgactccctcttttcctaattgaatacgctttatttctttctcctgcctgattgccctggctagaacatccaacacgatggtgttttggtgtggatgtcctttctgtttgttgattttccttctaacagtgaagaccgtcagctgcaggtctgttggagtttgctggaggtccactccagaccctgtttgcctgttgtgtcctgactttttaatgatctccattctaactggtgtgagatggtatctcattgtggttttgatttgcatttctctgatgaccagtgatgatgagcatgttttcatatgtcgattggctgcataaatgccttcttttgagaagtgtctgtacatatcctttgcccactttttgatgttgttgttgttgttgttgttttttttgtaaatttgtttaagttctttgtagattctggatattagccctttgtcagatgggtagattgcaaaaattttctcccattctgtaggttgcctgctcactctgatggtagtttcttttgctgtgcagaagctctttaatttaattacatcccatttgtcaactttggcttttgttgccattgcttttggtgttttagtcatgaagtccttgcccatgcctatgtcctgaatggtattgcctaggttttcttctagggtttttatggttttaggtctaacatttaagtctttaatccatcttgaatgaatttttgtataaggtgtaaggaagggatccagtttcagctttctacatatggctagccagttttcccagcaccatttattaaatagggaatcgtttccccatttcttgtttttgtcaggtttgtaaaagatcagatggttgtagatgtgtgatgttacttctgaggcctctgttctgttccattggtctatatctctgttttggtaccagtaccatgctgttttggttactgtagccttgtagtatagtttgaagtcaggtagcgtgatgcctccagctatgttctttttgcttaagattgttttggcaatgcaggctcttttttggttccatatgaactttaaagtagttttttccaattctgtgaagaaagtcattggtagcttgatggggatgtcattgaatctataaattaccttgggcagtatggccattttcatgatattgattcttcctatccttgagcatggaatgttcttccatttgtttgtgtcctctcttatttccttgagcagtggtttgtagttctccttgaagaggtccttcacatcccttgtaagttggattcctaggtattttattctctttgtagcaattgtgaatgggaattcactcatgatttggctctctgtttgtctgttattggtgtataggaatgcttgtgatttttgcacattgattttgtatcctgagactttgctgaagttgcttatcagcttaagattttgggctgagacgatggagttttctagatacacaatcatgtcatctgcaaacagggacaatttgacttcctcttttcctaattgaatgccctttatttctttcttttgcctgattgctctggccagaacttccaacaccattaactcatcatttacattagttatatctcctaatgctatccctcccccctccccccaccccacaacaggccccagtgtgtaatgttccccaccctgtgtccaagtgttcttattgttcaattcccacctatgagtgagaacatgcatgtttggttttttgtccttgcaatagtttgctgagaatgatggtttccagcttcatccatgtccctacaagtatatgaactcatccttttttatggctgcatagtattccatggtgtatatgtgccacattttcttaatctagcctattgttgttggatatttaggttggttccaagtctttgctattgtgaatagtgccgcaataaacatacgtgtgcatgtgtctttatagcagcatgatttataatcctttgggtatatacccagtaatgggatggctgggtcaaatggtatttctagttctagattcctgaggaatcaccacactgacttccacaatggttgaactagtttacagtccaaccaacagtgtaaaagtgttcctatttctccacatcctctccagcacctgttgtttcctgactttttaatgattgccattctaactggtgtgagatggtatctccttgtggttttgatttgcatttctctggtgaccagtgatgatgagcattttttcacatgtctgttggctgcaataaatgtcttcttttgagaagttgtctgttcatatcctttgcccaatttttgatggggttgtttgatttttttcttgtaaatttgtttgagttctttgtagattctggatattagccctttgtcagatggatagattgcaaaaaatttcctcccattttgtaggttgcctgttcactctgatggtagtttctcttttgctgtgttttcagtcttcagataccccagcaaagaacagaagctctttagtttaattagatcccatttgtcaattttggcttttgttgccattgcttttggtgttttagacatgaagtccttgcccatgcctatgtcctgaaaggtattgcctaggttttcttctagtagggttttttatggttttaggtcctaacatttaagtctttaatccatcttgaattaatttttgtataaggtgtaaggaagggatccagtttcagctttctcctacatatggctagccagttttcccagcaccatttattaaatagggaatcctttacccatttcttgtttttgtcaggtttgtcaaagatcttgtttttgtcaggttttgtttggttgtagatatatgtggcattatttctgagggctctgttctgttccattgatctatatctcctgttttggtaccaggaccatgctgttttggttactgtagccttgtagtagagtttgaagtcaggtagcatgatgcctccagctttgttcttttggcttaggattgtcttggcagtgcgggctcttttttggttccatatgaactttaaagtagtttttttccaattctgtgaagaaagtcattggtagcttgatggggatggcattgaatctgtaaattaccttgggcaagtatggccattttcaatgataatgattcttcctatccatgagcatggaatgttcttccatttgtttgtatcctcttttatttcattgagcagtggtttgtagttctccttgaactccttgaggaggtccttcacgtcccttgtaaggtggattcctaggtatttaattctcttggaagcaattgtgaaatgggagttcactcatgagttggctctctctttgtctttgcctgttattggtgtataggaatgcttggtgatttttgcacattgattttgcatcctgagactttgctgaagttgcttatcagcttaaggagattttgggctgagaccatggggttttctagatatacaatcatgtcatctgcaaacagggacaatttgacttcctcttttcctaattgaataccctttatttctttctcctgcctgattgccctggccagaacttccaacactatgttgaataggagtggtgagagagggcatccctgtcttgtgccagttttcaaagggaatgcttccagtttttgcccattcagtatgctattggctgtgggtttgtcataaatagctcttattattttgagatatgtcccatcaatacctaatttattgagagtttttagcatgaagggctgttgaattttgttgaaggccttttctgcatctattgagataatcatgtggtttttgtcattggttctgtttatatgctggattacatttattgatttgcatctattgaaccagccttgcatcccagggatgaagcccacttgatcgtggtggataagctttttgatgtgctgctggattcggtttgccagtattttattgaggattttcgcatcaatgttcatcagggatattggtctaaaattctcttttttggttgtgtctcttccaggctttggtatcaggatgatgttggcctcataaaatgagttagggaggattccctctttttctattgtttggaatagtttcagaaggaatggtaccagctcctctttgtacctctggtagaatttggctgtgaatctatctggtcctggactcttttttgttggtaagctattgattattgccacaatttcagatcctgttattggtctattcagagattcaacttcatcctggtttagtcttgggagggtgtatgtgtcgaggaatttatccatttcttctagattttctagtttatttgcatagaggtgtttgtagtattctctgatggtagtttgtatttctgtgggatcggtggtgatatcccctttatcattttttattgcgtctatttgattcttctctctttttttctttattagtcttgctagcagtctatcaattttgttgatcctttcaaaaaaccagctcctggattcattaattttttgaagggttttttgtgtctctatttccttcagttctgctctgattttagttattttttgccttctgctagcttttgaatgtgtttgctcttgcttttctagttcttttagttgtgatgttagggtgtcaattttggatctttcctgctttctcttgtgggcatttagtgctataaatttccctctacacacttccttgaatgtgtcccagagattctggtatgttgtgtctttgttctcgttggcttcaaagaacccactgtttagttcacacttgtaagtgtgaatgtgtggtattttatttcctatttctgttatttctcttagaataatggcctccagctcagtccatgttgctgtgaaggacatgatttcattcttttttatggctgcatagtattctatggtgtatgtgtcccctgttttctttatccagtcaactgttggtgggcttaggttgattccatgattttgctgttgtgaatagtgtttttgatgggattttttgatttttttcttgtaaatttgtttaagttctttgtagattctggatattagccctttgtcagatgggtagattgcaaaatttttctcccattttgtaggttgcctgttcactctgatggtagtttcttttgctgtgcagaagctctttagtttaattagatcccatttgtcaattttggcttttgttgccattgcttttggtgttttagtcatgaagtccttgcccatgcctatgtcctgaatggtattgcctaggttttcttctagggtttttatggttttaggtctaacatttaagtctttaatccatcttgaattaatttttgtataagatgtaaggaagggatccagtttcagctttctacatatggctagccagttttcccagcaccatttattaaatagggaatcctttccccatttcttgtttttgtcaggtttgtcaaagatcagatggttgtagatgggtggtgttatttctgaggcctctgttctgttccattgatctatatctctgttttggtaccagtaccatgctgttttggttaccgtagccttgtagtatagtttgaagtcaggtagcgtgatgcctccaactttgttctttttgcttaggattgtcttggcaatgcgggctcctttttggttccatatgaactttaaagtagttttttccaattctgtgaaggaagtcattggtagcttgatggggatggcattgaatctataaattaccttgggcagtatggccattttcacaatattgattcttcctatccatgagcatggaatgttcttccatttgtttgtgtcctcttttatttcattgagcagtggtttgtagttctccttgaagaggtccttcacattccttgtaagttggattcctgggtattttattctctttgaagcaattgtgaatgggagttcactcatgatttggctctctgtttgtctattattggtgtataggaatgcttgtgatttttgcacatcgattttgtatattttgtatcctgagactttgctgaagttgcttaacagcttaaggagattttgggctgagatgatggggttttctaaatatacaatcatgtcatctgcaaacagggacaatttgacttcctcttttcctaattgaataccctttatttctttctcctgcctgattgccctggccagaacttccagcactatgctctggtagaatttggctgtgaatccgtctggtcctgaactttttttggttggtaagctattaattattgcctcaatttcagaccctgttattggtctattcagggactcaaattcttcctggtttagtcttgggagggtgtatgtgtccaggtatttatccatttcttctagattttcttctgctagcttttgaatgtgtctgctcttgcttctcagttcttttaattgtgatgttagggtgtcaattttagatctttcctgctttctcttgtgggcatttagtgctataaatttctctctacacactgctttacatgtgtcccagagattctggtatgttgtgtctttgttctcactggtttcaaagcacatctttatttctgccttcgttttgttatgtatccagtagtcattcaggagcaggttgttcagtttccatgtagttgagctgttctgagtgagtttcttaatcctgagttctagtttgattgcactgtggtctgagagacagtctgttataatttctgttcttttatattttctgaggagtgctttccttccaactatgtggtcaattttggaataagtgcgatgtggtgctgagatgaatgtatattctgttgatttggggtggagaattctgtagatgtttattaggtctgcttggtgcagagctgaattcaattcctggatatccttgttaactttctgtctcgctgatctgtctaatgttgacagtggggtgttaaagtctcccattattgttgtgtgggggtctaagtctctttgtaggtctctaaggacttgcttcatgaatctgggtgctcctgtattgggtgcatatatatttagcacagttaactcttcttgttgaattgatcccttcaccattatgtaatggccttctttgtctcttttgatctttgttggtttaaagtctgttttatcagagactaggattacaacccctgctttttttgtttgtttttttattttccatttgcttggtagatcctcctccat

SEQ ID NO: 17995 - DNA, 356 bp, Homo sapiens
  SIMILAR (33)..(155): 461254mologous to Homo sapiens MLL protein,accession number AF272377,Smith-Waterman Score=61.
aaaagcctaactgttgccaaaataataaaaaagttggagttccctttgaagctaaaacctaaagtggccaaaggaggaaagaggttccatcccctacccttcctgcacccccatttattttgaagaaaaaagagtggcctgaccctcccagatctttcttttctggaggacactgggcgaaaagtagttgccccagtgactgttcgagccagttgatggcttgctaagtaagaatgctaaacaccaaaaggacaactcttgtttgatcccactcatatgaagggaaattcagaaagaaagtgaaatagtggttaccagggtctggggtgagggtggaatttggagctctttttcag

SEQ ID NO: 17996 - DNA, 618 bp, Homo sapiens
  SIMILAR (83)..(487): 961254mologous to Homo sapiens RanBP2 (Ran-binding protein 2),accession number D42063,Smith-Waterman Score=679.
aggcgctttcctcttggaagtggcgactgctgcgggcctgagcgctggtctcacgcgcctcgggagccaggttggcggcgcgatgaggcgcagcaaggctgacgtggagcggtacatcgcctcggtgcagggctccaccccgtcgactctacagaagtcaatgaaaggattctattttgcaaagctgtattatgaagctaaagaatatgatcttgctaaaaaatacatatgtacttacattaatgtgcaagagagggatcccaaagctcacagatttctgggtcttctttatgaattggaagaaaacacagagaaagccgttgaatgttacaggcgttcagtggaattaaacccaacacaaaaagatcttgtgttgaagattgcaaaattgctttgtaaaaatgatgttactgatggaagagcaaaatactgggtcgaaagagcagcaaaacttttcccaggaagtcctgcaatttataaactaaagaacatgggtgggtcagaggccaaatggttcctaagccagatgatgagggggtgcaggtcaggggacgttcaggaaggccagatgcagggtggaggctcaacagaaggtcttctgttggaggaagtgcctgg

SEQ ID NO: 17997 - DNA, 1094 bp, Homo sapiens
  SIMILAR (175)..(441): 931254mologous to Homo sapiens RanBP2 (Ran-binding protein 2),accession number D42063,Smith-Waterman Score=447.
atggctttccatgtggaaggactgatagctatcatcgtgttctaccttctaattttgctggttggaatatgggctgcctggagaaccaaaaacagtggcagcgcagaagagcggcgaagccatcatagttggtggccgagatattggtttattggttggtggatttaccatgacagatacatatgtacttacattaatgtgcgagagatggatcccagagctcacagatttctgggtcttctttatgaattggaagaaaacacagagaaagccgttgaatgttacaggcgttcagtggaattaaacccaacacaaaaagatctggtgttgaagattgcagaattgctttgtaaaaatgatgttactgatggaagagcaaaatactgggtggaaagagcagcaaaacttttcccaggaagtcctgcaatttataaactaaagactcctagttcttcagttttggaacttggactggctctcgttgctcctcagtctgcagatggcctagtgatcgtctgtgtaaagtttcaagagagtaatgataaaacccagctcatctttgattcagtgaccaacataccagcaaaggatgcagcaccagtggagaaaatagacaccatgctggtcttggaaggcagtggaaacctggtgtatacacaggagtggttcggctttctggattcctgcctgaatagaactgagagcggtcgctcaaggtgcgctcgaacagtcactggggcaactactttttgcccagtgtcctccagaaaagaaagatctggagggtcagaccactctttttcttcaaataatgaggggatgcagaagcatgtaagtacagaagctttggagtgcccagaaagagcagagaaagccagccaagagagtgccaggtttaagttgacagaagaggtcaacaaaatcgtgaagacttaccaaatgcacatcttagagttctgggtttccaatgtgtatctcctctatgaaattctttaaaaatatctgttcttggtatcccttaggttagtctcttttagaacttctaaatcaatggacccttaacttataggagccacctggacgttagcaacatc

SEQ ID NO: 17998 - DNA, 516 bp, Homo sapiens
  SIMILAR (127)..(228): 911254mologous to Homo sapiens B cell linker protein BLNK- s,accession number AF068181,Smith-Waterman Score=166.
atgggggagctaataacctatccgggatgttgtggaagaaaaggaaagaaaagccatatatggcaagagaagagccataaagaaaacctgcagggtgtggtaggtgagtgggtgtcagctgaggtgaagagggaaaggctaaaagtcaaagcacctccaagtgttcctcgaagggactacgcttcagagagccctgctgacgaagaggagcagtggtccgatgactttaaaaagaaaagaaaaatgaggggaaggggtgacttttctgcccatctcttggtcatgggagctctcctggggcccagcagccgcagctccctgagatgcactgcagctgcgcccctgctggctgcgcacgcgcggcccacgacactacccaccaccaccacaccagccagaagcaaatgcggccatcgaggaaaaaccgcaccccgcgaacgccagcacaaccaaaaccgagaattccaaacagaaggtgtgaagagaggagagtgtgatggtcgtgagaggatgtag

SEQ ID NO: 17999 - DNA, 521 bp, Homo sapiens
  SIMILAR (104)..(508): 971254mologous to Homo sapiens B cell linker protein BLNK,accession number AF068180,Smith-Waterman Score=703.
tttcgtgagaccagaggcttaccatgctgctccctaggagggctttgttttgctgacgtgaccactggacagttattcgtgtctcttacaattaccaaacagaatggacaagcttaataaaataaccgtccccgccagtcagaagttgaggcagcttcaaaagatggtccatgatattaaaaacaatgaaggtggaataatgaataaaatcaaaaagctaaaagtcaaagcacctccaagtgttcctcgaagggactacgcttcagagagccccgctgacgaagaggagcagtggtccgatgactttgacagcgactatgaaaatccagatgagcactcggactcagagatgtacgtgatgcccgccgaggagaacgctgatgacagctacgagccgcctccagtagagcaggaaaccaggccggttcacccagccctgcccttcgccagaggcgagtatatagacaatcgatcaagccagaggcattccccaccaaaaacccatacctctgccaagattt

SEQ ID NO: 18000 - DNA, 378 bp, Homo sapiens
  SIMILAR (190)..(279): 831254mologous to Rattus norvegicus metastasis suppressor homolog,accession number AF049882,Smith-Waterman Score=120.
atggtagaccgttatcctgtaaccacggacactgagtttttccagggccttggaatctacccaaattcacccctggagtcaacttccaaagcctccccagaaatacacttcttcaagagactttggaccatttccccagagccctctctggctttatctatcatcttcccaagagaagcagaacctcagatcctgggcgcagtgatcctgggcttcggggtgtggatcctggccgacaagagcagtttcatctctgtcctgcgtaaggacccctcagcttccccagacccaggcccactgaagaggggagggccagggcgcagatacagctgctcccataagtgcttcggcttcaatgcctgttgcttttcccgctga

SEQ ID NO: 18001 - DNA, 480 bp, Homo sapiens
  SIMILAR (480)..(418): 661254mologous to Homo sapiens Human secreted protein,accession number W73468,Smith-Waterman Score=85.
ttttttttttttttaatgtaaaaccatttgtttaattctaaatcaaatcactttcacaacagtgaaaattagtgactggttaaggtgtgccactgtacatatcatcattttctgactggggtggtgagcttgccgagggatggtgggaagggggctccctgttggggccgagccaggagtcccaagtcagctctcctgccttacttagctcctggcagagggtgagtggggacctacgaggttcaaaatcaaatggcacgtcaccagtccagagccctgccacggatgtaggcaggagcccagcattaggcaatcaggagccagaacatgatcaccagggccacaaataggaagaggcgtgacaggaactgctcgtccacatactggggtgtccagggacagctggaggaggccgccatcatttatattaaatgctgtggcaaatatcccaaagggaaatgccccaattccaaaagaaaa

SEQ ID NO: 18002 - DNA, 1131 bp, Homo sapiens
  SIMILAR (715)..(1077): 841254mologous to Homo sapiens small nuclear ribonucleoprotein,accession number J04615,Smith-Waterman Score=517.
tttttaatgtaaaaccatttgtttaattctaaatcaaatcactttcacaacagtgaaaattagtgactggttaaggtgtgccactgtacatatcatcattttctgactggggtcaggacctggtcctagtccacaagggtggcaggaggagggtggaggctaagaacacagaaaacacacaaaagacatctggaagccaccatctccaaatccaaatccttgaaatccccctctattctccggctctggcctctgtccttgaggacgaggaggggtcttctctctggggtcctgttgcccagtgctgccccttccatagagggggatggcatttttcggggctgatgccagctttgcaaacaggacacacctgtctgttaggtctggtctccaaccactgatgtaaacacggccaacagaagaggtggccacacaggctgatgacggcatccttggctgtgtccaagcagatgttgcactcgaaagtgctgtcctgccctccgctctcgccagcgccattgctgctcccactgggcccccctgcactggagttctcaggagatgcagaggccgagggccccttgcttgccatccttggctgtcagcgaagctctgagtgaagactttccccagggaaatcctgcctccgacacagttaacgccagcccagtcaatcagtttttcgggtacacggccaatactaacgccgcgtcaatctgttgggaaggcacaatcttctttggcatctttaaggcgtttgacaagcatgtgaatttgatcctctgcgattgtgatgagttcagaaagatcaagccaaagaacgtgaagcaaccagagctcgaagaaaagcacttttggggtctggtgttgctgcatggggagaacttggtatccatgactgtggaggggctacccccaaaatatactggcattgctcgggtaccacttgctggagctgcaggaggccctggagttgttagggcagctggtagaggagtatcagctggtgtaccaattccccaggctcctggtggattagcaggccccgtcccaggagttgggggaccatcccagcaggattgtgaaggaagtcttactacagatgagaggctagaggaccagagaagttaa

SEQ ID NO: 18003 - DNA, 1217 bp, Homo sapiens
  SIMILAR (146)..(358): 451254mologous to Homo sapiens protein G16,accession number AJ243936,Smith-Waterman Score=144.
  misc_feature (1)...(1217): n = a,t,c or g
gagaaggttctacaaatgagctgatggctttaaaagtttccttcttagccttacaatttttctccttgattataaaagtaaaggaaaactgggaaaatacagaaaggaaaagagggggaaaaaaatcacttataaccacaccaatccagagggatttcaaggatttggatttggagatggtggcttccagatgtcttttggaattggggcatttccctttgggatatttgccacagcatttaatataaatgatgggcggcctcctccagctgtccctgggacaccccagtatgtggacgagcagttcctgtcacgcctcttcctatttgtggccctggtgatcatgttctggctcctgattgcctaatgctgggctcctgcctacatccgtggcagggctctggactggtgacgtgccaccccaactcctggtgtttggcttcctggctaatcttgactcctggaatcagtgggatcagtaacacatcaaggagtcttgtttcttcatcagagctttggaactcgagaccagttggcgatgacccctgaatatcgccaccgctgtaaacactctataacttcaggcctttgnaatttgaagtcatctctcatggggtgacaccatgaaatcttgtttcagccagttctgcaggtcctgactctgcagaggggaagaggcattattgagagaaactgtcagagtataatttcacctgaagtttaatattacagaaacaaagggatgcacccaaatggtatttctggaaattttcatgtctttaaataccccttggtaagttgcttctgaagccagtgggggctcctcagatagagaggttcccctttcaaatcccagtgccgctctgttctctttccttcccctcccactccccctcttcttcctctgccaggagctaagtaaggcaggagagctgacttgggactcctggctcggccccaacagggagcccccttcccaccatcnttcggcaagctcaccacctcatccttctgccaaggcagctttcctttcttttgtgtgttttctgtgttcttagcctccaccctcctcctgccacccttgtggactaggaccaggtcctgaccccagtcagaaaatgatgatatgtacagtggcacaccttaaccagtcactaattttcactgttgtgaaagtccatttgctttagaattaaccaaatggttaaacattaaaa

SEQ ID NO: 18004 - DNA, 2091 bp, Homo sapiens
  SIMILAR (49)..(1872): 991254mologous to Homo sapiens MYB-binding protein 1A,accession number AF147709,Smith-Waterman Score=3081.
tttcgtgccggagcacacgtgtttcgtgtttcggtgagtgtggcggagatggagagccgggatgcggcccagccgatgtcgcctggagaagcgacgcagagtggcgcccggcctgccgaccgctatggcctattgaagcacagtcgcgagttcttggacttcttctgggacattgcgaagcctgagcaggagacgcgacttgcggccacggagaagctgctggagtatctgcgtggcaggccgaaggggtccgagatgaaatatgccctgaagcgtctaatcacgggactcggggtcgggcgagaaacagcccggccctgctacagtttggccctggcacagctgttacagtcttttgaagacctccccttgtgcagcatcctgcagcagatacaagaaaaatatgacctgcatcaggtgaagaaggcaatgctgagacctgctctctttgcaaacctgtttggagtgctcgccctctttcagtcaggtcggctggtgaaggaccaggaggcactgatgaagtcggtgaagctgctgcaggccctggcccagtaccaaaaccacttgcaggagcagccccggaaggccctggtggacatcctctccgaggtctcgaaggccacattgcaggagatcctgccggaggtcctcaaagccgacttgaatataatactcagctcccctgaacagctagagctcttcctcctggcccagcagaaggtgccctccaagctcaagaagctggtgggatccgtgaacctattctcagatgagaatgtccccaggctggtgaatgtgctgaagatggccgcctcctctgtgaagaaggaccgcaagctgcccgccattgctctggacctgctccgcctggcactcaaggaagacaagttcccacggttctggaaggaggtggtggaacaagggctgctgaagatgcagttctggccagccagctacctgtgtttccgcctgctgggcgcggccctgcccctgctgaccaaggagcagctgcacctggtgatgcagggagacgtgatccgccattacggggagcacgtgtgcactgctaagctcccaaagcagttcaagtttgccccagagatggacgattacgtgggcaccttcctagaggggtgccaggatgaccctgagcggcagctggccgtgctagtggccttctcatctgtcaccaaccaaggcctccctgtcacgcctactttctggcgggtcgtgcggttcctgagccctccggccctgcagggctatgtggcctggctgcgggccatgtttctccagccagacctggactccttggttgacttcagcaccaacaaccagaagaaagcccaggattcatcgctccacatgcctgagcgagctgtgttccggctgaggaaatggatcatctttcgattggtgagcattgtggacagcctgcacctggagatggaggaggccttgactgagcaggtggccaggttttgtttgttccactcgttctttgtcacaaagaagcccacatcccagatccctgagacaaagcacccgttctccttccctttggaaaaccaggcccgagaggctgtcagcagtgccttcttcagtctgttgcagaccctcagcacgcagttcaagcaggcaccgggccagacccagggtgggcagccctggacctaccacctggtgcagttcgcagacctcctgttgaatcacagccacaacgtgaccaccgtgacacccttcactgcgcagcagcgccaggcctgggaccggatgctgcagactctgaaggagctggaggcccactccgcagaggccagggctgctgccttccagcaccttctgctcctcgtgggcatccacctcctcaagataacgcagggccctgggcctgtgagcaccctgagagccttccttctgcctcctggcagcctggcacagtctggtgctggccacaagggaaatggaccagactggcagtcagctgagagctgtcctgagggcattcaatgccgcggcaccagcctggattcagaaaacagacctggctgtcagccctggtcctgccacttatgggctgtgtggccttag

SEQ ID NO: 18005 - DNA, 437 bp, Homo sapiens
  SIMILAR (68)..(217): 391254mologous to Homo sapiens Human secreted protein, SEQ ID NO: 4199,accession number G00118,Smith-Waterman Score=70.
tcaagcctgagaagtctgctgtctcttgattcctacgtactttagagaggtgactgggtttttcctccaaagccgtatctcaatgtgagtctgctggcagctactggaaatcgaaggtgttgagctgggtggtcgctgctccttctcctcctcctcttcctcctctggatgttggttaacagaactcccactccctggcgctgtggtgcttaggggcagcgtggctgcattcgctctgctccgtaaaggagggggattactccctttgtactgcctgatctggaacagcagttcttttgtgcaaccacctttaagtactggggagctaagtgcagctggcttccttgtcaaatcttcattctgacttgctaaaagatcacgactgaatgcaagctgactgacacaaaccacaaatctgtcagggaatacacagagtt

SEQ ID NO: 18006 - DNA, 1657 bp, Homo sapiens
ctagcgtagctccgctttctcaccaatgtctgccagtagacagctgggtttccacaaggtggggtcaaagggagggagaaatctagatcctacttctgtctgggacacccctggtattgggagggcatagatcagcctcctctggatgtggctcagtgccaggactttaattgtgaagggtggattttccccttccttcaggaagaaggaagcaggcaatggtgctctggttatcctttccaaatggcttacacctgtctgctccaaagtgagcaaaggtgcagcaaaaaaccagttgcctttaaaggaaaaaaaaagttctacaggcctttcgggctttgaaacttgggctgagcaatgctccaccatttccgtttcgactgtgggtctctttcttgcctctactgggaatgagaaacaggagttcagaggttcctggtcagtcaagcatgtgaaggaggaactgaaaaggccttgggagctgctgggcctagaaaaattcccagtcaatccatcacctgcctcctctggagcagggtctgtcagtctctccactgttcctctcccctggcagaggtcagcgctctgctcaccccgcacacactcagccttctggggtttgatcgccttagagccttcatgggtgccatggctgccatactgtagaacccggaagagagtgacccatacaccaaacccaagtgttttacgagtttgagggagtccgaggggatgcatgtgcacatctggccccaactggtgagtttccaaaacatgcaactcttccttagacgtggtttttgccaaatcttgtttcaaaagtaaccctggatctgacaactctgaagctggcaaaaccctgacagctttgcttttttccactattatttctctcgggactaatcgatcacttccaagagaaactctcccgtggtggtcgaagtcttccgcagagctgcagttcctgcgtttctgttgggttttggccactcgtggactttgttttggacatggtgatgctgactcacagctacagacggggctcctgcttagaagccctgtctttaaccgctccccaggatgaggtttttgctggccactagtgtcttctggctgggtctgattaactttttccagcttttgaacaggaagcccccagtggctctcagctgcctttatggaatcctttgcttgtcccatggattctgatgggggactggaggaagcctgaccatcattcctcctccttgctatctctgcaatcactgagtcactagatgtttccacagtgtctcttctggtctgcgatttgctcgtgacactgctttttgtttcagttcttttcacacaaatcttcattctgacttgctaaaagatcacgactgaatgcaagctgactgacacaaaccacaaatctgtcagggaatacacagagttcagcattctgtgtgctcctgatgcagcgaaggcgtatccctctcttgaggaaataggctgtgatttgaaagccataacctatgatggtggcggggtttgggctcgggctttatatgttttgttactgtccagggtcactggcggagtagtacctggctgtggaaactcggactacacaggtagccggaactgcagccaaccttcagcggacgcgtgggtc

SEQ ID NO: 18007 - DNA, 978 bp, Homo sapiens
  SIMILAR (643)..(972): 581254mologous to Homo sapiens putative p150,accession number U93563,Smith-Waterman Score=327.
atggttcactattcgattgacacagaaaaccccacaaagtcatgcaaatcaagagattcaaatcgtattcatttaagaacactcgtgaaactgcccaggccatcaaggatatgcatgtatgaaaagccactaagtgacctgaaagatgtcactttacagaaacagcatgtaccattccaacattacaatggtggagttggaagaaggagagaagagaatgaagagaggcagccaagtactcactttgacagagaaatgaatcctggaaagggcttccgctggaaggaaggagcacaaatagaactatttgcaaatttgccagagaaacccacatctgctgaccaactctgcattcttaactatgaacaggcaaataaggatcatcaggtgtgtgaaaaaagcaacagcatgaaaaatgccaaaataaacagaaacaatgaccgcagaagaaggaaagagagcagccaaactttggaccacctactgcctcataaggttgctgttgttgttgttgtttttaaatctccacaagtcttacaaagtgtggaaactggcctgtggacagtgacccctgacccttcttggatctatgaagaaaatgataaattgtcatttgatgaatgcacttggccctggcagttgaaccatgcaaatatatggaaattaaatagcctgctcctgaatgagcattgggccaaaaacaaaatcaagatggaaattagaaaattattcaaactgaatggcaataacgacaaaacctatcaaaacctctgggataaagcaaaggtggtgctaagaggaaagttcatagccctaagtacgtacatcaaaaagactgaaagtgcacaaactgacattctgaggtcacaccttaaggagctagagaaacaagaacaaaccaaacccaaacttaggagaagaaaggaaattaccaagatcagagcagaactaaatgaaactgaaaaatacaaaagataa

SEQ ID NO: 18008 - DNA, 753 bp, Homo sapiens
  SIMILAR (415)..(750): 491254mologous to Homo sapiens p40,accession number U93571,Smith-Waterman Score=263.
atgagggactgtgccatgaaggacggtgctatccggcccagatactatgcttttcccatggtcttcacaacctgcagaccagaagattccctcgggtgcctacaccaccagagccctggatttcaagcacaaagctgggagggcatctctgaaagaaaggcagcagccctactcaggggcttagagataaaactcccatctccctggaacagagcacctgggggaaggggcagctgtgggcccaccttcagcaaacttaaacgtttctgcctgctagcactgaagagagcagtggatctcctagcacagactgcctcctcaaaaagcaatagcatcaacatcaacaaaaaggacgcccacgcaaaaaccccatcagaaggtcatcaaaaaccaaaggtagataaatccacgaagatgaggaaaaaccagcacaaaaagtctgaaaattccaaaaaccagaacaactcttctcctccgaaggatcacaactactcgccggcaagggaacaaaactggatggagaatgagtttgacaaattgacagaagtaggtttcagaaggtgggtgataacaaactcctccccgctaaaggagcatgttctagcccaatgcaaggaagctaagaacctttataaatggttacaggaactgctaactagaataaccagtttagacaagaccataaatgacctgatggagctaaaaaacacagcacaagaactttgtgaagcatatacaagtatcaatagctga

SEQ ID NO: 18009 - DNA, 441 bp, Homo sapiens
atgggaaaagccttaaaatagtttataacttgtatagcttcacaatggtgatgaaagttatcaacgagctaagtgctcttacatagtttagtgaaaatactaaatacaatttttgttgaaaagcaaatgcagcaaatagcgaaattggacttctttacaaactcagtatcacaaaatttggaaatggatgtaaatgtgaaaatatgtctactttacttgaccattcattatatctaattagcttctaattttatacttataaaaatatagatgtaaagccactgtagccagactgcctctctagattcctcctctctgggcagagcatctctgaaagaaaggaagcagccccagtcaggggcttatagataaaactcccatctccctgggacagagcacctaggggaaggggcagctgtgggcgcagcttcagcagacttg

SEQ ID NO: 18010 - DNA, 465 bp, Homo sapiens
  SIMILAR (211)..(2): 781254mologous to Homo sapiens creatine transporter,accession number U41163,Smith-Waterman Score=269.
cgtacccgatcatacaggcaatgtcgtccgtgaagcggtcagctccatacacccagccaccaccacgcactcccaaaaggctgccagagcagggtggtccgctggctgagtagtagtcaaacagctggaagacatacatcccaccatcagtcaccatggagagatcaatgacaaagcggagggcacaacagagggccacagagatctccctgactctgccaccttggagatgtgcatgcctgctctgcagccatgaagcccaggatggagaagaccacgaagccagcaaagaagctggtcccattgtagcagttgttgttgaagcggttgtagctgcccagggctgaggggaccccagctttgaccagtcaggcttgagatagtaaatgatgctgtccagggcgccaggcagcagcactccaagcacaagcagcacgaccaggaccacgtaggggaatgtagcag

SEQ ID NO: 18011 - DNA, 1579 bp, Homo sapiens
  SIMILAR (875)..(1579): 991254mologous to Escherichia coli K12 putative integral membrane protein involved in biogenesis of fimbriae, protein transport, DNA uptake,accession number AE000119,Smith-Waterman Score=1184.
cggtcagggcaggcccaaagggagggcagggccaggtcagggtgacgcaggcccagggtagctcagggttaaggtagggctcgatcacccagggcaggtctatggctggggccggggcagggccagggccagggcagggccagagccagggcaggtccatggcagtggcagctccagggcagggccagggttaggacctcggacatgtccaagtccagtgccagggcaagggcaagggcaggggcagggccaggctcatataagatccagggacaaagccaggcccagagatgggccaggacaggaacctcaccttcaactgcttccttcctggagtcacctgcccaagccctgggtaccgagatgattgtacagaccccccaccccactcacatcagtcaccatggagagatcaatgacaaagcggagggcacaacagagggccacagagatctccctttggaaacagaagtagtaggaggctgggaggaggttgaggaggccgagccccatgcaaatctggttgtcgagaccaagcagcaacagcatgaagaagaacagggcagcccagagtggggccactggcatcagtgtgacagcctgtggacaagcaagccagcttttcaggtcttcgatgctcggtaccagcgccattggtattcccgcttatcaaaactacctgcgcaaagccgcactcaccgacatgctacaaacctttgtgccttaccgtaccgccgtagagttgtgcgcgctggaacatggtggattagatacctgcgacggtggcagcaatggcattccctcgcctaccaccacccgctatgtttcagccatgagtgtggcaaagggcgtggtgtcgctgaccgggcaagaaatcttgctggatgccagcgaagaggtggttcatgttgcggtagtcgatgcaccttcgcatgagctactggacgcattgcatttcgctaccaccaaacgtattgagatcacctgctggacgcgccaacaaatggaaggtcacgccagtcgcacacaacagacattgcccgtagctgttcaggagaagcatcagcccaaagcagagttgctaactcgaacgttacaatctgcgctggaacaacgcgcgtctgatattcatatcgaaccagcggacaatgcctaccgcatccgcttgcgtatcgacggcgtattgcatcctttaccggatgtttcaccggatgccggagtcgcattaaccgccagattaaaagtgctgggaaacctggatattgcggaacatcgcctgccgcaggacgggcaattcactgtcgaactggcaggaaacgccgtctcatttcgtattgcgaccttaccatgtcggggtggtgaaaaggtggtattaaggttgttacagcaggtgggtcaggcactggatgtcaacacgcttggaatgcagccgttacaactggcggactttgctcatgccttgcaacaaccacagggactggtgctggtaactggccctaccggcagcggcaaaacggtcacgctttatagtgccctgcaaaagctgaataccgctgacattaatatttgtagcgtcgaa

SEQ ID NO: 18012 - DNA, 3294 bp, Homo sapiens
  SIMILAR (3275)..(2073): 991254mologous to Homo sapiens creatine transporter, hCRT- BS2M,accession number S74039,Smith-Waterman Score=2148.
ggaaaatgacatgtttttattgctatgtctgcagtggctttttagcacagtagaatgtccccgcaggcccgccaccctcacccagccccagccctgcagcctctgtctgggtgtcggggaagcctttcttggggtcactcagccgtctcgggactggacgtgacagacaaacgtgggttaaagctgctacacagaagactggaggtgcgggaagtgcatccaccttaagcctggacgtgggagccgtgtccagggtcccttcctgggggtgtgcccgcacagggtgggaagcctgagcaggccaggttagcagcccagacacccaggacggaatattgcagcctcttgccccacagacttgtggcaaagggacagcgtggggacagcccgaggccccaccatgcacttttccaatccagtctggggctggggaccacacacgcacatccacacaacagactcacacacgcaacagctcgaagcttttgttttgcctatgaaagttagatctataaattcacactccttggctaggggcagaggggtaaggtagggctcacagggatgggagtggtaaggagaggatggtttgggctccttcctctttttagaaatatacaagcagaaatctcattctctcaagtttttataaaatgtgcaaaatacaagcctcctttgcccagaggcgccatttacatctggcattcacctttgctaagagatagagatctatatatactctccgtactcacgcacgcgtgcactcgcacccaagctcacacaattgatactggtggcgattggcgcaggaaccagaaggttccattgctggctggctctctaagcttctataacagggatggggagaggggtatagcccagctgaaatatttgccttggttctgctgcccctcccctgcctcccttctcctctctctcctccctcccgtctctccctccttcccttcctcacatttcccaagctgccactgctgcttctggggtgaggggtcaccacgggtgtgctgcagagcagagcctggagaggtgggcagggggtgggcgtggcaggggcaggaggagtgcagcactgtgggtgggggtggggcactagcggggcctaggaccagctcggctagggctggagggggagaggcatctatttttggtgggttgtgatatttttggcgttttattaaaaatggaaaaagttgttttagtgagcactcatggtgctttctcccctcctctcccaggcagaccccaaaagtgtcagggaaaggcaggccccctggaggggtggggtggggatgaagcaggggctgctatggctaccagaggtgagctggtgatgtgagctgagctgtcccatgacactctccaccacgacgaccttgctgctctcggacactggggtcagggtggtcaggcccctgacatctgcatcctgagctcggtactccaagtggtggaggccccagatgggctgggtcaggtgcttccagcactcagccatggtgcccttggccctgaggaggcagcccaggaggtgcagtggcatgcacagcatggaggacagcacgaaggcccagcccatggcctcaccccaccacgggtacacgtaggtgttgttgtagaccagcggctcgtagtacacaacgttgaagatgaagatgcccatgcagaccagcggggtgaagaaggaccagcaccattttatccaggggcaaggtcggtacccgatcatacaggcaatgtcgtccatgaagcggtcagctccgtacacccaggccaccaccacgcactcccaaaaggcctgccagagcagggtggtgccgctggccgagtagtagtcaaacagctggaagacgtacatcccgccatcagtcaccatggagagatcgatgacaaagcagagggcacaacagagggccacagagatctccctttggaaacggaagtagtaggaggccgggaggaggtccaggaggccggtgatgaaaccctccacacctacaaactggctgtcgagaccaagcagcaacagcatgaagaaaaacagggcagcccaaaatgggggccacaggcatcagtgtgacagcccgtgggtaggcaatgaaggctagaccaggccctgattctgccaccttggagatatgcacaccctgctctgtggccatgaagcccaggatggagaagaccacaaagccagcaaagaagctggtcccgctgttgatgagtgccaggatgatggcatccttgtagcagttgttgttgaagcgattgtagctgcccagggctgtgagggcccccaggccgatggcataagagaagaaaatctgggtccccgcatctatccacacctgaggggaccccagctttgaccagtcaggcttgagatagtaaatgatgccatccagggcgccaggcagcagcactccacgcaccagcagcacgaccaggaccacgtaggggaatgtagcagtgaagtacacgatctttcccgtggatttgacccccttccagacacagaagtagaccagcacccagcaggccagcagacacagggtcacctcccagttgagggctcctggaacctccagccctgtggagagcctcaagactttgttctcccagaactcgatgacaggggaccgccggtcagcaagctggtcacatgtgaggttggccaagctgtcattggcacagtcttcatgtcgaaagatctctacacagtcaggagtgttccaggtgtggccacacgtagcccatggcaaagtggtagtaaaggacttgaccaggtaatagaagccccaggccagcaccatgatgtagtaagtgttgcagtagaagacaatcaccatggaggcatagcccagacctttgaataggggacagatgttccagacattgatgctgccggccttcatgaactggcccagtgagatttccaggaagaaaatggggattcctccaaccagggcaatcaggacatagggaataaggaacacacctccgccgttcttgtagcacaggtaggggaagcgccacacgttaccgaggcccacggcgaagcccacgcacgacatgatgaagtccatctggcgtgtccaagtctctcgcggcggcacagcaaggcggctgctgggcgcccccaggcccgcagggccatcgcccttggacggggcaccatcgggcccggacacgatgagaggacccttcttctcgtctccagacacgctatagataccgttttcagcgctcttcttcgccatggccccggcgggccgcgag

SEQ ID NO: 18013 - DNA, 317 bp, Homo sapiens
  SIMILAR (253)..(315): 471254mologous to Homo sapiens Prion protein CJAS,accession number Y00765,Smith-Waterman Score=48.
tgaactctggggatcagtgaggaagaattcagacaagttcctgctgtcacggaacttacatcccagcaaggaggaatacagacaacaaattaaaacacctggggaggagtggagacagatactgtaaggagaataacaaggctctgtggtcagtagtgagaaggactggcaggtggggagagggctcctagagctgaacggcaggaaagatacagctctacccaagtctaggaagagccaaccagcaaagctcccacctcttggtgtgctggtggaaaaacaagcagaccatggtggctggggccttctgggtgggg

SEQ ID NO: 18014 - DNA, 1776 bp, Homo sapiens
  SIMILAR (982)..(1215): 511254mologous to Homo sapiens Human N-proteinase (70 kDa short form),accession number W47029,Smith-Waterman Score=177.
caacgtagcaccttggtctgttcccgtaaacatgtggaacgcgtctgtgccaattccagagcccctagtggaacacaacgtcagccagtgacgagctgtaactccacaaaggtccgtggcttcattcttgaagtcagcaagaccaagaactcactggaaggaaccaactctggacaaatcttggcaaccacgaaaggactattgccaagctgccaagcaattcagcctttggagggtaccagcagcagtcaggcggcgacctcttcagaacctgaggctcaggtccaggccctcaccttcacacttttagcttctgataacacccgattcctcctgtattcaccacgggctctcaaggacacgagccaggagcccaaggggtgtccggctgcatttgggagtgtggtggacagtgaacctcccggtagagggagactccctctttctttcactatggtcttgatgccctcactaaccatcgaccccttggatctacccattttccagactccagcccagggtgcacgactgacctgtgtcctagccaagagcagggctgagccggagctttcaggccttactagcccaaatgaagtcacaggctggaacctcaaggaggccatctggacacagaagacagccatggaatgtaaattctctcgagtgtgcgggatcgtacgagttgtattgctctaccggatatgtgggcggtgccaccgtatatcggctatcaataagacgaagaacgtgtggacggccgtgattcctacatcccgtggcggctttacaacactaagtctcggtggtgtcaacgcgtcccgtcaatataatggcggggatgttccatcatttatgttagtacgctgtgggttccaagccttccagcgaccggagtttggctgtgggctgctgcgcttgccattggctcagacaccagggccaccagaagctgcctgcagtgtgagcttagagcggtgccagcctcaaggaggcagggaaaggggcaccagtgatggggacagagcctttggcctgggagaccttcccaacctgctgggcctggtgggggaccagctgggcgacacagagcggaagcggcggcatgccaagccaggcagctacagcatcgaggtgctgctggtggtggacgactcggtggttcgcttccatggcaaggagcatgtgcagaactatgtcctcaccctcatgaatatcggaaggaagatgaacaacagcctgaccccctccctgctgctacctgacagccaccgccacgcacagcagctctacgccagcggctcccacaccagcgtccccctgtgcagcccaccaccctcctcgcacgccctacaaggcacatgtcacgcctccctcacgccacttcaccgcacctctggcgacgggcccccacccgctctcccgccctcccgacatgccctgcgcactcccaccacgcctcccgacctgcccccgccgctgcacaggccccccttagacaagttcctgctgtcacggaacttacatcccagcaaggaggaatacagacaacaaattaaaacacctggggaggagtggagacagatactagtacattggagaagctcaagtcctccagatgcattcaagccagaacacagagaagaagacatcgaagccgagggcagagagctgaggggccctaacacttgcacctgccttgctcaagagcagccccaagggttcaggggtgtttctgtctccaccaccttcacagcagtacctgattccctaccgtga

SEQ ID NO: 18015 - DNA, 453 bp, Homo sapiens
  SIMILAR (45)..(242): 981254mologous to Homo sapiens ribosomal protein L37a,accession number X66699,Smith-Waterman Score=355.
cggctcgagggacctaggtcgcggggacatggccaaactttctcaagaaagtcgggatcgtcggtaaatacgggacccgctatggggcctccctccggaaaatggtgaagaaaattgaaatcagccagcacgccaagtacacttgctctttctgtggcataaccaagatgaagagacgagctgtggggatctggcactgtggttcctgcatgaagacagtggctggcggtgcctggacgtacaagtgagtctagttccttgtggtatttggaagtgtgtggaccacataggcccaaattccaggttgctgctggatgggctagttttaacactttctcatgactgagagaataaggatgcctttgtattttcaggattcctccgtggtggtttattttcagttattgaaagagtaaacacaaaactaccaaaatagaagtcggaaatctaatt

SEQ ID NO: 18016 - DNA, 627 bp, Homo sapiens
  SIMILAR (409)..(272): 731254mologous to Gallus gallus ribosomal protein L37a,accession number D10731,Smith-Waterman Score=170.
tttttttttaacttggaagacttatattcttatgctgcattttaccatttgactactaaaaaagtcactgaattacaataatacatcttggcatgcttttccaatacatcagtatttacacaatgcaaacatcagaatgtctaataaagttaacaagccaaggcaattttgttacataaattaaccccatttattataggccagtgatgtctcaaagagtagaggagcgtctactggtctttcaactccttcagtcttctgatggcgggacttttaccgtgacagctgaagtggtattgtaggtccagacaatgtggttcctggatgaagacaccgttactgtcttcatgcaggaaccacagcaccagatccccacagctcgtctcttcatcttggttttgccacagaaaagagcaagtgctacttggcgtgctggctgatttcaactatttcttcatccattttccggacgcgagcgccccatagcgggtaacagatatttaccgacgatcccggattttcttgggtacgtttgggccatgtcgccgcgacctaggtccggtcgacgcggccggcaatttagtagtaatagtccacccgcgaatttcggacgggaactcgaagggg

SEQ ID NO: 18017 - DNA, 498 bp, Homo sapiens
  SIMILAR (31)..(300): 981254mologous to Homo sapiens Human secreted protein, SEQ ID NO: 6278,accession number G02197,Smith-Waterman Score=464.
cggacgcgtgggcggaagaaggagcaagctatggaggggaacagggatgaggctgagaaatgtgtcgagatcgcccgggaggccctgaacgccggcaaccgcgagaaggcccagcgcttcctgcagaaggccgagaagctctacccactgccctcggcccgcgcactattggaaataattatgaaaaatggaagcacggctggaaatagccctcattgccgaaaaccatcaggtagtggcgatcaaagcaagcctaattgcacaaaggacagcacatctggtagtggtgaaggtggaaaaaggctataccaaagaccaagtagatggagttctcagagctttatggatattggaacattgatatgggatggtggacctgtacctaacacacacataaacaaatgtaaaaattactatgaagtacttggagttacgaaagatgctggtgatgaagatttgaaaaaagcttatagaaagcttgctttgaagtttcatccc

SEQ ID NO: 18018 - DNA, 395 bp, Homo sapiens
  SIMILAR (6)..(392): 851254mologous to Homo sapiens KIAA0934 protein,accession number AB023151,Smith-Waterman Score=606.
ggaggcaggagatcgatagcattcatcaagtgggggtttattgtcttgctctggtgccagccaatacattgccaaaaactccactaggaggaatccatatatctcagacgaaacaactctttctggagggatcactgcatccttgcaacatcctcatgtgcccccatacatgtgtgacaaacttgccaaagccccggcaaaaacaaccaggtgtaggccctgcttccgtgatggttgggaatctggttgctggaaaacgtatagcacaagctgctggaagggatctgggacaaatagaagagaatgatttggtgaggaagcaccagtttctggcagagatcctacagtggcgagcccaggcgactcctgaccatgtactcttcatgctgttaaaa

SEQ ID NO: 18019 - DNA, 1200 bp, Homo sapiens
  SIMILAR (730)..(1194): 661254mologous to Homo sapiens NAG13,accession number AF194537,Smith-Waterman Score=504.
atggatggaattgaagattgtggaacagcaccgcttaaggatgtgttgcaagggtctcggattatagggggcaccgaagcacaagctggcgcatggccgtgggtggtgagcctgcagattaaatatggccgtgttcttgttcatgtatgtgggggaaccctagtgagagagaggcaacggagcctctccctgtggccaccaccaccactgggcccatgggtggttctgccaggccactgccgatgtttgcttaaagcccaagggctcttctatcagcttgtggtcaatgctggcagacagttaaggcattctaagtcacaggatgagacaagtcagcacaaaatacaggtcatgaagaccttgctgataaaacaggttgcagtaaagaagccggccaaaactgaaatggccacaagagtgacccctggtcatcctcactgctacactcccatcagcgacatttacaaatcccatggcaatgtcaggaaggcgatcgatagcattcatcaagtgggggtttattgtcttgctctggtgccagccaatacattgccaaaaactccactaggaggaatccatatatctcagacgaaacaactctttctggagggatcactgcatccttgcaacatcctcatgtgcccccatacatgtgtgacaaacttgccaaagccccggcaaaaacaaccaggtaatctactcagagctgtatcctcaggttctctcattttgtcttcagttacgggtattaaccccttatcagataagtggtttgcaaataattttttcccagtccatgcagaaaaggcttttgataaaatccagcatcgttttatgattaaaaccctcaacaaactgggcattaaaggaacatacctcaaaataataagagccatctatgacaaaccctcagccaacataatactgaatggggaaaagttgaaagcattccctctgagaactggaacaagacaaggatgcccactgtcacctctcctcttcaacatagtactggaagtcctagccagaggaatcagacaagagaaaaaaataaagggcatccaaatcagtaaagaggaagtcaaagtgtcactgtttgctgacaatataaatattttccttgaaaaccctaaagactcctccagaaagctcctagaactgataaaagaattccgcggatccttctatagagtcgcctaa

SEQ ID NO: 18020 - DNA, 390 bp, Homo sapiens
  SIMILAR (84)..(389): 831254mologous to Homo sapiens mono ATP-binding cassette protein,accession number AB013380,Smith-Waterman Score=410.
aattcccgggtcgacgatttcgtggcgcccggactctcggaggccgggaagctcctggggctggagttccctgagcgccagaggctggcagctgcggttggatttctccgatgtccggtgttatctccatgtctgcccctttcttcctggggaagatcatcgatgccatctataccaaccccactgtggactacagcgacaacctgacccgcctctgccttggcctcagtggcgtgtttctgtgtggtgctgccgccaatgccattcgtgtctacctcatgcaaacttcacgtcagcgcgttgtgaagaggctgagaacttcgttattctcctccattctggggcaggaggttgctttctctgacaaggctggcacaggggaattgatta

SEQ ID NO: 18021 - DNA, 695 bp, Homo sapiens
  SIMILAR (485)..(694): 1001254mologous to Homo sapiens mono ATP-binding cassette protein,accession number AB013380,Smith-Waterman Score=351.
agcggctttatggaccacctggaggagaaggcagacctgagtgagctggtggagaaagaagaacttggattcttccagtactacagagagagatgccatcagaaagtttatcaccctataacaaagccagggggcagtgccaaagatgcagcaccgggaggaggacaccatcaggctggccctggacagggaggagatgaaggcatcaggatgatgttttgtgtctcacctaatcgggccacctttgttgtgagcgtggtgcctctagtgtcaatcattgatgtaatttatggacgatatctacggaaactgaccaaagtcacccaggattcgctggcacaagccactcagctagctgaggaacgtattggaaatgttaagaactgttcgagcttttgggaaagaaatgactgaaatcgagaaataccccagcaaagtggaccatgtaatgcaaaaagcaaggaaagaggcattcgcccgggcagagggggtcatcttaaatgagaaaagcttccagggtgctttggagtttaagaacgtgcattttgcctatccagctcgcccagaggtgcccatatttcaggatttcagcctttccattccgtcaggatctgtcacggcactggttggcccaagtggttctggcaaatcaacagtgctttcactcctgctgaggttgtacgaccctgcttctg

SEQ ID NO: 18022 - DNA, 2139 bp, Homo sapiens
  SIMILAR (562)..(1398): 981254mologous to Homo sapiens mono ATP-binding cassette protein,accession number AB013380,Smith-Waterman Score=1341.
atgctggagggtcttgccttaatgttgatgatctgggtagtgattgctgaagatcgcgtcaccccttatttgtttaaagttgtgtcccttttccgtgttcgtgtcgtcctgggtcatgccctgcctcccaaggctggttaccggtgtcacccgtgctgccgcggttattctagtgctgttccttgtgggcagaaacagcggattgcgattgcccgtgctctgctaaagcactttgggagggtgcatgagccactgtacccagccggcacaccttttagaacgactcaaatccaaaattctgacaacaccaaatgccggaatctgggcatacctgagctgggagcctctgcctcaaggcctgccacaagtctgcaatcaaggtgtcagccagggctttggtctcatctgaaagctgaactcgggcaggatctgcatccaaactcattcaagtggttggtgacaggattcatgtccctatggttggagccctcattgagtgaattgccccacgggctgctggtgtccatcatcagctgtgccctgacatgtttggcacagatcaggctcagtaaatctgcggttggatttctcacgatgtccagtgttatctccatgtctgcccctttcttcctggggaagatcattgatgtcatctataccaaccccactgtggactacagcgacaacctgacccgcctctgcctagggctcagtgccgtgtttctgtgtggtgctgccgccaatgccattcgtgtctacctcatgcaaacttcaggtcagcgcattgtgaataggctgagaacttcattattctcctccattctgaggcaggaggttgctttctttgacaagactcgcacaggagaattgattaaccgcctctcatcagacactgcactcctggggcgctcagtgactgaaaacctctcacatgggctcagggccggggcccaggcttctgtaggcatcagtatgatgttttttgtctcacctaatctggccacctttgttttgagcgtggtgcctccagtgtcaatcattgctgtaatttatgggcgatatctacggaaactgaccaaagtcactcaggattccctggcacaagccactcagctagctgaggaacgtattggaaatgtaagaactgttcgagcttttgggaaagaaatgactgaaatcgagaaatatgccagcaaagtggaccatgtaatgcagttagcaaggaaagaggcattcgcccgggctggtttctttggagcaactgggctctccggaaacctgatcgtgctttctgtcctgtacaaaggagggctgctgatgggcagtgcccacatgaccgtgggtgaactctcttccttcctaatgtatgctttctgggttggaataagcattggaggaaaacaggaatgcatccccagtcaacttgggacaaatgatttcctggtttttgtttcccttcttgtctttgaaaatcaagatggaaaggtcagagactttcaagtatcttggttacctcattcaactgaattgcagcaaagatggaaacgacatatccttcaaaagaaaggggaaggaaaatgtgcattgcagattgctggacaacagcgctggatagaagaggttgggggtggttggaggaagctgtacactgtgcctaccacatgcccactgctgaacagggcacccatctggttatatcaggcaggtacagcaatccccactgtcattcaaggactcaaaggcagcacttcagagtcctcaccattatctgaaggatctggcatccatcatcttaaatcctccctttcaccctcatcttatcctcgtttttcagagaggaatctcgaacacagagagagggagcctacgcaaggtctcccaatttacacatcacagaaccacattctgcgacaaagcctgtctttggcatcttcccacatcccaagcagaggaagaggaagcacaggcctcaccttggaatcagggaagggagcagaaagcctggcaggatggagcaggggcagagacctcatgggtgcacaggaaggagaactgagaaatgaaatgaagcctctagattatagaacagaaggattttgtggcaaggtcggcctaaaagggctttacactggggaatga

SEQ ID NO: 18023 - DNA, 825 bp, Homo sapiens
  SIMILAR (595)..(786): 601254mologous to Canis familiaris annexin XIIIa,accession number X80208,Smith-Waterman Score=155.
atgaagcccaactgctctatttacatagtacaaagccaagaactggacagagtgagtgactctgatgtgatcacacacagccagtcgtacaccctctcagaaggcagtcaacagttgcctaaaggggactcccaaccctcgacagtcgtgcagcctctcagccacccatcacggaatggagagccagaggccccacagcctggttccctctctccctgctgccatgtaagatgtgactttgctcctccttcaccttctgccacaactgtgaagcctccccaaccatgtggaactctcagtgcatggcaggatgcccacattgtttacactcctgaggataccatcagtaccttcaggtacaatggtgcccaccagtttaaggcacagcatattgaagggccttcaagtcaggctaaagcgagcagtcctcagggttttgatgtggatcgagatgccaaaaagctgaacaaagcctgcaaaggaatggtgagtgggtctcctgcacgcagaaaggctccttccgggcttggcacctgccaggatccaggcctgagaggccaaggccctcgtctgggacaggagtggtctgaatggaaagaaagagggaccaatgaagcagccatcattgaaatcttatcgggcaggacatcagatgagaggcaacaaatcaagcaaaagtacaaggcaacgtacggcaaggtgattccaggggtggtcagcaagcttgcacccagccatggcctcagccgtctcggcttcctcatgtccccaggccacgcagaatatctttatagctttattgagtcagcccaggaggaaaagtga

SEQ ID NO: 18024 - DNA, 388 bp, Homo sapiens
  SIMILAR (1)..(306): 851254mologous to Homo sapiens Human PRO873 protein sequence,accession number Y41723,Smith-Waterman Score=451.
  misc_feature (1)...(388): n = a,t,c or g
tggggccagctggctcgnatgtacgtcagcacgcgggaacggtacaagtggctgcgcttcagnaggactgtctgtacctgaacgtgtacgcgccggcgncgcccgggggatccccagctgccagtgatggtctggttcccgggaggcgccttcatcgtgggcgctgcttcttcgtacgagggctctgacttggccgcccgcgagaaagtggtgctggtgtttctgcagcacaggctcggcatcttcggcttcctgagcacggacgacagccacgcgcgcgggaactgggggctgctggaccagatgggcggctctgcgctgggtgcaggagaacatcgcagcctttcgggggagacccagggaaattttgaccctgtttcggccaatt

SEQ ID NO: 18025 - DNA, 765 bp, Homo sapiens
  SIMILAR (1)..(459): 971254mologous to Escherichia coli Peptidase T (EC 3.4.11.-) (aminotripeptidase) (tripeptidase) ,accession number D90748,Smith- Waterman Score=797.
atggtaaatgcgctgtcgctggcggcacgtattcatgcggaagttccggcggatgaaagcccggaaatgacagaaggctatgaaggtttctatcatctggcgagcatgaaaggcaccgttgaacgggccgatatgcactacatcatccgtgatttcgaccgtaaacagtttgaagcgcgtaaacgtaaaatgatggagatcgccaaaaaagtgggcaaagggttacatcctgattgctacattgaactggtgattgaagacagttactacaatatgcgcgagaaagtggttgagcatccgcatattctcgatatcgcccagcaggcgatgcgcgattgcgatattgaaccggaactgaaaccgatccgcggtggtaccgacggcgcgcagttgtcgtttatgggattaccgtgcccgaacctgttcactggcggttacaactatcatgcgcatcgccaaaattctccgcagtcagcgcaatgttgctggcgagtgcatccagtgccggacggtgcggggaatcgatcttctcaccattggcatacacgtcgtcgccaattgaaagtgactcatgcggacctgcactatgaaggttcttgcgccattgaccaggattttcttgacgcagccggtattctcgaaaacgaagccattgatatctggaatgtcaccaacggcaagcgtttctccacttatgccatcgcggcagaacgcggttcgagaattatttctgttaacggtgcggcggcccactggtaccgataa

SEQ ID NO: 18026 - DNA, 2613 bp, Homo sapiens
  SIMILAR (663)..(4): 1001254mologous to Escherichia coli RhsE protein (fragment),accession number D90785,Smith-Waterman Score=1207.
ctaacccattgggtctatcacttgtatgggattcaacggatactgatacatattccatccacctctcaacccaatcgggtccggggtgatataccgcccctgcaacggatcgtagtgccggtgacggttatagtacagccccgactcctcatcatgctgctgccctggcagacggtacggctggtgcaggtgatgcgggttctcctcattaagctggttgccccattcatcatactccccgcgccacgccgtattgccgtcttcgctgatgagcgccagcggcaggccccggtggtcgcagtggtaaaaatgaacttttcgcgccggtgtgtattccggctccacctgtctggccagttgctccaccgtcagcccgcactgcgcaagccacgcccggctttcactgctcacgcggtctgcccggatttcttcctccagcctgtccagcagccgcaccagttcagccgggaacaccacgccgtggccgttctcactcccttcctgctggagcgtctctgccaggctgcgccgctgcgctttttcccgctcgccgttctctgtctcgacccggatgagcggcgtgaagcttcccggctcgtataccgtctggatacgtgtggtgtcagtctgcaccgtcgtcagcctgtctccgtcccagccatatcgctggcgctgccgatgctggcgattctggtggtacagaccatcttcatggcgttgtatgccatcttcgttacctggcgcatgatgggcaaaaactacgatgcggcagtgctggctgcgggtcactgtggttttggcctcggtgcaacgccaacggcaatcgccaacatgcaggcgatcactgaacgctttggcccgtcgcacatggcgtttttggtggtgccgatggtcggtgcgttctttatcgatatcgtcaatgcgctggtaattaagttgtatttgatgttgccgatttttgccggttaaccgatgaagcggcggtagaagtgccgccgcaacaaagacaaatgcctgatacgcttcgcttatcaagcgttccgtctccggcatccagcgttctatcagggcttttgcctgttgtgggtaacgttcgtgaatatggcgtgccaggcgctgaacttccgggatcatcgcctgatcgcgcagtaaatccgccactttaaattcagcattacccgtctgacgcgtgcctaacaattcgccagggccgcgaatctccagatctttttgcgcaatcacaaaaccgtcgtacagtcgcgacggtccaggccggcgattgatagcgatgcgctggcaaatcaaatcactatggcgggcctggaagttgacggtgtagaaccggttgccggcagcttccacggcgtggtcgttggtgaagtggttgagtgtgcgcagcatccgaacgctgacaaactgcgtgtgacaaaagtgaatgtcggcggcgatcgcctgctggacatcgtctgcggtgcgccaaactgccgtcagggcctgcgtgtagcggtagcgaccattggtgctgttctgccgggtgatttcaaaattaaagcggcgaaactgcgtggcgaaccgtctgaagggatgctgtgctccttctctgaactgggcatttctgacgatcacagcggcattatcgaactgcctgcggatgcgccgattggcaccgatatccgtgaatacctgaaacttgatgacaacaccatcgaaatcagcgtgacgccaaaccgtgccgactggttgccgctgctgaaccagctgccgctggttcaaccggaaatcgttccggttggtgcgaccatcgacgacacgctgccgattacagtcgaaacgccggaaccggatcaggcgcggctccccccggctgttcgtgcacctgatcctgccgctcatcggcatcgtcatcctgctgatggtcttgacgcagatgagccgggtcgccctggccgtcggcggggccctatccttgccatcaagaatataccgcatgacactaatttcttgtttcgataaggagtcgagtttttgctggtcggacgttaaacttccaacaaaccggttgagagagaaggggaaatagcagtagccattttttgcagcttcaatagccgcaatgatattgttcatgccttcttttttactcacgaaaccattagcgccagcatcagcacaatgtttcccgtaaaaatggtcatttttagcggagacgataataataattccgctatattggcgcttcctcagcgtttctaacacctggataccgttaactccggggatatcgacatcaatgatgacgatatcaggcttaagtgtttccacccgctgaacggcacttccgccttcagtcaactctgctaagatttcaatatcgtttttgatcaataaattacgaattgactgcaaccaaaaacgccgttcctgcaagctctcgatgcttgcttcagggttgcttattcgctggataacctgccttataacggggattgaggcgagatcactaagccgagatgaatttccccgcttattcgcaccttccataacagtgctgtcagcgatgcggcgaagtttctggctttctcctgcgggatcgttgagaccatgatgtcccat

SEQ ID NO: 18027 - DNA, 908 bp, Homo sapiens
tagaaggttcccccaaaaaaagggggccaaaagggttccatccctgattggtccccatgacctgggtgattgaagccagttattccattatgcgcaaaaaagtgggtgagcatccgcattttttggatatcgcccaccaggcgatgcgcgattgcgatattgaaccggaactgaacccgatccgcggtggtaccgacggcgcgcagttgtcgtttatgggattaccgtgcccgaacctgttcactggcggttacaactatcatggtaagcatgagtttgtgactctggaaggtatggaaaaagcggtgcaggtgatcgtccgtattgccgagttaacggcgcaacggaagtaagcgaaaagggatgcggcatgtgatgccgcatccggcttaaatccaaacttacccttcgaagaaccaatacccgctattgaccagcgccgcgagcatcgcgaggaatgacggatcttccagcgcatcgccaaaattctccgcagtcagcgcaatgttgctggcgagtgcatccagtgccggacggtgcggggaatcgatcttctcaccattggcatacacgtcgtcgccaatgcgcaatacgcgcagaccacccaggcgcaccagcacttcaccttgtttcagcgcatcgtagatttcatccggctgataaggcggctctggcggcgcgatatccagttcatgacgtgactgggatataaactcgccaaaccattgcttaaaggggtccgggtgggtggacaattccgagcatcatctcacgcagtttatccatctcttgcggcagaacatccgcaggatgagcgcgaggtggaacatccggatcgctgtagtagttgccgcccagttcacgttgcagcacataatcggcaaatccactaaatcagttccgcgatt

SEQ ID NO: 18028 - DNA, 3060 bp, Homo sapiens
  SIMILAR (2462)..(3058): 981254mologous to Escherichia coli K12 L-idonate transporter,accession number AE000497,Smith-Waterman Score=997.
gaggacggctaccatgccatccacagtgttgccatccacagtgttgccatcactcctgcccacaacaggagctggctggagcatgaggtggattctgtgctggagcctcaccctttgcctgatggcgcagacggccttgggtgccttgcacaccaaaaggcctcaagtggtcaccaaatatggaaccctgcaaggaaaacagatgcatgtggggaagacacccatccaagtctttttaggagtccccttctccagacctcctttaggtatcctcaggtttgcacctccagaacccccggagccctggaaaggaatcagagatgctaccacctacccgcctggaaagcaggaaaatctattaggcagagaaaaaccagatatgcctggagatacagctgcctttgtcaacccccaccctggagctgggtcaggtgccatctgtccccaagtcagcgtccatcatgtcagcttgtctatgttcatctggggcgttggggctcaaaatagcagctgcttcgagagctggaccaatgccaagacggccctaggcgtgagatatataggatatggtgctccactcatgcctaaggtatatttgaaggctcccatgattctgaatggagtctgtgttatctggaaaggctggattgatctccaaagactggatggtatgggctgtctggagtttgatgaggagcgagcccagctgcggtcccaaagggtaccggccccgccacctcaggaagccgaagatgccgagcctgtgctgcagaaacaccagcaccactttctcgcgggcggccaagtcagagccctcgtacgaagaagcagcgcccacgatgaaggcgcctcccgggaaccagaccatcacctggacgaagaaggccgggatctgagcggggcggtgggcggcggtgggaccgcgggcgcgggagacctggcactcactggcagctggggatccccgggcgcgcgcgccggcgcgtacacgttcaggtacagacagtcctcgctgaagcgcagccacttgtaccgttcccgcgtgctgacgtacatcgaggccagctggccccaggactcctgcaggcacctgcgggcaccagagccgccttatcagccggatgaaatctacgatgcgctgaaacaaggtgaagtgctggtgcgcctgggtggtctgcgcgtattgcgcattggcgacgacgtgtatgccaatggtgagaagatcgattccccgcaccgtccggcactggatgcactcgccagcaacattgcgctgactgcggagaattttggcgatgcgctggaagatccgtcattcctcgcgatgctcgcggcgctggtcaatagcgggtattggttcttcgaagggcgaaaaagttcagcgtctgttctgatgagcttgcatccaggtcaagatctggcgcggctgaacctaatacgatgttaccgtcatttttgtccatcagtcgtacaccgaccccagttgcttcgcctgcactggtgttgctcaacaaaggcgtactggcgcatgatgggcaaaaactacgatgcggcagtgctggctgcgggtcactgtggttttggcctcggtgcaacgccaacggcaatcgccaacatgcaggcgatcactgaacgctttggcccgtcgcacatggcgtttttggtggtgccgatggtcggtgcgttctttatcgatatcgtcaatgcgctgagtcgtggcgtcggcagtaccgccgtggcgctgctgcataagttgggttatcaggtcgttgccgtttccggtcgcgaaagtacccatgaatatctgaaaagtttaggtgctagccgtgttctccctcgtgatgagtttgccgaatcccgtcctctggaaaaacaagtctgggctggggcaattgacaccgttggcgacaaagtgctggcaaaagtgctggcgcaaatgaattacggcggctgcgtggcggcctgtggtctggcgggtggttttactctgccaaccacggtcatgccatttattctgcgtaatgtccgtttgcaaggggtggattcagtaatgacgccaccagaacgccgcgcacaagcctggcagcgactggtcgccgatttaccggaatcattctatacccaggcggcaaaagagatatctctgtcagaggcaccgaactttgccgaggccatcattaataaccagatccagggtcgcacgctggtgaagcattcacatctatccagacgatgcagtgaaaattgggtaatccccagaaagcgctgtcgaagtctgaccagaagcataaacacgaacgcccgcttcccccacccataccaacaatgttccaacttgcgcagccaggcgtacagctgcatgcgaaacccgtgtaccaggttccagcatgatgcaggcaaccgagccaacaggaatatgagtgcgcagaacgaccgcgcaactggttatcgatacgacgggattcctgccgtcgtcggatttgccgaagggatggatgcacaggccgtcctgcactctatacaaaatggtatcggcagcacgctcggcgggctggcaatgatcctcggtttcggggccatgttaggcaagctgatttctgatacgggtgcggcacaacgtatcgccactacgctgattgctacttttggtaaaaaacgcgtgcaatgggcgctagtgatcaccggtctggttgtgggcctcgccatgttttttgaagtgggttttgtcctgctgttgccgttggtatttaccatcgtagcatcatcaggattacccctgttgtatgttggcgtaccaatggtagcagcgctctctgtaacccactgttttctgccgccacatccagggcctactgccatcgcgactatctttgaggctaatctcggaacgactttactgtatggatttatcattaccattccgacagttattgtcgcaggaccgctgttttctaaactgctaactcgctttgagaaagcaccaccggaaggcttatttaatcctcatctgtttagcgaagaggagatgccctccttttggaacagtattttcgctgccgt

SEQ ID NO: 18029 - DNA, 1083 bp, Homo sapiens; identical to SEQ ID NO: 12283
  SIMILAR (217)..(546): 701254mologous to Homo sapiens TAXREB107,accession number D17554,Smith-Waterman Score=371.

SEQ ID NO: 18030 - DNA, 997 bp, Homo sapiens
  SIMILAR (223)..(951): 511254mologous to Homo sapiens DNA-binding protein TAXREB107,accession number AF261087,Smith-Waterman Score=424.
cggacgcgtgggcggacgcgtggagcaagaaggcggatgttaaagttgaaaacccagaatactaaagagaagaaacccgaagccaagaagagttgatgctggtggcaaggtgaaaaagggtaacctcaaagcctaaaaagcccaagaaggggaagcccccattgcagcccgcaacccgtgtccttgtaaaaaagaaataggaaggaattcccgatctggcatgtattccagaaaaggccatgtacaagaggaaagtactcagccgctaaatccaagggttgaaaagaaaaaggaaggagaaggttctcgcaacttgttacaaaaccagttgggtggtgacaagaaccggcggtaacccggggtggttaaacttccgcaaaaatgccctagatattatccctactggaagatgtgcctcgaaaagcttgtttgagccacggcaaaaaaacccctttagttcagcacgttgagaaaaactgcgaggccagcatttacccccggggaccattctgattcatcctcactggaccgccacaggggcaagaagggttggttttcctgaaagcagcctggctaagttggcttatttactttgttgacttggacctctggtcctcaaatccgaggttcctctaccgaagaacacaccagaaattttgtcatttgccactttcaaccaaaatccgatatcagcaattgtaaaaatcccaaaacatcttactggatgcttactttcaagaaggaagaagctgcggaaggcccagacaaccaggaaggttgagatcttcgacacagaaaaagagaaatatgagatttacggagcagcgcaagattgatcagaaagctgtggactcacaaattttaccaaaaatcaaagctattcctcagctccagggctacctgcgatctgtgtttgctctgacgaatggaatttatcctcacaaactggtcgttctaaactgtcttaagaaccctaattaaatagctgactacaaaa

SEQ ID NO: 18031 - DNA, 1887 bp, Homo sapiens
  SIMILAR (939)..(1415): 1001254mologous to Homo sapiens parathyroid-like protein precursor,accession number J03580,Smith-Waterman Score=825.
ccgtttttgttcttctaagcaaaagatctccctctctctagccgatgctccccactcagttcatcccgggaatgggccagggaggaaggttctcatgcatcgccccgagctgccaggcgagcttcgggctccttaaattcacaggccaacagcccgcgtcctctccgcgcaggctcccggttgcccgcggtccccggcccagctccttggcctcctcctcgtcggtccgcccctggtggtcttggcgcccgctcgtccagctcggcgcgccggggaccgccggctgcccggggcagtccgcacgccctcggggatctcggctcccggatccgccgcgccggcaggagccggccgggcctggagggagcaagcggatgcgcccacgcccccggcacggggatggcgcgacagggcccgggctccggggtggggctcggcagagctcctgacagctccggggctcggcagcgcgggaggggggagctccgccgctcgccgctcattcccggctcggggctcccctccactcgctcgggcggcgcggggcccgttcgggccgcccgtcgccgcccccgccccccgcgcgcccgcccgccagcccgcctgcgccctcgctcgccccgcgcgcgttcctagggcgccacctctttgcgactagctcacttctccggcaggtttgcctcggagcgtgtgaacattcctccgctcggttttcaactcgcctccaacctgcgccgcccggccagcatgtctccccgcccgtgaagcgggctgccgcctccctgccgctccggctgccactaacgacccgccctcgccgccacctggccctcctgatcgacgacacacgcacttgaaacttgttctcagggtgtgtggaatcaactttccggaagcaaccagcccaccagaggaggtcccgagcgcgagcggagacgatgcagcggagactggttcagcagtggagcgtcgcggtgttcctgctgagctacgcggtgccctcctgcgggcgctcggtggagggtctcagccgccgcctcaaaagagctgtgtctgaacatcagctcctccatgacaaggggaagtccatccaagatttacggcgacgattcttccttcaccatctgatcgcagaaatccacacagctgaaatccaccccgtccgatttgggtctgatgatgagggcagatacctaactcaggaaactaacaaggtggagacgtacaaagagcagccgctcaagacacctgggaagaaaaagaaaggcaagcccgggaaacgcaaggagcaggaaaagaaaaaacggcgaactcgctctgcctggttagactctggagtgactgggagtgggctagaaggggaccacctgtctgacacctccacaacgtcgctggagctcgattcacggaggcattgaaattttcagcagagaccttccaaggacatattgcaggattctgtaatagtgaacatatggaaagtattagaaatatttattgtctgtaaatactgtaaatgcattggaataaaactgtctcccccattgctctatgaaactgcacattggtcattgtgaatatttttttttttgccaaggctaatccaattattattatcacatttaccataatttattttgtccattgatgtatttattttgtaaatgtatcttggtgctgctgaatttctatattttttgtaacataatgcactttagatatacatatcaagtatgttgataaatgacacaatgaagtgtctctattttgtggttgattttaatgaatgcctaaatataattatccaaattgattttcctttgtgcatgtaaaaataacagtattttaaatttgtaaagaatgtctaataaaatataatctaattac

SEQ ID NO: 18032 - DNA, 516 bp, Homo sapiens
  SIMILAR (178)..(516): 1001254mologous to Homo sapiens PTH-like peptide,accession number J03802,Smith-Waterman Score=582.
ctgtccattagtccagtgcggtggaattcccggctgccactaacgacccgccctcgccgccacctggccctcctgatcgacgacacacgcacttgaaacttgttctcagggtgtgtggaatcaactttccggaagcaaccagcccaccagaggaggtcccgagcgcgagcggagacgatgcagcggagactggttcagcagtggagcgtcgcggtgttcctgctgagctacgcggtgccctcctgcgggcgctcggtggagggtctcagccgccgcctcaaaagagctgtgtctgaacatcagctcctccatgacaaggggaagtccatccaagatttacggcgacgattcttccttcaccatctgatcgcagaaatccacacagctgaaatcagagctacctcggaggtgtcccctaactccaagccctctcccaacacaaagaaccaccccgtccgatttgggtctgatgatgagggcagatacctaactcaggaaactaacaaggtggagaca

SEQ ID NO: 18033 - DNA, 474 bp, Homo sapiens
  SIMILAR (310)..(5): 291254mologous to Homo sapiens myc protein,accession number M20605,Smith-Waterman Score=87.
tcacaggctcagccagaggtctctcccatcatacactgtggcctccgggctctgcaccttctgctggctccttgcttttgccaccctctgttttggattcttatcttgatttccattttggtgttgatgctttggagtttctcttgctttctgggccattgtcacccttggcattctgccagaaacgttgcccacttttattcttccagcaacttctattagagcctgagttaggctccattcaaacagtcttccggctggatcgctggcaggctggggctctggggcgttgcggcccctggggtaggggggtctgtgcctcaccaggacagcccgaggacgcacatcaacgagccttaaccaccatggacagctcactggcttcccccagccagctctgcgcaatttacaaactccataggagccaccagctagattgatttttatgccctggagagatgccacgtgttccat

SEQ ID NO: 18034 - DNA, 771 bp, Homo sapiens
  SIMILAR (346)..(768): 1001254mologous to Homo sapiens PTH-like peptide,accession number J03802,Smith-Waterman Score=735.
atgaccacgctggtcagcgggggctgccgcctccctgccgctccggctgccactaacgacccgccctcgccgccacctggccctcctgatcgacgacacacgcacttgaaacttgttctcagggtgtgtggaatcaactttccggaagcaaccagcccaccagaggaggtcccgagcgcgagcggagacgatgcagcggagactggttcagcagtggagcgtcgcggtgttcctgctgagctacgcggtgccctcctgcgggcgctcggtggagggtctcagccgccgcctttgaagcccatgaggcccaagaatgttcatgttcccaccaaggtcacaacctacaaaagagctgtgtctgaacatcagctcctccatgacaaggggaagtccatccaagatttacggcgacgattcttccttcaccatctgatcgcagaaatccacacagctgaaatcagagctacctcggaggtgtcccctaactccaagccctctcccaacacaaagaaccaccccgtccgatttgggtctgatgatgagggcagatacctaactcaggaaactaacaaggtggagacgtacaaagagcagccgctcaagacacctgggaagaaaaagaaaggcaagcccgggaaacgcaaggagcaggaaaagaaaaaacggcgaactcgctctgcctggttagactctggagtgactgggagtgggctagaaggggaccacctgtctgacacctccacaacgtcgctggagctcgattcacggtaa

SEQ ID NO: 18035 - DNA, 708 bp, Homo sapiens
  SIMILAR (419)..(520): 1001254mologous to Homo sapiens parathyroid hormone-like related preprotein (34 AA) (1792 is 2nd base in codon),accession number X14304,Smith-Waterman Score=170.
atgggccagggaggaaggttctcatgcatcgccccgagctgccaggcgagcttcgggctccttaaattcacaggccaacagcccgcgtcctctccgcgcaggctcccggttgcccgcggtccccggcccagctccttggcctcctcctcgtcggtttgcctcggagcgtgtgaacattcctccgctcggttttcaactcgcctccaacctgcgccgcccggccagcatgtctccccgcccgtgaagcggggctgccgcctccctgccgctccggctgccactaacgacccgccctcgccgccacctggccctcctgatcgacgacacacgcacttgaaacttgttctcagggtgtgtggaatcaacttttcggaagcaaccagccccccagaggaggtcccgagcgcgagcggagacgatgcagcggagactggttcagcagtggagcgtcgcggtgttcctgctgagctacgcggtgccctcctgcgggcgctcggtggagggtctcagccgccgcctttccttaacgcagcgtttctcaaagtgtggcctttgggccacctacaccaaaatctactgcatgtgctggttgaaaaaggacgggctgctgaaagccattctaagcctcctgaatcaatccttgaagagggctcaagaataagcaatcgtgcaaactttccagatgaggttttgcacactaatgcttaa

SEQ ID NO: 18036 - DNA, 882 bp, Homo sapiens
  SIMILAR (524)..(625): 1001254mologous to Homo sapiens parathyroid hormone-like related preprotein (34 AA) (1792 is 2nd base in codon),accession number X14304,Smith-Waterman Score=170.
atggagggatcctcactggccatcaatgtggatgtctgcagtggtgatgaggggacaaaagtacagaaaagtccagtaacaatgccctctctggaaagaggcaccaagcagttttcagagagaggggaagtaactcagagaagagaggaaaaggggaaaggaggggaaggggaaggagtgatggaggaaatgaggagagaaaagagaagacaagatgaaaggcgccacctctttgcgactagctcacttctccggcaggtttgcctcggagcgtgtgaacattcctccgctcggttttcaactcgcctccaacctgcgccgcccggccagcatgtctccccgcccgtgaagcggggctgccgcctccctgccgctccggctgccactaacgacccgccctcgccgccacctggccctcctgatcgacgacacacgcacttgaaacttgttctcagggtgtgtggaatcaactttccggaagcaaccagcccaccagaggaggtcccgagcgcgagcggagacgatgcagcggagactggttcagcagtggagcgtcgcggtgttcctgctgagctacgcggtgccctcctgcgggcgctcggtggagggtctcagccgccgcctgagtggcgatcagacacactgctcaggacaatggtgattaatgaagtcgccccactgaacaatatgctacaaagggcttcaccactcctagagaagaaactgtccaattttcctgagataccggacaatctcctggcagcagtttccccactcaatgaaagcaggacagcccgaggacgcacatcaacgagccttaaccaccatggacagctcactggcttcccccagccagctctgcgcaatttacaaactccatag

SEQ ID NO: 18037 - DNA, 531 bp, Homo sapiens
  SIMILAR (474)..(530): 941254mologous to Homo sapiens Human secreted protein, SEQ ID NO: 4470,accession number G00389,Smith-Waterman Score=92.
  misc_feature (1)...(531): n = a,t,c or g
gcggtgcaattcggttcgcaaagaagctgacttcagagggggaaactttcttcttttaggaggcggttagccctgttccacgaacccaggagaactgctggccagattaattagacattgctatgggagacgtgtaaacacactacttatcattgatgcatatataaaaccattttattttcgctattatttcagaggaagcgcctctgatttgtttcttttttccctttttgctctttctggctgtgtggtttggagaaagcacagttggagtagccggttgctaaataagtaagtgctgagaggctccagagaaattttttttcttttcaacttgggagatgcccttgatgttgaagaggctttttgagagcgggctaaaaagggggagcggagtagtgcggggagatggagagtccagactgacactcgggtcccattcccttctgttgcaggtcccgagcgcgagtangacgatgcagcggagactggttcagcagtggagcgtcgcggtgttcctgctgagctacg

SEQ ID NO: 18038 - DNA, 323 bp, Homo sapiens
  SIMILAR (176)..(265): 1001254mologous to Homo sapiens Amino acid sequence of a human beta-secretase enzyme fragment,accession number B07899,Smith- Waterman Score=159.
ttggtttttcagcagacctgcagagggcacaggggaagtgttcctttggcccctgcagcaccacaggaccccaggtcctgtctgtggtcgtggtggtaacgggtgccagcctggaccagtcctgcatcgtggagcttcactctggacattctaaggggcagactgtggctggggcctcaacatcctggtggatacaggcagcagtaactttgcagtgggtgctgccccccaccccttcctgcatcgctactaccagaggcagctgtgagtcctggggagagcccgggggaagtaccttttccaaggatccagggctaagaagg

SEQ ID NO: 18039 - DNA, 810 bp, Homo sapiens
  SIMILAR (247)..(807): 1001254mologous to Homo sapiens beta-site APP cleaving enzyme,accession number AF190725,Smith-Waterman Score=1005.
atgcagagcactggagaaagagcattcaggcagaagaagcacaggtgcaaaggacctgtgacaaccagtagctctggggactgtcagaaagccagtatagccaggtatgaaattcttgaatttgcccgggagattggtattgatcccatcaaggaaccagaactgatgtggctggcgcgagagggcatcgtggccccactgcctggagagtggaaaccatgcctccagaaacaactgagattacagacggagaagttccctgatggtttctggctaggagagcagctggtgtgctggcaagcaggcaccaccccttggaacattttcccagtcatctcactctacctaatgggtgaggttaccaaccagtccttccgcatcaccatccttccgcagcaatacctgcggccagtggaagatgtggccacgtcccaagacgactgttacaagtttgccatctcacagtcatccacgggcactgttatgggagctgttatcatggagggcttctacgttgtctttgatcgggcccgaaaacgaattggctttgctgtcagcgcttgccatgtgcacgatgagttcaggacggcagcggtggaaggcccttttgtcaccttggacatggaagactgtggctacaacattccacagacagatgagtcaaccctcatgaccatagcctatgtcatggctgccatctgcgccctcttcatgctgccactctgcctcatggtgtgtcagtggcgctgcctccgctgcctgcgccagcagcatgatgactttgctgatgacatctccctgctgaagtga

SEQ ID NO: 18040 - DNA, 1125 bp, Homo sapiens
  SIMILAR (247)..(447): 981254mologous to Homo sapiens lymphoma proprotein convertase,accession number U33849,Smith-Waterman Score=366.
ggccggcctgtgcccagcaggctggacaaagaggtagtgcccctgaagctctccgatgcgtccagcattcaccagccctgctgcctgggccaaggcatccgcctgctgctccagagtctcttcctccccgtcaccttccaggctttccaggtgcacagcccagctcggcccccctgtgccctggccatcaggcccacctgtccctgccaggcccatgacccagggaaccagtatttatttctcaacagctggggaccagatgacgatgggaagacagtggatggcccccatcagcttggaaaggctgccttacaacatggggtgattgctggtcgccagggctttgggagcatctttgtggtagccagtggcaacggaggccaacacaacgacaactgcaactacgatggctacgccaactccatctacaccgtcaccataggtagtcacccaatgtttctgtgctcctgtgtgtgtgtcaccgaaggagaggtgtgggaaatggaactggatagactcaagaatcaggatggcgaaataaataggaacattatggaagagactgaacgggcctggaaggcagaggtgagaagaggagctgatatcttgaaagtcttagtttcaggcttccagatggtatctacttttggcattgtaataggagagccagagatattaaaggctattcaggatgtgacaataaagcgggaagaaacaaagaagaagatagagaaagagaagaaggagtttttgcagaaggagcaggatctgaaagctgaaattgagaagctttgtgagaagggcagaaggcagtggggccacgatgccctctcgcgccagccacatcagttctggttccttgatgggatcaataccaatctcccgggcaaattcaagaatttctgcaaggagaggcagagccaggacatcacaggtgacatttactatttcaacttcgccaacgggcagtctatgtgggaccatccatgtgacgaacactatcggagcttggtgatccaagagcgggcaaagctgtcaacttctggggccattaagaagaagaaaaaaaaaaaggaaaagaaagacgtggcggatgcctggaatcccagttactcgggaggctga

SEQ ID NO: 18041 - DNA, 2907 bp, Homo sapiens
  SIMILAR (2907)..(1405): 1001254mologous to Homo sapiens beta-site APP cleaving enzyme,accession number AF190725,Smith-Waterman Score=2661.
tcaagcaatcctcctgcctgggcctcccaggtagccgggactataggtgcacaccactgtccccagcttgaactcagtctctaacctacttccttttcctgtttcacttccaggtgaccactgactgggaccttcagaagggcactggctgcacctggcaatctcagcataggccagccccaggatgccttcccagttggagccgttgatgaagaacttgtctgattcagtgatggcagcaatgttggcacgcacagtgacgttggggccatgggggatgcttaccaggtcggtgcccagctccccttcccacttgccctgggtgtagggcacatacacacccttccggaggtcccggtatgtgctggacagctgcctctggtagtagcgatgcaggaaggggtggggggcagcacccactgcaaagttactgctgcctgtatccaccaggatgttgagctccagcttctccatatcacagtgttcaaagaaaaagagtcttacatgtgaagaccttccaggatatgaaacttgggcagaaggcaagaacattggggtactgatttgggccagtggagcagggaacaaggcccggatgcgaccaagtggctgagtacttgctgccacccgctcatgttctgccagtcgtgcagcaaccaactggataagttcctccatggtcaggcctgccatggtggtacgtgctgtcttgatctgctgaagaatgttggtcatctgggccttattgcactgtgggaaccgggtcagcagcttctccaggatcttctccagtttgtctactggttggggccggggagtttcagcagaagccttaacaccgcccaagctgggcataaccatgggcattgtgacctgcccaatggagaagggcatccgaggagccagagagggactgggttgaaacacctgaagcatgaagtctgtctctgatgggggtggaggtaaagtgggagtagggatttgaggaaggctgctcagcttggctccgttcctcactaactggatatgactattaaattggtcacgaacattctttttcattatccgaactccattcagtctcgtctcccactcctgttgggaacgaactgtctccagtgttgggggagttgacttgaggtaagtaaggtgcaattctgcctctttttctgcttcttctagtttcagtaccagtaactctttccggctctctagtgataagattggctctcctattacaatgccaaaagtagataccatctggaagcctgaaactaagactttcaagatatcagctcctcttctcacctctgccttccaggcccgttcagtctcttccataatgttcctatttatttcgccatcctgattcttgagtctatccagttccatttcccacacctctttcagcagggagatgtcatcagcaaagtcatcatgctgctggcgcaggcagcggaggcagcgccactgacacaccatgaggcagagtggcagcatgaagagggcgcagatggcagccatgacataggctatggtcatgagggttgactcatctgtctgtggaatgttgtagccacagtcttccatgtccaaggtgacaaaagggccttccaccgctgccgtcctgaactcatcgtgcacatggcaagcgctgacagcaaagccaattcgttttcgggcccgatcaaagacaacgtagaagccctccatgataacagctcccataacagtgcccgtggatgactgtgagatggcaaacttgtaacagtcgtcttgggacgtggccacatcttccactggccgcaggtattgctgcggaaggatggtgatgcggaaggactggttggtaacctcacccattaggtagagtgagatgactgggaaaatgttccaaggggtggtgcctgcttgccagcacaccagctgctctcctagccagaaaccatcagggaacttctccgtggaggaggctgccttgatggatttgactgcagcttcaaacactttcttgggcaaacgaaggttggtggtgccactgtccacaatgctcttgtcatagttgtactccttgcagtccattttcagatcctgtccattgatctccacccgcacaatgatcacctcataataccactcccgccggatgggtgtataccagagactgcctgtgtacagcgagtggtcgatacctccaatgatcatgctccctccgacagaggccagcacttcagactggttgagggggaagccagcaccacaaagctgcagggagaagaggttgggaacgtgggtctgctttaccagagagtcaaagaaaggctccagggagtcgtcaggcctggcaatctcagcataggccagccccaggatgccttcccagttggagccgttgatgaagaacttgtctgattcagtgatggcagcaatgttggcacgcacagtgacgttggggccatgggggatgcttaccaggtcggtgcccagctccccttcccacttgccctgggtgtagggcacatacacacccttccggaggtcccggtatgtgctggacagctgcctctggtagtagcgatgcaggaaggggtggggggcagcacccactgcaaagttactgctgcctgtatccaccaggatgttgagcgtctgcggggggctgcccacggtcatctccacgtagtagccctgccccgacttgcccctcaggttgtccaccatctccacaaagctgcccctccggccgggctcctcgggctcttcgtcggtctcccggggcagccgcagccccaggggggcgccccccaggccgctgcgcaggggcagccggatgccgtgctgggtgccgtgggcaggcagcactcccgcgcccatccacagcaggagccagggcagggcttgggccat

SEQ ID NO: 18042 - DNA, 1215 bp, Homo sapiens
  SIMILAR (514)..(738): 971254mologous to Homo sapiens Extended human secreted protein sequence, SEQ ID NO. 167,accession number Y35918,Smith- Waterman Score=383.
gcggcggggaagggagcgagcgtggcgggggacccgaggcacgctctcgagccaacgagcgtgatgcgctcgagtgtgggcggggactgagggaagaagtgaaaatcggactgccaggcgacagttcctccgtttgaaatctcgccggctcctgagcgggccaccgggcccgggctgggggtctggcgggtgtttgagcccagatgagtcatggctggacgacccctccgcataggagatcagctggttctggaagaagattatgatgagacctacattcctagtgagcaagaaattcttgaatttgcccgggagattggtattgatcccatcaaggaaccagaactgatgtggctggcgcgagagggcatcgtggccccactgcctggagagtggaaaccatgcaccacaggaccccaggtcctgtctgtggtcgtggtggtaacgggtgccagcctggaccagtcctgcatcgtggagcttcactctggacattctaaggggcagactgtggctggggcgtccagcacataccgggacctccggaagggtgtgtatgtgccctacacccagggcaagtgggaaggggagctgggcaccgacctggtaagcatcccccatggccccaacgtcactgtgcgtgccaacattgctgccatcactgaatcagacaagttcttcatcaacggctccaactgggaaggcatcctggggctggcctatgctgagattgccagggagccggcgagatttcaaacggaggaactgtcgcctggcagtccgattttcacttcttccctcagtccccgcccacactcgagcgcatcacgctcgttggctcgagagcgtgcctcgggtcccccgccacgctcgctcccttccccgccgcccaacccctccctcgatgaggtcctcaactatcccccaccccggaaggctccgggcgaggctccgggcgaggctctgggcgaggcgcagctcccccagcgccacccaacacccacccgctcccccagcttccagggacgccggggtgttgccctgcagcgcgcaacaaacacttccggaaaaggaccccagttcccaccaactctccccatggcagctcccatgctgcagcctgatgaagcaggtcgcctgggaaactgctgccacacacagacctgctcagagcacctccccaacctgcagagcagttggccacaccaaatgtga

SEQ ID NO: 18043 - DNA, 1680 bp, Homo sapiens
  SIMILAR (1237)..(1488): 301254mologous to Homo sapiens ubiquitin-specific protease 3,accession number AF073344,Smith-Waterman Score=121.
aggcagcggcaggacttttcacttaggagatcagcatttgccctgatggaaactgggcgatcctgcagggactgacctctgagttatccaaaggccgacctggggaaagactgattttgaggttttaatagttttcagatgcttcaagtgttgtgaacagagacttgtttggattatgcatttctcagctagactaaataaatgctagcaatggatacgtgcaaacatgttgggcagctgcagcttgctcaagaccattccagcctcaaccctcagaaatggcactgtgtggactgcaacacgaccgagtccatttgggcttgccttaagctgctccccatgttgcctgtgggaagatatattgaaagagcatgcactcaagcacttttcaagaaagcagtcatcctgttgcaattggaggttaatgagatgtacgttttttgttacctttgtgatgattatgttctgaatgataacacaactggagacctgaagttactacgacgtacattaagtgccatcaaaagtcaaaattatcactgcacaactcgtagtgggaggtttttacggtccatgggtacaggtgatgattcttatttcttacatgacggtgcccaatctctgcttcaaagtgaagatcaactgtatactgctctttggcacaggagaaggatactaatgggtaaaatctttcgaacatggtttgaacaatcacccattggaagaaaaaagcaagaagaaccatttcagaaaaaaatagtagtaaaaagagaagtaaagaaaagacggcaggaattggagtatcaagttaaagcagaattggaaagtatgcctccaagaaagagtttacgtttacaagggctcgctcagtcgaccataatagaaatagtttctgttcaggtgccagcacaaacgccagcatcaccagcaaaagataaagtactctctacctcagaaaatgaaatatctcaaaaagtcagtgactcctcagttaaacgaaggccaatagtaactcctggtgtaacaggattgagaaatttgggaaatacttgctatatgaattctgttcttcaggtgttgagtcatttacttatttttcgacaatgttttttaaagcttgatctgaaccaatggctggctatgactgctagcgagaagacaagatcttgtaagcatccaccagtcacagatacagtagtatatcaaatgaatgaatgtcaggaaaaagatacaggttttgtttgctccagacaatcaagtctgtcatcaggactaagtggtggagcatcaaaaggtagaaagatggaacttattcagccaaaggagccaacttcacagtacatttctctttgtcatgaattgcatactttgttccaagtcatgtggtctggaaagtgggcgttggtctcaccatttgctatgctacactcagtgtggagactcattcctgcctttcgtggttacgcccaacaagacgctcaggaatttctttgtgaacttttagataaaatacaacgtgaattagagacaactggtaccagtttaccagctcttatccccacttctcaaaggaaactcatcaaacaagttctgaatgttgtaaataacatttttcatggacaacttcttagtcaggtatggatttttaagaatcttattttcatcattgggagttcataa

SEQ ID NO: 18044 - DNA, 3285 bp, Homo sapiens; identical to SEQ ID NO: 5119
  SIMILAR (1)..(3285): 1001254mologous to Homo sapiens KIAA0456 protein,accession number AB007925,Smith-Waterman Score=5636.

SEQ ID NO: 18045 - DNA, 2207 bp, Homo sapiens
  SIMILAR (1707)..(1952): 921254mologous to Homo sapiens KIAA0456 protein,accession number AB007925,Smith-Waterman Score=407.
ccgacacacaggcacaccagatggacaaacagaaaaacccacagaaggcggcccctcccccaattcagagagccagtgactggcgctcctccacccctaaccagacacacccgaaaacagacggccagacacagagtgaccggcacagagaagacaatacagaaatacgcagggacaaggacagaccatcggacgctcggacacggacccaggcaggatcacctggacctctggttccccaacggagaccctcggggaaggcccggagcatagcacgcccctgtggagccccgtgcgccccacttggcagcagccacgccccccgcgcacaccccacttcgggctggctctggaagaccccctctccccagccccgcaaccccgggactctgggaggcatctctcgtcaccaagcgtttctgaggcgccgggacaggggctgggtgggccctgcccctgctgctgccctggccctggcctggaacctggtcctgtcaagaacctgccctgactctgccatggccctggccctgctctgccttgttcctggccctgacccagacccagaccctttcctggctctgcactggactttccctggccctgagctggcaatgcacagacctggttgtggccctggtcctgctgtggccctgtctcagaccctagccctgccaggaaccattgggcccactggggctgcactcctcggggagcaggagaagcagaaaaattcagacccagccagccctccacacccaggtgccaattcctgttccggacgcctccacgcacagggccctgtcccccgtggtgtccccaggggtgcctggcagcctctgaggcacagacccacagtacacaggcccaggaaccacgtgcagccctgtacagtgctaccaaccagtacccctaatgcaggcaatgacaccctggatagcgccctcaacccaccccacactgcgaaaggtgcagccctggatagcccctgtcctaccactctggtcgtcctgcagtctctgtcaccaccaccaccaaccacagcagtgcagccccggtttggcccccaaaccaccccccccccgcccggtgcaggcagcacagccccagatagcacaccaaccggccacccaagacgggcagtgacgcctgagatagggctccaactcgtccaggccaccacagtgcagctggatagtgcacttaccccgacgcctttctacgctctggctggctgcagtgtcatcgctgcacccaccacaaacagggctgcaaacaggaaggatttattcactgtccatgctgccctgagttgtccaaagcgaggcagtgccccaaggagcagatggatgaatgaagaacagggcattgtcctcatgcatagctggagtgttgtaagtgccgtgtacatgtatggaaggtctgtgacaccatgtgcacccaagtcggacatgagggaacttggctgtttcagccttgtggagtctctgggtgaagatatcagctgggaaagggttaatgagctatcaactcaagtcatcatacatctggatgggctgtcattaacttcttacaaaaatttgatttcccgtgagagattttcatcaaacatttatatacccagacatggccaggggagtcagcgtggcacagaatcatcagaagcatggtatatagatagtcaagactctggagaacctcttccgaatctgcctggttggctagagcagtgttgtgacttaggctaccatgcaagtctgaaccgggctctacgcaccttcctctctgctgagttaaacctggaacagtcgaagcatgagggtctggatgccatcgagaatgcagtagaaaacctggatgccaccagtgacaagcagcgcctcatggagatgtacaacaacgtcttctgcccccctatgaagtttgagtttcagccccacatgggggatatggatagactgagtagaaaaaagaagaaagaggaagaagaagaagaagaagaagaagaagaagaagaagaagaagaagaagaaggaggaggaggacgagggggaaggggaggagtcacaaaaccattaacttccctaaaacaaccaatttcagaacaggaatttgggccaccctgcaatggtgtcaaatttccccaaaagcaagatgaactagatccagtccctgagcctaagaagtctaaaatctcttctggatga

SEQ ID NO: 18046 - DNA, 1044 bp, Homo sapiens
  SIMILAR (1)..(696): 861254mologous to Leishmania major probable levansucrase precursor,accession number AL160371,Smith-Waterman Score=1054.
atgaacatgaacatcaaaaaaattgtaaaacaagccacagttctgacttttacgactgcacttctggcaggaggagcgactcaagccttcgcgaaagaaaataaccaaaaagcatacaaagaaacgtacggcgtctctcatattacacgccatgatatgctgcagatccctaaacagcagcaaaacgaaaaataccaagtgcctcaattcgatcaatcaacgattaaaaatattgagtctgcaaaaggacttgatgtgtgggacagctggccgctgcaaaacgctgacggaacagtagctgaatacaacggctatcacgttgtgtttgctcttgcgggaagcccgaaagacgctgatgacacatcaatctacatgttttatcaaaaggtcggcgacaactcaatcgacagctggaaaaacgcgggccgtgtctttaaagacagcgataagttcgacgccaacgatccgatcctgaaagatcagacgcaagaatggtccggttctgcaacctttacatctgacggaaaaatccgtttattctacactgactattccggtaaacattacggcaaacaaagcctgacaacagcgcagatcatcgagaaacaagcagggcacagtcggagtagggtgtttcgagaggtggagacgctgtatcagtgtcagggaaacaagaacattttggagctgattgagttctttgaagatgacacaaggttttacttggtctttgagaaattgcaaggaggttccatcttagcccacatccagaagcaaaagcacttcaatgagcgagaagccagccgagtggtgcgggacgttgctgctgcccttgacttcctgcataccaaagggcacaaatggcctggagtggagacagcctctgtgaaggtagcaatagggctggggttcaaaatagccccaaattacttcatgtccaagagcacggacttgagtgcctatggagcctacggcatcctctcctcccatagctcctccatcggaagggctgcaggtagtgcccattcagaagtcggcagttga

SEQ ID NO: 18047 - DNA, 2617 bp, Homo sapiens
  SIMILAR (188)..(1459): 1001254mologous to Homo sapiens MNK1,accession number AB000409,Smith-Waterman Score=2213.
gcgatctgcaggtaggggtgcgcgcgaccgctccccggcgggagccagcgaaggtttccatgtcagaggccgatggagaactgaagattgccacctacgcacaaaggccattgagacacttcgtgtagctggaagacaccaacttcctgacaggagctttatttcatttgggatttcaagtttacagatggtatcttctcaaaagttggaaaaacctatagagatgggcagtagcgaaccccttcccatcgcagatggtgacaggaggaggaagaagaagcggaggggccgggccactgactccttgccaggaaagtttgaagatatgtacaagctgacctctgaattgcttggagagggagcctatgccaaagttcaaggtgccgtgagcctacagaatggcaaagagtatgccgtcaaaatcatcgagaaacaagcagggcacagtcggagtagggtgtttcgagaggtggagacgctgtatcagtgtcagggaaacaagaacattttggagctgattgagttctttgaagatgacacaaggttttacttggtctttgagaaattgcaaggaggttccatcttagcccacatccagaagcaaaagcacttcaatgagcgagaagccagccgagtggtgcgggacgttgctgctgcccttgacttcctgcataccaaaggcattgctcatcgtgatctgaaaccagaaaatatattgtgtgaatctccagaaaaggtgtctccagtgaaaatctgtgactttgacttgggcagtgggatgaaactgaacaactcctgtacccccataaccacaccagagctgaccaccccatgtggctctgcagaatacatggcccctgaggtagtggaggtcttcacggaccaggccacattctacgacaagcgctgtgacctgtggagcctgggcgtggtcctctacatcatgctgagtggctacccacccttcgtgggtcactgcggggccgactgtggctgggaccggggcgaggtctgcagggtgtgccagaacaagctgtttgaaagcatccaggaaggcaagtatgagtttcctgacaaggactgggcacacatctccagtgaagccaaagacctcatctccaagctcctggtgcgagatgcaaagcagagacttagcgccgcccaagttctgcagcacccatgggtgcaggggcaagctccagaaaagggactccccacgccgcaagtcctccagaggaacagcagcacaatggacctgacgctcttcgcagctgaggccatcgcccttaaccgccagctatctcagcacgaagagaacgaactagcagaggagccagaggcactagctgatggcctctgctccatgaagctttcccctccctgcaagtcacgcctggcccggagacgggccctggcccaggcaggccgtggtgaagacaggagcccgcccacagcactctgaaatgctccagtcacaccttataggccctaggcctggccaggcattgtcccctggaaacctgtgtggctaaagtctgctgagcaggcagcagcctctgctctgtggctccattcaggctttttcatctacgaaggccctgaggttcccatcaacccccatttccctagggtcctggaggaaaaagctttttccaaaggggttgtctttgaaaaggaaagcaatcacttctcactttgcataattgcctgcagcaggaacatctcttcactgggctccacctgctcacccgcctgcagatctgggatccagcctgctctcaccgctgtagctgtggcggctggggctgcagcctgcagggagaagcaagaagcatcagttgacagaggctgccgacacgtgcctcttccctctcttctctgtcaccctcctctggcggtccttccaccttcctctgtcctccggatgtcctctttgcccgtcttctcccttggctgagcaaagccatcccctcaattcagggaagggcaaggagccttcctcattcaggaaatcaaatcagtcttccggtctgcagcacggaaaagcacataatctttctttgctgtgactgaaatgtatccctcgtttatcatcccctttgtttgtgattgctgctaaagtcagtagtatcgtttttttaaaaaaaaagtttggtgtttttaaccatctgttccagcaaagatgataccttaaactcccactgcaagcccatgaacttcccagagagtggaacggcttgctcttctttctagaatgtccatgcacttgggttttaatcagcagttccctattattctgattttaagctgttcctgtgatgaacttagagacagcatcggtgtctgctgctgtgtccccaggtcttgtgtgggtggcacagatctgggcagttagatagtgctctgtgcctaaggtgaagccacactagggtgaagcctcacttccctgtttgagcaatgcagtgcctgctgcccgtgtgcatgaaggtacagccattcatataagtggaactattgagttacataaagaaaatagatttgcatttgtcaggcagacgtttatacaacaccacggtgcttttatacattgtgcttattttaataaaactgaaattct

SEQ ID NO: 18048 - DNA, 792 bp, Homo sapiens
  SIMILAR (556)..(651): 811254mologous to Mus musculus map kinase interacting kinase,accession number Y11091,Smith-Waterman Score=138.
atgcttcgctttccagacaggcctggggctgccccagctctggctttgtgtcgcggagccatgctactaaaagcttgtcgagaatggatgccaacagctccccagctgcctcatgttaatgtaatcagcaagaagcctgcaaacctgatggtagtgcagaatatgagctgtgtgggaatgggctacaacgtggtgcttaaaagacttcagcagaccttgccaacaacatgccagaaaaaactgttcctcttctgctgtgaatgcaatacaccagcatcattttgtggccctgagtgtcacagtcacactgatgctggcggagcaatacaagcagctgagcatcaaggatacaagtggctgaacgagattttgagcagaagacattacaaaatcaccattgaaggggagatgggggtagagagcaatgtaaaggagaaggaagtgggagagccacagtgccggtgtcaccaaggcgtaggccagacttctgctggacactggatttggactgagtgtggccttgcattctcccagaggactcctgccaaagggctgtttggaagtcagatcatcgagaaacaagcagggcacagtcggagtagggtgtttcgagaggtggagacgctgtatcagtgtcagggaaacaactctgggtacccagtccagatcatagccccaagctctgtcatcattttgcagcctccagcctcccccacccaactcagcagagccctgagaagaaagtcctgggtcccggaggctgcacctgcagacacaacagattctgcaatg

SEQ ID NO: 18049 - DNA, 450 bp, Homo sapiens
  SIMILAR (55)..(186): 971254mologous to Plasmid F Protein D,accession number M12987,Smith-Waterman Score=218.
ttatttatttttcgaagtgatcttccgtaagaggtctttattcgcgataagctcatggagcggcgtggccgtcgcacaggaaggacagagaaagcgcggatctgggaagtgacggacagaacggtcaggacctggattggggaggcggttgccgccgctgctgctgacggtgtgacgttctctgttggggggcaccacatacgttccgccattcctatgcgatgcacatgctgtatgccggtataccgctgaaagttctgcaaagccttcttctgggtcaggccccatgcagatgcggtttagggcagaatgtgggcacagctctacctcttgtgtctggtggtccgatgctcttcccttgagtgggggggccttggccacagccccacacctggcagagtcagcaacaccggaatttgggacccgggctgccccagcctgccgggccat

SEQ ID NO: 18050 - DNA, 690 bp, Homo sapiens
  SIMILAR (262)..(98): 301254mologous to Homo sapiens thyroglobulin,accession number X06067,Smith-Waterman Score=81.
atggcccggcaggctggggcagcccgggtcccaaattccggtgttgctgactctgccaggtgtggggctgtggtgaactgtcctgacttcgataccggtggcagcctgatgacagacaccggatgcatgaaaaggcaaaaggagcacaaggaggaaggaacacggtgttcagggatggcgatgaagagcggaggctttgcaaggacggaccctcaggttggcatggccctgtggaatatggtgggccccataatgttcttgctaaagcaagtattggataagctcagaagtaccccctccacggagtgtttcctgcccctcttcatggagttttttgttccctttttggtgctgtctccaattccccattcagacgtccaggagggcacggatgtgatccacactgctgatcatttgcctccctcctttactagaggcacaccgccgggaactggacaccagtattctcagtgccgagtgactgccctgcatgccagcttctctccccgcttccgccacttagtgccagctttccacatggctgactacgaggcttctgggcctttacgccaatcactcaaatcactcatctatgctgcaggagataactggctgcaggagataacgctggcgggaataccacatgctattctattcaaactcgccctcaggctgatgatggtcagctga

SEQ ID NO: 18051 - DNA, 2058 bp, Homo sapiens
  SIMILAR (1)..(2055): 1001254mologous to Homo sapiens RING finger protein; FXY2,accession number AF196481,Smith-Waterman Score=3644.
atggaaacactggagtctgaattgacctgtccaatctgcctagagttgtttgaagacccccttctgctcccttgtgctcacagcctctgcttcagctgtgcccatcgcattttggtatcaagctgcagctctggtgaatccattgaacccattactgctttccagtgtcctacctgcaggtatgttatctcgctgaaccaccggggcctggatggcctcaagaggaatgtgactctgcagaacattattgatcgcttccagaaggcttcagtcagtgggcccaattcccctagtgagagccgccgggaaaggacttacaggcccaccactgccatgtctagcgagcgaattgcttgccaattctgtgagcaggacccgccaagggatgcagtaaaaacatgcatcacctgtgaggtctcctactgtgaccgttgcctgcgggccacgcaccccaacaagaaacctttcaccagccaccgcctggtggaaccagtgccagacacacatcttcgagggatcacctgcctggaccatgagaatgagaaagtgaacatgtactgtgtatctgatgaccaattgatctgtgccttatgcaaactggtgggtcgtcaccgagaccatcaggtcgcatccctgaatgatcgatttgagaaactcaagcaaactctggagatgaacctcaccaacctggttaagcgcaacagcgaactagaaaatcaaatggccaaactaatacagatctgccagcaggttgaggtgaatactgctatgcatgaggcaaaacttatggaagaatgtgacgagttggtagagatcatccagcagaggaagcaaatgatcgctgtcaaaatcaaagagacaaaggttatgaaactgagaaagttggcacagcaggttgctaattgccgccagtgtcttgaacggtcaacagtcctcatcaaccaagctgagcatatcctgaaagaaaatgaccaggcacggtttctacagtctgcaaaaaatattgctgagagggtcgctatggcaactgcatcttctcaagttctgattccagacatcaattttaatgatgcctttgaaaactttgctttagatttttccagagaaaagaaactgctagaggggttagattatttaacagccccaaacccaccatctatccgagaagaactctgtactgcctcccatgacaccattacagtccactggatctcggatgatgagttcagcatcagctcctatgagcttcagtacaccatattcactggccaggctaacttcatcagcctgtataattcagtagacagctggatgattgttcccaacattaaacagaaccattacacagtgcatggactccagagcgggactcgctacatcttcatcgttaaagccataaaccaagccggcagccggaacagtgaacctacccgactaaaaacaaacagccaaccctttaaattggatcccaaaatgactcacaagaagttgaagatctccaatgatggattgcagatggagaaggatgaaagctctctaaagaagagccacaccccagagaggtttagtggcacagggtgctatggggcagcaggaaatatattcattgacagtggctgccactattgggaggtggtcatgggttcctcaacatggtatgcaattggcattgcctacaaatcagctccaaagaatgaatggattggcaagaatgcctcctcatgggtcttctctcgctgcaatagtaacttcgtggtgagacacaacaacaaggaaatgctggtggatgtgcccccacacctgaagcgtctgggtgtcctcctggattatgacaacaatatgctgtctttctatgacccagctaactctctccatcttcatacttttgatgtgaccttcattcttccagtttgtccaacatttacaatctggaacaaatccctaatgatcctgtctggcttgcctgccccagattttattgattaccctgagcggcaggaatgcaactgcaggcctcaagaatccccttatgtttctgggatgaaaacctgtcattaa

SEQ ID NO: 18052 - DNA, 2237 bp, Homo sapiens
  SIMILAR (90)..(2234): 991254mologous to Homo sapiens midline 2 protein,accession number Y18880,Smith-Waterman Score=3810.
ggaggagatggctggcacctgggaacgctatgggtgaaagcccagcctccgtggttcttaatgcctcaggaggactattttcactaaagatggaaacactggagtctgaattgacctgtccaatctgcctagagttgtttgaagacccccttctgctcccttgtgctcacagcctctgcttcagctgtgcccatcgcattttggtatcaagctgcagctctggtgaatccattgaacccattactgctttccagtgtcctacctgcaggtatgttatctcgctgaaccaccggggcctggatggcctcaagaggaatgtgactctgcagaacattattgatcgcttccaaaaggcttcaatcagtgggcccatttcccctagtgagagccgccgggaaaggacttacaggcccaccactgccatgtctagcgagcgaattgcttgccaattctgtgagcaggacccgccaagggatgcagtaaaaacatgcatcacctgtgaggtctcctactgtgaccgttgcctgcgggccacgcaccccaacaagaaacctttcaccagccaccgcctggtggaaccagtgccagacacacatcttcgagggatcacctgcctggaccatgagaatgagaaagtgaacatgtactgtgtatctgatgaccaattgatctgtgccttatgcaaactggtgggtcgtcaccgagaccatcaggtcgcatccctgaatgatcgatttgagaaactcaagcaaactctggagatgaacctcaccaacctggttaagcgcaacagcgaactagaaaatcaaatggccaaactaatacagatctgccagcaggttgaggtgaatactgctatgcatgaggcaaaacttatggaagaatgtgacgagttggtagagatcatccagcagaggaagcaaatgatcgctgtcaaaatcaaagagacaaaggttatgaaactgagaaagttggcacagcaggttgctaattgccgccagtgtcttgaacggtcaacagtcctcatcaaccaagctgagcatatcctgaaagaaaatgaccaggcacggtttctacagtctgcaaaaaatattgctgagagggtcgctatggcaactgcatcttctcaagttctgattccagacatcaattttaatgatgcctttgaaaactttgctttagatttttccagagaaaagaaactgctagaggggttagattatttaacagccccaaacccaccatctatccgagaagaactctgtactgcctcccatgacaccattacagtccactggatctcggatgatgagttcagcatcagctcctatgagcttcagtacaccatattcactggccaggctaacttcatcagtaagtcatggtgtagttggggcctgtggccagagataaggaaatgtaaggaagcagtaagctgctcaagattggccggggcgccacgaggcctgtataattcagtagacagctggatgattgttcccaacattaaacagaaccattacacagtgcatggactccagagcgggactcgctacatcttcatcgttaaagccataaaccaagccggcagccggaacagtgaacctacccgactaaaaacaaacagccaaccctttaaattggatcccaaaatgactcacaagaagttgaagatctccaatgatggattgcagatggagaaggatgaaagctctctaaagaagagccacaccccagagaggtttagtggcacagggtgctatggggcagcaggaaatatattcattgacagtggctgccactattgggaggtggtcatgggttcctcaacatggtatgcaattggcattgcctacaaatcagctccaaagaatgaatggattggcaagaatgcctcctcatgggtcttctctcgctgcaatagtaacttcgtggtgagacacaacaacaaggaaatgctggtggatgtgcccccacacctgaagcgtctgggtgtcctcctggattatgacaacaatatgctgtctttctatgacccagctaactctctccatcttcatacttttgatgtgaccttcattcttccagtttgtccaacatttacaatctggaacaaatccctaatgatcctgtctggcttgcctgccccagattttattgattaccctgagcggcaggaatgcaactgcaggcctcaagaatccccttatgtttctgggatgaaaacctgtcattaa

SEQ ID NO: 18053 - DNA, 822 bp, Homo sapiens
  SIMILAR (612)..(232): 671254mologous to Homo sapiens subunit of the dimeric cap binding complex CBC,accession number X84157,Smith-Waterman Score= 436.
tcacttggcctgagtccctgcggattggacttccatagatttgaaacttcctccgggtaccacaagcatcaggcctgtgattaagagcaaagagcggccaactattgtaactcttattcccaaggccctgtgggtcctatatgtgccctgcaacttggggaaaatggaggtggggttgtggtctctatgctgtagcagccggaaagccaaaaacaagccgtacttctcgctctgacccccagatttaccgcgaccatactgttgaccctctctaaaaccgacatcccaatcagtgcagataatccattcatctaggcaggtcccagttagaaaccgcatggcattttcagcatcagctctgttatggcattctacaaagcaaaaaccacatgctgttttctttattttatccaggcccataaagatattcctgatatcacatctactaaagagttaatgtattttctcttcggttgtataaaaggaaagattccccatattcaatgtggagctttccttcagtaatttttcctgctgaaatttacggccactgaactgatggtcccggtagcagctcagctccaaagcagggtctttacatagaattttcaggtctttggacatggtgctggttgggcagcatgccgatggccgttttcggtccagcttggcagcagtgacaccaccactgaaaaccttgggatcctgtcaagagcgagaagtacggcttgtttttggctttccggctgctacagcatagagaccacaaccccacctccattttccccaagttgcagggcacatataggacccacagggcct

SEQ ID NO: 18054 - DNA, 2154 bp, Homo sapiens
  SIMILAR (1231)..(1887): 891254mologous to Homo sapiens midline 2 protein,accession number Y18880,Smith-Waterman Score=1048.
gttttcagtggtggtgtcactgctgccaagctggaccgaaaacggccatcggcatgctgcccaaccagcaccatgtccaaagacctgaaaattctatgtaaagaccctgctttggagctgagctgctaccgggaccatcagttcagtggccgtaaatttcagcaggaaaaattactgaaggaaagctccacattgaatatggggaatctttccttttatacaaccgaagagaaaatacatgaactctttagtagatctgatatcaggaatatctttatgggcctggataaaataaagaaaacagcatgtggtttttgctttgtagaatgccataacagagctgatgctgaaaatgccatgcggtttctaactgggacctgcctagatgaatggattatctgcactgattgggatgtcggttttagagagggtcaacagtatggtcgcggtaaatctgggggtcaggcttggagtaaatttctggcctggagctatagattcaggtgtcatcaggatgagggtaaaaatggaagcatccacattttaggggctgatgatgaaggaggatcacacaaaggacaaagtaagaacagactccttggagccttaatatgcgaatgtgtatcgcccagaggcctaggaggactaaatggtttcctgggccagggccagggcccctgctgccctgcacagccttgggaccctgctccctgcatcttagctgctccatctccagctgtggctcagaggggcccaagtacagctcaggtcactccttcagagggtgcaagctgctccttgctcgtaattgtttttgaaaagcggcagcggcggcgaaggcgggcggcggcctacagtggtagcggcggcggcggcgaccggggcccgggagctcgcgccggagcccgagccaacccgctgcggaggcagacgagagcccagcgccctcgagcgagcggaggagatggctggcacctgggaacgctatgggtaaaacgcgccccctcgccgcggccctggaggtcgagcgtcgtagccctcgcagggctagtctccggctccggccgcttttcaggtcagactccgctggttgatgaacggcatccccagtctctggatcatcgtcttactgagaccgaacaatctgataacaaacccatcatacaatctgaaatcgtcctgaaacatgaaatcccagtatttgcaatttgcctggataggagcataatcctctgcttcagctgtgcccatcgcattttggtatcaagctgcagctctggtgaatccattgaacccattactgctttccagtgtcctacctgcaggtatgttatctcgctgaaccaccggggcctggatggcctcaagaggaatgtgactctgcagaacattattgatcgcttccagaaggcttcagtcagtgggcccaattcccctagtgagagccgccgggaaaggacttacaggcccaccactgccatgtctagcgagcgaattgcttgccaattctgtgagcaggacccgccaagggatgcagtaaaaacatgcatcacctgtgaggtctcctactgtgaccgttgcctgcgggccacgcaccccaacaagaaacctttcaccagccaccgcctggtggaaccagtgccagacacacatcttcgagggatcacctgcctggaccatgagaatgagaaagtgaacatgtactgtgtatctgatgaccaattgatctgtgccttatgcaaactggtgggtcgtcaccgagaccatcaggtcgcatccctgaatgatcgatttgagaaactcaagttttctcttcaccaatatttgaaaggagctaacaatcgtttgtttgagaacaatttacaaaatgttgacacagagattgttcttgggtggatagaaatcctgtctgttattgttgggcaaagaaacatattacagaaatataatatagcagatatctccattccaatctcccctgccactttggctctcttgctgtcacggtttaactgtcctgagaaagttgcactaaccgggcttgaacataaggaacctggcccagtcattaactacattgcacaggagcagagcaaaacacaccaatatttcaaaactgaacaacaacgaagagacatgtttacttttatatag

SEQ ID NO: 18055 - DNA, 1215 bp, Homo sapiens; identical to SEQ ID NO: 6269
  SIMILAR (727)..(1203): 811254mologous to Homo sapiens NAG13,accession number AF194537,Smith-Waterman Score=629.

SEQ ID NO: 18056 - DNA, 597 bp, Homo sapiens
  SIMILAR (139)..(273): 1001254mologous to Homo sapiens Human PRO1012 protein sequence,accession number Y41758,Smith-Waterman Score=243.
atggaacctactcctggtgaagatcctgtaaacaatgttgatatgacaacaaaggatttagaatattacataaacttggttgataaaacagcagcagggtttgaggccagttttgactccaattttgaaagaagttctacttggagagactttgctaaagaagtggatgggttacttcgaattggagctgttaactgtggtgatgatagaatgctttgccgaatgaaaggagtcaacagctatcccagtctcttcatttttcggtctggaatggatggtcttgttaatgtaggatggatggactgtgccacccaggataacctttgtaaaagcttagatattacaacaagtactactgcttattttcctcctggagccactttaaataacaaagagaaaaacagtattttggaagagctaggcagaggaggacaaaaaagggagagaaagatgcccaaatttactgaggaaaaaaaaaggcacaggaaaggaagtgaggaaggccaaaggaaagatgacaaggaggattacgatgttccattagcggaagaattgagtctaacttcacacacttctcttgcagataaactggtttga

SEQ ID NO: 18057 - DNA, 1380 bp, Homo sapiens
  SIMILAR (490)..(1377): 581254mologous to Homo sapiens p40,accession number U93567,Smith-Waterman Score=758.
atggcaagtgatggcaatgcgaaagcttgcgccttgcatttacctggcgctttcacctgcccggtagctcgggccacgggcagttcggccacacccacgctgagaacaacccctgggcgagaaacatcttatcccaaagagttgattgagactatgccctctctttttctgatgggtgttttcttgtgtggatactcgttaatctctacatcattatatttttcaaagacattaactggactgatcaacgtgggcagtatagattgccaacagtatcattctttttgtgcccaggaaaacgttcaaagataccctgagataagattttttcccccaaaatcaaataaagcttatcattatcaatttttacctcaagtatccacagatctaacacctcagactttcagtgaaaaagttctacaagggaaaaatcattgggtgattgatttctatgctccttggtgtggaccttgccagaattttgctccagaatttgagctcttggctaggtcaggtaatactgatgaagaggctagcttcactgggaaaacaagacaaaacattacgtcagaggaggaggaacaggaacgcagctcctcaccagcaacgaaacaaagctggacggagaatgactttgatgagttgagagaagaaggtttcagacaattaaacttctccaagctgaaggaagttcgaacccatcgcaaacaagttaaaaaccttgaaaaaagattagacgaatggctaactagaacaaccaatgcagagaagtccttaaaggacctgatggagctgaaaaccatggcacaagaactatgcgatgaatgcaaaagcttcgtagccgattcgatcaactggaaaaaaggggagaatggaaccaagttggaaaacattctgcaggatattatccaggagaacttccccaacctagcaaggcaggccaacattcaaattcaggaaatacagagaatgcaacaaagatactccttgagaagagcaactccaagacacaaaattgtcagattcaccaaagttgaaatgaaggaaaaaacattaaggggagccagagagaaagatccggttacccacaaagggaagcccatcagactaacagctgatctctcggcagaaactctacaagccagaaaagagtgggggccaatatacaacattcttaaagaaaacaattttcaacccagaagttcatatccagccaaactaagcttcataagtgaaggagaaataaaatactttacacacaagcaaatgccgagagattttgtcaccactaggcctaccctacaagagctcctgaaggaagcactaaacatggaaaggaacaaccggtatcagccactgcaaaaacatgccaaattgtaa

SEQ ID NO: 18058 - DNA, 692 bp, Homo sapiens
  SIMILAR (465)..(692): 861254mologous to Homo sapiens Human PRO1012 protein sequence,accession number Y41758,Smith-Waterman Score=343.
atgaggagcgtggaccgtccggattcccggtcgacccacgcgtccgagaccggcgcgtgaggaacctaccggtaccggccgcgcgctgtgtattcgccggtgtggctgcacctcaccaatcccgtgcgccgcggctgggccgtcggagagtgcgtgtgcttctctcctgcacgcggtgcttgggctcggccaggcggggtccgccgccagggtttgaggatgggggagtagctacagggaagcgaccccgcgatggcaaggtatatttttgtggaatgaaaaggaagtattagaaatgagctgaagaccattcacagattaatattgttggggacagatttgtgatgcttgattcaccccttgaagtaatgtagaacggaattctcaaatatgcatattacatcaactggaaccagcagtgaatcttaatgttcacttaaatcagaacttgcataagaaagagaatgggagtctggttaaataaagatgactatatcagagacttgaaaatgatcattctctgttgtctgatagtgtatatggccatattagtgggcacagatcatgattattacagtttactcggagtgtccaacactgcaagcagtagagatataagacaagctttcaagagattggcatcgaagttacatcctgataaatacccgaataacccatatgcacatggcgat

SEQ ID NO: 18059 - DNA, 1311 bp, Homo sapiens
  SIMILAR (2)..(919): 961254mologous to Homo sapiens Human PRO1012 protein sequence,accession number Y41758,Smith-Waterman Score=1577.
ccagcatgttagaagtacagtgacagaactttggacaggaaattttgtcaactccatacaaactgcttttgctgctggtattggctggctgatcactttttgttcaaaaggaggagattgtttgacttcacagacacgactcaggcttagtggcatgttgtttctcaactcattggatgctaaagaaatatatttggaagtaatacataatcttccagattttgaactactttcggcaaacacactagaggatcgtttggctcatcatcggtggctgttattttttcattttggaaaaaatgaaaattcaaatgatcctgagctgaaaaaactaaaaactctacttaaaaatgatcatattcaagtagacaggtttggctgttcctctgcaccagacatctgtagtaatctgtatgtttttcagccgtctctagcagtatttaaaggacaaggaaccaaagaatatgaaattcatcatggaaagaagattctatatgatatacttgcctttgccaaagaaagtgtgaattctcatgttaccacgcttggacctcaaaattttcctgccaatgacaaagaaccatggcttgttgatttctttgccccctggtgtccaccatgtcgagctttactaccagagttacgaagagcatcaaatcttctttatggtcagcttaagtttggtacactagattgtacagttcatgagggactctgtaacatgtataacattcaggcttatccaacaacagtggtattcaaccagtccaacattcatgagtatgaaggacatcactctgctgaacaaatcttggagttcataaaggatcttatgaatccttcagggggctcccttacacccaccaccttcatcgaactagttacccaaagaaaacacaccgaagtccggattggtgattccattgtccggggtggcctccctggccacgcttatggccaatggcaaagaagccccgcaatcttctgccctgatcatcgcgtccgttaaacacctagtcctctctcttttgctcctcgaaccaaccggatctccgtggtccgcttctccaccgtcccctgagtctcccccgccgataccgtggggcacaggttcccaaccccgacttcggtcattactccgtcagtccctcattaatccacggcctccaccagtgctctcacctcttctcccattctcctccccctcgtgtcctccggcccccacgaatcctcactacctcgacgggccttcccccgtctccgcgtcgctccgctacggatgtgcatacagcgtatcccccaacggcagac

SEQ ID NO: 18060 - DNA, 927 bp, Homo sapiens
  SIMILAR (379)..(543): 1001254mologous to Homo sapiens Human PRO1012 protein sequence,accession number Y41758,Smith-Waterman Score=311.
atgctccgcgccaggccccgccccggctcgccgtggagaccggcgcgtgaggaacctaccggtaccggccgcgcgctggtagtcgccggtgtggctgcacctcaccaatcccgtgcgccgcggctgggccgtcggagagtgcgtgtgcttctctcctgcacgcggtgcttgggctcggccaggcggggtccgccgccagggtttgaggatgggggagtagctacaggaagcgaccccgcgatggcaagtgatggcaatgcgaaagcttgcgccttgcatttacctggcgcttccacctgcccggtagctcgggccacgggcagttcggccacacccacgctgagaacaacccctgggcgagaaacatcttatcccaaaaataacccaaatgcacatggcgattttttaaaaataaatagagcatatgaagtactcaaagatgaagatctacggaaaaagtatgacaaatatggagaaaagggacttgaggataatcaaggtggccagtatgaaagctggaactattatcgttatgattttggtaaggatggtcttgttaatgtaggatggatggactgtgccacccaggataacctttgtaaaagcttagatattacaacaagtactactgcttattttcctcctggagccactttaaataacaaagagaaaaacagtattttgtttctcaactcattggatgctaaagaaatatatttggaagtaatacataatcttccagattttgaactactttcggcaaacacactagaggttggcaggtttgactgttcctctgcaccagacatctgtagtaatctgtatgtttttcagccgtctctagcagtatttaaaggacaaggaaccaaagaatatgaaattcatcatgaatatttagcaaactccaaattgcctttcaaaacttaa

SEQ ID NO: 18061 - DNA, 1257 bp, Homo sapiens
  SIMILAR (97)..(44): 501254mologous to Homo sapiens Human secreted protein, SEQ ID NO: 4409,accession number G00328,Smith-Waterman Score=49.
tctgcatgacttcgcgacgagatggcctcggagttgggtgccagggatgatggaggctgcactgagctggcaaagcccctctatcttcagtacttggagagggccctccggttggaccattttctgcgactaacgtcagctatcttcaataggaatatttctagtgatgacagtgaagatggactggatgacagtaatccattattgccccagtctggggatcccttaatacaagttaaggaagaacctccaaattcattgcttggtgaaacttctggagcaggcagttctggaatgttaaacacatattctctgaatggagttctacagtcagaatcaaaatgtgataaggggaatttatataatttctctaagctgaagaaaagcagaaagtggctaaagagcattctgctaagtgatgaatccagcgaggctgattctcagagtgaagacgatgatgaagaagaactcaatctcagcagagaagaacttcacaacatgcttcgactacacaaatataagaaacttcaccaaaataagtatagtaaagacaaggagcctgcgggaacaaatatcccaggatcccgggcggtttcgattgacgttacttccgggaaaagtaaccttgcatcggcggttgcgggcctggaaagctctcgcgacattttctcctgcgagatctgcttgctcactgtagcgatgacaccctcctcctcctccccgccgcctttcggcaatcttcgccagtcccagtcccgactaatctgtactcagatggcatggatcagggtctcccctcgaaccccggttcgcacggggcgtcaggtggcagcggcggggtgcgagctgcgcgaggccgacggcagcggcactacgggtgggcacgggcaggcgacgagcattgaatgtgggcggggtggggatactccatatcaagaagcagaatgtcctgagtgtggcagcagaaggagcgaatgtatgtcgccatggcaaactgtgctggctgcagcccttatggagggcatggacattcacatcccccatcaacaaggaagacgaagtccaagcatgccgaacatggaggaccacccatgttcgatggaaaatttcagcaacttaccgcacgctgaggaacaccggacattgttcgctgatctgatgaagattgatcggtggatggatcgaatgttgcccctctttactctaccaatctttgctggcaactcggacaatattcttttatgcattcctttttag

SEQ ID NO: 18062 - DNA, 621 bp, Homo sapiens
  SIMILAR (268)..(387): 551254mologous to Homo sapiens lymphocyte activation- associated protein,accession number AF123320,Smith-Waterman Score= 104.
atggtcctcaccaggtatgtcttctcaagcttggattcccagcctctggaaatacactctaatgaggagacccagaaccccagcaactgggagtctaagcccctggtcaccacactttctcaggccatggctgctaaattagtcaatttatccttgaaactggcaagagagtatcaagacacaccaaagtgtattatttgggtgccaaacatgctcttccctgcatacaccagcatggtggcaatattgaagatgtcagtctgcatccccagtgttgcatactggtccctggttccagatagagacactgaggacggtaaagatcacctgggtaccatcgagcagaccatccaaaggcaaaactccttatctgagaaatttagaaatataatgaaaagaacaaagaccacctgctgggcatcaagcagaccatccagaattccacgtggctggggaagcctcacaatcatggcagaaggcaaggaggagcaagtcctgtcttacatgatggcagcaggcaaagagagaatgaggaagacgcaaaagcggaaactcctgataaaaaccatcagatctcgtgagacttattcactaccacaagaacaacatgggggacattga

SEQ ID NO: 18063 - DNA, 549 bp, Homo sapiens
atggcggctccgatgactcccgcggctcggcccgaggactacgaggcggcgctcaatgccgccctggctgacgtgcccgaactggccagactcctggagatcgacccgtacttgaagccctacgccgtggacttccagcgcaggatgttttggatgttccttcccttctttaccttggccttttccccttctgtattagtccgttttcatgctgctgataaagacatacctgagactgggcaatttacaaaaggaagaggtttattggacttacagttccaagtggctgaggatgcctcgcaatcatggcagaagctgtatctcttgcctaattgctctggccaaccacaccaaaaattggttcccacagcgcagaagttttatatcacagtggaatggggtacttttttctcagtgcctggccaagttgtgggctctgaaggaagtcagatgtcagtgactgtagaaggcagtgaagaatctgaagatgacaagatgtacatgacctgctcttctgcactactagattcatttgccctttgcagctga

SEQ ID NO: 18064 - DNA, 585 bp, Homo sapiens
  SIMILAR (334)..(465): 711254mologous to Homo sapiens Human secreted protein, SEQ ID NO: 7513,accession number G03432,Smith-Waterman Score=156.
atggctgctgcagatagagtagagtggagctctgtagaactaccccagtccctcactaagcaaagaatgaagaagatgagcaacatttatgagtccgctgccaacacactgggaatctttaacagcccctgcctgaccaaagttgagctgcgtgtggcgtgcaaaggcatttctgacagagatgccctttccaaaccagacccctgtgtcatcctcaagatgcagtctcatgggcagtggtttgaggtagcaagaggaccaggaacagacgtgaacccagaccccagactgggccgggatgagagaactgagattcagagatgtcataataatatttctgtattagtctgttttcatgctgctgataaagacatacctgagactgggcaatttacaaaagaaagaggtttaattggacttacagttccacgtggctggggaagcctcacaatcatggcagaaggcaaggaggagcaagtcacatcttacatggatggtggcaggcaaagagagaatgacgaagacgcaaaagcagaaaccctagataaaaccatcagatcttgtgagacttattcactaccatga

SEQ ID NO: 18065 - DNA, 1581 bp, Homo sapiens
  SIMILAR (643)..(1035): 351254mologous to Homo sapiens nuclear matrix protein NRP/B,accession number AF059611,Smith-Waterman Score=257.
atgcccgacactgtgctaagcactggctgcgtgaagccttcacatttccgtgagacagaccaatcatttgtttctggaacaagaggtgctgtcaggaaaacagttggcattaagtcaaggaaaggtgaaagaaagcccaactccatcacctccaagcactctgaagccttggggtgggtctgggagaagcttctgacatccccaggtctggagcccatgggcccgggcactgtctgtgccagccccaggtccaagacaccgggcacagaaatgttgaaggaattgaaccagcaacgcagagcgaaagcgtttacagacctgaaaattgttgttgaaggcagagagtttgaagtccaccaaaatgttctagcttcctgcagcttgtatttcaaggacctgattcaaagctctgacacctccgggggatgggcagaggatgggcaggaccaggacggaaaggcaagcaccaggacccaaggaggtgaggtgtcacgggcatcagaggtcacgggcatcagaggtcacagggaggagagcaggtccacaggccagtgtcgggagagctggggagatgagcagttgaccatctggtccgtgcaagacagcggccagggcggccgggagaagctggagctcgtcctgtcgaacctgcaggcagacgtcctggagttgctgctggagtttgtctacacgggctccctggtcatcgactcggccaacgccaagacactgctggaggcggccagcaagttccagttccacaccttctgcaaagtctgcgtgtcctttctcgagaggcagctgacggtcagcaactgtctgggcgtgctggccatggccgaggccatgcagtgcagcgagctctaccacatggccaaggccttcgcgctgcagatcttccccgaggtggccgcccaggaggagatcctcagcatctccaaggacgacttcatcgcctacgtctccaacgacagcctcaacaccaaggctgaggagctggtgtacgagacagtcatcaagtggatcaagaaggaccccgcgacacgcacacaggaggaagaccctggaagaaccaggtctgcccctggttctctgggcccacccctcctgcccaacctggcccgggttgtgcctggtctccctgcgtcccaggccaatccctcctcctgggtgtgtgatctttgcctgctgaatcctgtcttccagttagcccgcgagctcaggataagcaacttctgcaacctgctggcttttggccttggtccccgagaaagactgagaggaactgctctcttcccacaggcctgtgacagcaacttttcaagcatagaaatctctgggcccctggagacaacacatccctccaagccctgcgcccctggtggcaatccagcccttcaagctgtaacacaagaccaagaactctacagggacaagcccagcatctgcatgggccgcactgggccagctcttaagcctctccaagcttgcccatgtggtgcacgctgccagcctctgggatcagagcagcacatcccaccgggagccctctgtactcagtggcagctccacaaggaatga

SEQ ID NO: 18066 - DNA, 1293 bp, Homo sapiens
  SIMILAR (583)..(1239): 991254mologous to Escherichia coli K12 alkyl hydroperoxide reductase, F52a subunit; detoxification of hydroperoxides,accession number AE000166,Smith-Waterman Score=1111.
atgatttccgcacttgtatggaatcttaattacgcattgcacggcgttccccactcgcggcagcaggcgtcatacagccagtcacgcgccgcaacaatcatcgagctcgaagttgtaatcgttaacgcctggctgaaagataaaagttaccagattgtcgacattacccatgctatccaaaagcgcgtcgataactggcgttacgtgacctggcagatctacgacaacattgccgcgacgacctccccctcctccggcgaaggtttacaagagacgcgcctgaaacaggatgtctactatctggagaaaccacgccgcaaaacggaagcgttaatctttggctctcacgacaactcaacgcttgagatgactcagcggatgtccacttatctggatacattgtctgctttcaccatacgctgtctcgcactcacccgtcactattgtaaactcccggatcacaggcatccccttctctacgcgaatactcggaatcacctatttcttcggttcttcgtcaccggattttcttccccgcaccatgaggcaagctgcatccaggtagccccagaggccgcttgcatgatgatgtttaaagcccaggagataaacatgctcgacacaaatatgattactcaactcaaggcttaccttgagaaattgaccaagcctgttgagttaattgccacgctggatgacagcgctaaatcggcagaaatcaaggaactgttggctgaaatcgcagaactgtcagacaaagtcacctttaaagaagataacagcttgccggtgcgtaagccgtctttcctgatcaccaacccaggttccaaccaggggccacgttttgcaggctccccgctgggccacgagttcacctcgctggtactggcgttgctgtggaccggtggtcatccgtcgaaagaagcgcagtctctgctggagcagattcgccatattgacggtgattttgaattcgaaacctattactcgctctcttgccacaactgcccggacgtggtgcaggcgctgaacctgatgagcgtactgaacccgcgcatcaagcacactgcaattgacggcggcaccttccagaacgaaatcaccgatcgcaacgtgatgggcgttccggcagtgttcgtaaacgggaaagagtttggtcagggccgcatgacgttgactgaaatcgttgccaaaattgatactggcgcggaaaaacgtgcggcagaagagctgaacaagaccccgaaaaggccggaagatacttgcccgcaacgaagattccttcataaccgg

SEQ ID NO: 18067 - DNA, 1470 bp, Homo sapiens
  SIMILAR (386)..(853): 1001254mologous to Escherichia coli Alkyl hydroperoxide reductase F52a protein (EC 1.6.4.-) ,accession number D90701,Smith- Waterman Score=818.
ctccggcggcccagtcaatacccacctgaatgatgctaagcccgatagaagtaataaccacaccggtaaccagtggcgggaataaaggcatcaagcgaccgataagtggcgctaataatgtggtgataaaacccgcggcgatagtggcaccaaatatccccagcaggccgatatccgggttcatcccaatggctatcattggtgttacagcagcaaaggtcaccgacataatcaccggcaggcggatccccataaagcggccgataccgatacattgcaataatgtgacgatcccgcagcaaaagagatccgagctaatgagcatcgcaatagcttcttttgagaggcccagtcggtcaccaatcataagaggaacagcgactgcacctttaaagaagataacagcttgccggtgcgtaagccgtctttcctgatcaccaacccaggttccaaccaggggccacgttttgcaggctccccgctgggccacgagttcacctcgctggtactggcgttgctgtggaccggtggtcatccgtcgaaagaagcgcagtctctgctggagcagattcgccatattgacggtgattttgaattcgaaacctattactcgctctcttgccacaactgcccggacgtggtgcaggcgctgaacctgatgagcgtactgaacccgcgcatcaagcacactgcaattgacggcggcaccttccagaacgaaatcaccgatcgcaacgtgatgggcgttccggcagtgttcgtaaacgggaaagagtttggtcagggccgcatgacgttgactgaaatcgttgccaaaattgatactggcgcggaaaaacgtgcggcagaagagtccgcacgtaaaggcatccgtaccggtctgatgggcgaacgttttggtggtcagatcctcgataccgttgatatcgaaaactacatttctgtaccgaagactgaagggcagaagctggcaggcgcactgaaagttcacgttgatgaatacgacgttgatgtgatcgacagcacgggtacgagatcgagtgtatctctggattttttcacacttacgattccaatagccccacagcccgttgtgccccgacatagcagaattgcgcccccagccccagtggcgaatacgcgccaggcgagaaagcgatgcggagaacgatccttgtttggcgtcactgtgattatcactctgcaatgccgggaatttcgtcagcatgatcagcagggcgaccagtaacacgatagccacgatgatcatataaggtgtctgtaccgataataccaggctgtgtttatacgcactcaattgctctggagacattttatcgagaacgtcttgcgattgatgtggcacgttagacaaaataagactttgcccaaagacaaccgcgataattgcgccaaacgagttaaatgtttgcgcaagatttaagcggaagtgaccactactttccggcc

SEQ ID NO: 18068 - DNA, 1561 bp, Homo sapiens
  SIMILAR (799)..(1560): 961254mologous to Escherichia coli Alkyl hydroperoxide reductase F52a protein (EC 1.6.4.-) ,accession number D90701,Smith- Waterman Score=1257.
atgaccagcaatagtgtacatagctggtgtcgatcaggtcagcaggtacccagagatgaagagatgaccactttctccaaggccagccagtcagcatgcagggccatcagcatgggctggggcctcgggcgagctcgccacccagatccttgctgcccaggagaacagggcacggagcctgagatagacctagtgttctgctccccagagacccgagagccaagccccaaactggttgcctctgggaacgagggccggaggcgggttccctccctcggcaagatgccggagtgctgggatggggtgagtgagggcgctgcgggcatcaagccctggtgtggcctcctcatcccctgggtggtgcaatcagccgcatggctcaccctaaggctcattacctgggctctcctggaggacaacagggaaataaaaagggcctgcaagtcaaagagtgttctccagggtagagcctttggccaccaggaacatgacatcgagacaccctacggccttctgcatgtagtgatccggggctcccccaaggggaaccgcccagccatcctcacctaccatgatgtgggcctcaaccgcctcgggcgagctcgccacccagatccttgctgcccaggagaacagggcacggagcctgagatagacctagtgttctgctccccagagacccgagagccaagccccaaactggttgcctctgggaacgagggccgggtgggtctacaggaggtgggcatgtcaatgtcagcaagctgcctcctagccccgcttcctctccctggtggcctggagcccctggcagcaggaggatccccagtcacctttaaagaagataacagcttgccggtgcgtaagccgtctttcctgatcaccaacccaggttccaaccaggggccacgttttgcaggctccccgctgggccacgagttcacctcgctggtactggcgttgctgtggaccggtggtcatccgtcgaaagaagcgcagtctctgctggagcagattcgccatattgacggtgattttgaattcgaaacctattactcgctctcttgccacaactgcccggacgtggtgcaggcgctgaacctgatgagcgtactgaacccgcgcatcaagcacactgcaattgacggcggcaccttccagaacgaaatcaccgatcgcaacgtgatgggcgttccggcagtgttcgtaaacgggaaagagtttggtcagggccgcatgacgttgactgaaatcgttgccaaaattgatactggcgcggaaaaacgtgcggcagaagagctgaacaagcgtgatgcttatgacgtattaatcgtcggttccggcccggcgggtgcagcggcagcaatttactccgcacgtaaaggcatccgtaccggtctgatgggcgaacgttttggtggtcagatcctcgataccgttgatatcgaaaactacatttctgtaccgaagactgaagggcagaagctggcaggcgcactgaaagttcacgttgatgaatacgacgttgatgtgatcgacagccagagcgccagcaaactgg

SEQ ID NO: 18069 - DNA, 1401 bp, Homo sapiens
  SIMILAR (1087)..(1341): 961254mologous to bacteriophage lambda Rz (cell lysis;153),accession number J02459,Smith-Waterman Score=420.
atgactgccttcggggggagactgctgcagcatgccgggaatatgaggatcccatcacaaattgagtggcataacctgcgcactgaccgcaagggcaacgccaaaagcgcccttgcgctgattggcaccgatacgctggcgggcgataactgccagttactgatttccggggccgacgaacaggaagcgcaccagcgtttaagccaatggctgcgcgatgaattcccccactgcgatgcgccgctggcggaagttaaatctgacgaactggaaccactgccggtttcactgaccaatctgaatccgcaaattatccgcgcccgcaccgtgtgcagcggtagtgcaggcggcattctgacgccgatctcttctttagatctcaatgcgctgggtaatcttcccgcagccaaaggcgttgacgccgagcaatccgcactggaaaacggcctgacgctggtactgaaaaacattgagtttcgtctgctggatagcgacggtgctaccagcgcgattctggaagctcaccgatccctggctggcgatacttccctgcgcgaacatttactgccagtcggacaatgcgccaacgccgccagcagcacgaatcacccgttcgttactaaaaaacggcagcaatgttttgtcttccgccagcggctggcgaacggcaggaacgactccggatggcagattacgcatgctttttggttccggttccaccagcactcgaggattatgaaatatctgtatggattcacggcccggcttaaggagcaccagcccaagctcaggcaccagaacagcatagaggcatcttcacaaaattttacgcattcttcgatgtcatcatcagatccttcggataatagtctcccctatttaaccgcgacgattgaacaacgaggaccacaaacggctgatgagctggctacattgtttggtaccacatcacgcaaagtggcttcaacgctggcaatggcaatcagcaaaggtcgtctgattcgcgtaaatcagggcggtaaatttcgttactgcataccgggcgataatttaccagcagagccgaaagcagcatcggtatctccgctctgcctgtcatgggcggtcaatcattaccgtgataacgcaatcgcctacaaagtccagcgcgacaaaaatgccagagaactgaagctggcgaacgcggcaattactgacatgcagatgcgtcagcgtgatgttgctgcgctcgatgcaaaatacacgaaggagttagctgatgcgaaagctgaaaatgatgctctgcgtgatgatgttgccgctggtcgtcgtcggttgcacatcaaagcagtctgtcagtcacctccccccgactggcagacaccgctgaacgggattatttcaccctcagagagaggctga

SEQ ID NO: 18070 - DNA, 933 bp, Homo sapiens
  SIMILAR (309)..(43): 831254mologous to bacteriophage lambda Rz (cell lysis;153),accession number J02459,Smith-Waterman Score=370.
ttagagtgacatcgccatcggaatccctgaaaacacacctttttttgattgaaaatgagggcgccaaggggccacttcatcccgcagagcatcattttcagctttcgcatcagctaactccttcgtgtattttgcatcgagcgcagcaacatcacgctgacgcatctgcatctcagtaattgccgcgttcgccagtttcagttctctggcattttgtccgcgctgttctttgtaggcgatggcgttatcacggtaatgattaacaccccatgacaggcagacgacgatgcagataaccagagcggagataccgatgctgctttcggcgccctgatttacgcgaatcagacgacctttgctgattgccattgccagcgttgaagccactttgcgtgatgtggtaccaaacaatgtagccagctcatcagccgtttgtggtcctcgttgttcaatcgtcgcggttaaatcgcactctgagattttcgctactgttgctgtggtgatttcttccggcagttctgcctgcgctggctgttcctgctgaacattgttatcagccacacgccaggtgtacgcgcttttatcaacaaaaccagcctttttcagttcccatagttcgttcagcacttcttcacgactgatatcaagtcgcgcagcaagttctatggatgtggcttttcccattgctttcagtgcgtcaaaaacagtctccattaaatttttctcccggtaaaaattacttcgcaattcccatcgcccgccgttcatggtcatgcgatccataatccgctcgccgagcaatgttttcatggcctcatagttcaggtttgtcagcatccccacgctgcgcatcgacgctgtccggcgatcaacaatctggtgcagtaccactgctcgtttttcgtctcgcgctgatgccaaattcatcaagaa

SEQ ID NO: 18071 - DNA, 619 bp, Homo sapiens
  SIMILAR (2)..(373): 781254mologous to Homo sapiens fibrillin-2,accession number U03272,Smith-Waterman Score=586.
caggaattcggcacgagaagaggatggaaggagctgcaaagatcttgatgagtgtgcaaccaagcaacacaactgccagttcctatgtgttaacaccattggcggcttcacatgcaaatgtcctcccggatttacccaacaccatacgtcctgcattgataacaatgaatgcacctctgacatcaatctgtgcgggtctaagggcatttgccagaacactcctggaagcttcacctgtgaatgccagcggggattctcacttgatcagaccggctccagctgtgaagacgtggacgagtgtgagggtaaccaccgctgccagcatggctgccagaacatcattggggggctacaggtgcagctgcccccagggctacctccagcactaccagtggaaccagtgtgttgatgaaaacgaatgcctcagcgctcacatctgcggaggagcctcctgtcacaacaccctggggaagctacaagtgcatgtgtcccgccggcttccagtatgaacagttcagtggaggatgccaagacatcaatgaatgtgggctcttcgcaggccccctgcagctatggctgtttccaataccgagggcggttacctgtgtggctgtccacc

SEQ ID NO: 18072 - DNA, 1935 bp, Homo sapiens
  SIMILAR (1186)..(1926): 991254mologous to Escherichia coli alpha-glucan phosphorylase,accession number U18997,Smith-Waterman Score=1281.
atgggttttaccccttgtttcctctggggccctcaagaggtttttatccggttgtcggacaagagcggtcttttcgcccccacacaaaagggtcgcatatgggcccttaaaaagcgaggactatatcgtttgattatattgatgagtgtcagagagatcctctcctatgccgaggtggtgtttgccataacacaaagggaagttaccgctgtgaatgcccgcctggccatcagctgtcccccaacaatttcgcgtgtatcgatcttgatgagtgtgcaaccaagcaacacaactgccagttcctatgtgttaacaccattggcggcttcacatgcaaatgtcctcccggatttacccaacaccatacgtcctgcattgataacaatgaatgcacctctgacatcaatctgtgcgggtctaagggcatttgccagaacactcctggaagcttcacctgtgaatgccagcggggattctcacttgatcagaccggctccagctgtgaaggccacatccatagaacttgctgcgcgacttgatatcagtcgtgaagaagtgctgaacgaactatgggaactgaaaaaggctggttttgttgataaaagcgcgtacacctggcgtgtggctgataacaatgttcagcaggaacagccagcgcaggcagaactgccggaagaaatcaccacagcaacagtagcgaaaatctcagagtgcgatttaaccgcgacgattgaacaacgaggaccacaaacggctgatgagctggctacattgtttggtaccacatcacgcaaagtggcttcaacgctggcaatggcaatcagcaaaggtcgtctgattcgcgtaaatcagggcggtaaatttcgttactgcataccgggcgataatttaccagcagagccgaaagcagcatcgaagctacaaacctggataaacatcaaagaggatgaacacaacctctttgtctacacaggcacacaatcacttccagggcttattcccagaagacagggaccaagaaactatgtggagttggatgcgagcattcctatctatgcagagttgaggtcacatttgtctgagtataagtgccctaaatatcccctgaacaatgagcacatgggaccatctaattgcaggaaaacaagctcagggcttccattgatctacattatgaggatccccccgtttacatattcatcgcccacgcttagcgtagaagctcttaagcactctatcgcttacaagctgatgtttacgattggaaaggacccggtcgtcgccaataaacatgaatggctgaacgcaacgttatttgctgtgcgcgatcgtctcgtggagcgctggttacgttcaaaccgtgcccagttgtcgcaagaaactcgtcaggtttactacctgtcgatggagtttttgattggccgtacgctctccaacgccatgttgtcgctaggaatttacgaagatgtacagggcgcactggaagcgatggggttaaatctcgaagagctgattgatgaagaaaatgacccaggcctcggtaacggtggcctgggacgtctggcggcttgcttccttgattctctggcgacgttagggttgccggggcgcggttacggcatccgctatgactacggtatgttcaagcagaacatcgttaacgggagccagaaagagtcgccagactactggctggaatacgggaacccgggggaattcaaacgccacaacacgcgctataaagtccgttttgggggtccgattcagcaggaaggtaaaaaaacgcgctggattgaaaccgaagagattctgggagtcgcttacgatcagataatccctggttacgacaccgacgcgaccaacacgctgcgtttgtggagtgcgcaagccagtagcgaaattaacctcggtaaattcaaccagggtgtattttaa

SEQ ID NO: 18073 - DNA, 2586 bp, Homo sapiens
  SIMILAR (1354)..(1908): 931254mologous to Escherichia coli ybaE,accession number Z54355,Smith-Waterman Score=947.
atgcttcctcaacatgaatatgttgatatcgccagacgtcatggcctggaccctgctcagataaaaacgatgtcatcgacactagtgacgatgacatgtgatgacaatgtttatcgcgaaggagcaatgagtattggtgtgaaccagacgaccctgatcgtcataaaccggaacgcagggcgaatcgtgagcacagcccgccagcaatgcgcggcttccagctatgcggcgctaccggagacgaacgttcaggcggctgaactgctggcggagatggcgatttccagcgcccagcgccgtatgcgtgcggccaaaaaagtggtgcgtaaaaagctgaccagcggcccggcgttgcctggcaaactggctgattgtaccgcgcaggaccttaaccgtaccgagctgttcttgtggaaggggaagagaagttttcatcagggacctgcagaggaagaggatgtcgaaagactggtacaggacgccgggattatccgccatcgagggaaaattcaggcaattattggtaatgcgcgggcgtacctgcaaatggaacagaacggcgaaccgtttgtcgactttgtctggtcgtttgtaaatcatcagccacagataatggtgcgttcggcagtggtcgcgggaatcgcgcaggcagcactaccccagagcgtggtagcctgggagtatctggtggaagattatgatcgcattcgcaatgacattgaagctgtgctgccagagttcgccgactataaccagcgcatccgtcatcccggtggttttcacctgataaatgcagctgctgaaaggcgctggatgacgccgtcaggtaaggctaatttcattaccagcaaagggctgttagaagatccctcttcagcgtttaacagtaagctggtcatggcgacagtacgcagccacgatcagtacaacacgacgatttatggtatggatgatcgctatcgaggggtattcggtcaacgagatgggtaccgagactgggctggggcacttaactgcgaagagattgcccaactggctgaagactgtggcaatctcttcgcagttacggtgttccggtgcccagccggtgcgaatcttcagggtaacaggaacgtccactgcattgacgacctcggtaaggatcgatttaacgacatccgggcactggctgaagccgttaatctgacaaccaccccttgctggaagcgcctgaaacggctggaggacgacggtatccttatcggcaaagtcgccctgctggatccggaaaaaataggcctcggcctgaccgcttttgtgctgataaaaacgcaacatcacagcagcgaatggtattgccgctttgtcacggtggttaccgaaatgccagaagtgctggggttctggcgcaactggccccagccgtttatgggcggacaatggcaaaacgatacacccacgttgcgtattccctactatcgcccgctcgaaccgctacaaccaggctttttgcccggccgtgccgagcagcatctcgccgggcagatattttccggcctgacccgcttcgataataatactcagcgcccgattggcgatttagcgcatcactgggaaacctctactgacgggttacgctgggacttttatcttcgttcaaccctacactggcataacggcgatgcagtaaaagcctcacacttacaccagcgattattgatgctgttacaactgccagcactggatcaattatttattagcgtgaagcgtattgaagtcacccatccgcagtgtctgaccttctttttacatcgccctgattactggcttgcgcaccggctggcgagctattgcagccatctggcgcatccgcaattcccactgatcggcacgggtccttttcgcttaacacaattcacagcagagctgttcggttatgatatggatgctattgttggcggagctcataatggggccgccgatgcaatgagacattgttacttgatgtgtcgaatgactaagacatttggatcaacaatagctgacgtgatgaactgtttcgacagggcgtacgaccaacagccagaccagaaccgttcagggtatgaaccagacgggttttcttgtccgacttgctgcggcaacgtgcctgcatacgacgtgcctggaaatcccaaacgttggagcaggaagagatctcacgggcatcctggagcgaaagtggcgaatttagtgccgaaaaccacctttatcgatggtgtggaccagacatccttcttcctgggaacaaatggtcagtctaaccgtaaggccgagcactacttcctcaacggtaaactcgctgctgtgcgtatggatgagttcaagtatcacgtcctgattcagcaaccttacgcttatacccagagcggatatcagggtggattcaccggcacagtaatgcaaacggcgggatcgtcggtgtttaacctctacaccgatccgcaggaaagcgactccatcggcgtgcgccatattccgatgggtgtaccgctacagaccgaaatgcacgcgtatatggagatcctgaaaaaatatccaccacgcgcgcagattaaatctgactaa

SEQ ID NO: 18074 - DNA, 498 bp, Homo sapiens
  SIMILAR (226)..(468): 921254mologous to Escherichia coli YbaO,accession number D82943,Smith-Waterman Score=388.
atgagcctgcacatggtaactgccctcatagggaattctgtgaagaatgaagaagttttgtctttttcaagaatgtcacataaatggaatcatactgtaagcaacctcttgaggctggcgtctttcagcatgtgtgagaaccgtcaagtcgttggcgcgtttgtgacggattatttcgatgacgcccggcaaaatagaaaccacaataatcccgacgatcagcagcttaagagatattgtgaggattcagtccaggcactggctgaagccgttaatctgacaaccaccccttgctggaagcgcctgaaacggctggaggacgacggtatccttatcggcaaagtcgccctgctggatccggaaaaaataggcctcggcctgaccgcttttgtgctgataaaaacgcaacatcacagcagcgaatggtattgccgctttgtcacggtggttaccgaaatgccagaagtggggtgtcacgtattctcacgtgcacattaa

SEQ ID NO: 18075 - DNA, 801 bp, Homo sapiens
  SIMILAR (304)..(741): 961254mologous to Escherichia coli BENZENE 1,2-DIOXYGENASE BETA SUBUNIT (EC 1.14.12.3) (P2 SUBUNIT),accession number D90884,Smith-Waterman Score=747.
atggcagtaaaagcatggctcggtaccgcttttgaaaacagcgccactcgtgcttttggtcctgctggttttctcgagcaggatgactcggagaactggtgtgaaatccagaaattgcttaaaggccaccgcgcccgcaacagcaaactgtgtctggaaatggggcttggtcaggaaaagcgccgcgacgacggcattcctggcattactaactatatcttttcagaaactgccgctcgtggaatgtaccaacgctgggccgatcttctgagtagcgaaagctggcaggaagtgctcgataaaaccgccgcttaccagcaggagttacatcaccgcattagccagtttctctttcacgaagccagcttactggacgactggaaatttcgtgactggctggcgcagctcgacgaagagattcgttacaccatgcgcaccacagttaacgcgcaaacacgcgaccgccgcaaaggcgtccagccaccgacaacctggatttttaatgacaccaaagaccagctggagcggcgaatcgcccgtctggaaacgggcatggcctgggcagaagagccgccgtcacgcacccgtcacttaatcagcaactgccagataagcgaaaccgacatcccaaacgtatttgctgtgcgggtaaattatctgctttatcgggcacaaaaagagcgcgatgaaacattctatgttggaacgcgtttcgacaaagttcgccgtctggaagatgacactggcgctagctggaacggaaatcgtactggatcagccggaatcatttccataacctga

SEQ ID NO: 18076 - DNA, 1521 bp, Homo sapiens
  SIMILAR (823)..(1467): 931254mologous to Escherichia coli ddl cell wall enzyme,accession number M14029,Smith-Waterman Score=990.
atgaaagttataccatcactaagtttgaaaagactttttactaaagggggagacaccagtgcccaacatcatggagactgccttctacttcgagtcagccggcgtcggcctgagctcggacgagagttccgcattttcctggccatgaaacagctggtggagcagcagcccatccacacctgtcgcttctggggcaagatcctgggaatcaaacgcagctacctggtggccgaggtggaattccgggagggcgaggaggaggcagaggaggaggaggtggaggagatgacggaaggaggagagccctcaggcgccaacaagtacctgtactttgtgtgcaacgagccgggcctgccatggacgcggctgccccacgtcactccagcccagatcgtgaacgcccgaaagatcaagaagttcttcacaggctacctggacacgccagtcatagcccgcatctcggccgccacgcaggtcagcccgctggacctgcaggtctatggcaagcgcctggccttcgacatcacctacacgctggaatacagccgcctgaagaacaaacactactttgactgcgttaacgtgaacccggagatgccctgctttctcttccgggacagtgaagccgttgatattcatctggaacctagcagcaggcccacctttgctgcggaagggggcagcctccatctggatctgcagctgctctatcttccagcggtagaagttgactggggactggaagcgagtgcatcaagaagctgtgccctgtggactctagaggttcgctggtacacgagctcgtattcgaagatcatctgcgcagcgtgcttagcccgattgtgtgaagtcgctattgacgcgtatcttgtcgacccgaaagaagtcgacgtgacgcatctgaagtcgatgggctttcagaaagtgtttatcgcgctacacggtcgcggcggtgaagatgttccgctgcaggggatgctcgagctgatgggcttgccttataccggaagcggagtgatggcatctgcgctttcaatggataaactacgcagcaaacttctatggcaaggtgccggtttaccggtcgcgccgtgggtagcgttaacccgcgcagagtttgaaaaaggcctgagcgataagcagttagcagaaatttctgctctgggtttgccggttatcgttaagccgagccgcgaaggttccagtgtgggaatgtcaaaagtagtagcagaaaatgctctacaagatgcattaagattggcatttcagcacgatgaagaagtattgattgaaaaatggctaagtgggccggagttcacggttgcgatactcggtgaagaaattttaccgtcaatacgtattcaaccgtccggaaccttctatgattatgaggcgaagtatctctctgatgagacacagtatttctgccccgcaggtctggaagacctgcaggcatgtaaacttcgcgaaaactatggtgcctctgataaaaacattttagatctgggtacgttctgttaa

SEQ ID NO: 18077 - DNA, 2133 bp, Homo sapiens
  SIMILAR (1345)..(2088): 1001254mologous to Escherichia coli UDP-MurNac-tripeptide synthetase (MurE),accession number D10483,Smith-Waterman Score= 1322.
atggtggaggcgatccgcgcttccggcagccagctggtgacactggcgatgaaacgtgtcgacttgcgccagcacaacgacgctatcctcgaaccgcttatcgcggcgggtgtgaccctgctgccaaatacatccggggcgaaaacagcggaagaagccattttcgccgcccatctggctcgtgaagcgttaggcacaaactggttaaaattagagattcaccctgacgcccgctggctgttgcccgatcccatcgaaaccctgaaagccgccgaaacgctggtacaacagggatttgtcgtgctgccttactgcggggccgatccggtattgtgtaaacgtctggaagaagtcggctgtgcagcggtgatgccgctcggcgcgccgattggctcgaatcagggactggaaacccgcgccatgctggagattattatccagcaggccacagtgccggtggttgtcgatgctggcatcggcgttcccagccatgccgcgcaggcgcatggaaatgggggccgacgcggtgttagtgaatacgcgattggtaccgacaccgaccccgcagtggttgccaccgtcattaatgtagtgagtttcgatctcttttgtatcgccccacgcggcacgctcgccgtctctgatgtgcaatatctgctgaccttcgcggtgatgttaaccgtcgggctggtgatcgggaaccttactgctggcgtgcgttatcaggcgcgggtagcccgttaccgcgagcaacgcacacggcacttatatgaaatgtcgaaagctctggcggtgggccgcagtccgcaggatatcgctgccaccagcgaacaatttattgcctccacgtttcatgcccgcagtcaggtgttgttgcccgatgacaacggtaaattgcagccgttaacacatccgcaaggaatgacgccgtgggacgatgccatcgcgcagtggagttttgataaaggcctgcctgcgggcgcgggcaccgacacgttacccggtgtaccgtaccagattttgccgctaaaaagcggcgagaaaacctacgggctggtggtggtggagccggggaatctgcgccagttgatgatcccggaacagcagcgcctgctggagacgtttacgctgttagtcgccaatgcccttgagcggctgacgctaaccgccagcgaagaacaggcgcggatggcaagcgaacgtgaacagatccgcacagcctgctgcggcgctttcgcatattacgcaggtccagctactttgccgcttgccggtgtgtctggggtacggccccgggcaaccggatacccctgtggccaggaaccaacgctggcaaatagcgcaaacacaaccggttcggcagtcgatgttcagcatgagctggcgggcctggtggatcagggcgcgacgttttgcgcaatggaagtttcctcccacgggctggtacagcaccgtgtggcggcattgaaatttgcggcgtcggtctttaccaacttaagccgcgatcaccttgattatcatggtgatatggaacactacgaagccgcgaaatggctgctttattctgagcatcattgcggtcaggcgattattaacgccgacgatgaagtgggccgccgctggctggcaaaactgccggacgcggttgcggtatcaatggaagatcatattaatccgaactgtcacggacgctggttgaaagcgaccgaagtgaactatcacgacagcggtgcgacgattcgctttagctcaagttggggcgatggcgaaattgaaagccatctgatgggcgcttttaacgtcagcaacctgctgctcgcgctggcgacactgttggcactcggctatccactggctgatctgctgaaaaccgccgcgcgtctgcaaccggtttgcggacgtatggaagtgttcactgcgccaggcaaaccgacggtggtggtggattacgcgcatacgccggatgcactggaaaaagccttacaggcagcgcgtctgcactgtgcgggcaagctgtggtgtgtctttggctgtggtggcgatcgcgataaaggtaagcgtccactgatgggcgcaatcgccgaagagttgctggtccactaccttatatggcgcgtctgggcgaccaggtag

SEQ ID NO: 18078 - DNA, 1021 bp, Homo sapiens
  SIMILAR (2)..(775): 1001254mologous to Escherichia coli UDP-MurNac-tripeptide synthetase (MurE),accession number D10483,Smith-Waterman Score= 1340.
agagatgacactcgacagccgtgtggctgcggcgggcgatctctttgtagctgtagtaggtcatcaggcggacgggcgtcgatatatcccgcaggcgatagcgcaaggtgtggctgccattattgcagaggcgaaagatgaggcgaccgatggtgaaatccgtgaaatgcacggcgtaccggtcatctatctcagccagctcaacgagcgtttatctgcactggcgggccgcttttaccatgaaccctctgacaatttacgtctcgtgggcgtaacgggcaccaacggcaaaaccacgactacccagctgttggcgcagtggagccaactgcttggcgaaatcagcgcggtaatgggcaccgttggtaacggcctgctggggaaagtgatcccgacagaaaatacaaccggttcggcagtcgatgttcagcatgagctggcggggctggtggatcagggcgcgacgttttgcgcaatggaagtttcctcccacgggctggtacagcaccgtgtggcggcattgaaatttgcggcgtcggtctttaccaacttaagccgcgatcaccttgattatcatggtgatatggaacactacgaagccgcgaaatggctgctttattctgagcatcattgcggtcaggcgattattaacgccgacgatgaagtgggccgccgctggctggcaaaactgccggacgcggttgctgtatcaatggaagatcatattaatccgaactgtcacggacgctggttgaaagcgaccgaagtgaactataccgccagcagaaagttccaacggcagcccgtccggatcgttaaagaaggtgaagcgtttttgcgtgtatggatcgacaccgatggtttcacacttcacgttatggctttaaggctgtcagggatactgtcccacgaatggccacctgaatacccccagccagccgaggaacggcgagaagaaggtgaatgcatgaccggtgtgcgccagtgccagcgaggctacagcctatgccgccgtgtttaa

SEQ ID NO: 18079 - DNA, 672 bp, Homo sapiens
  SIMILAR (225)..(476): 961254mologous to Escherichia coli BENZENE 1,2-DIOXYGENASE BETA SUBUNIT (EC 1.14.12.3) (P2 SUBUNIT),accession number D90884,Smith-Waterman Score=422.
cctgctggtcgactttagaggatcttctgagtagcgaaagatggcaggaagtgctcgataaaaccgccgcttaccatcaggaggtgatgaaatgagtgcgcaagtttcactagagttacatcaccgcattaggccagttttctcgttcaggaatccagctgctggaccgactgggaaatttcgggacggggtggcccaacttcgaccgaaagaggttcggttccaccatgcgcaccacagttaacgggcaaacacgcgtcccccgcaaaggcgtccagccgccgacaacctggatttttaatgacaccaaagaccagctggagcggcgaatcgcccgtctggaaacgggcatggcctgggcagaagagccgccgtcacgcacccgtcacttaatcagcaactgccagataagcgaaaccgacatcccaaacgtatttgctgtgcgggtaaattatctgctttatcgggcacaaaaaggagcgcgatgaaacattctatgttggaacgcgtttcgacaaagttcgccgtctggaagatgacaactggcgcttgctggaacgggatatcgtcctggatcaagcggtaatcacttcccataacctgagtgtactgttctgatgaatcgaatttatgcgtgtcccgttgcggatgagccggagggtgaggctctcc

SEQ ID NO: 18080 - DNA, 3668 bp, Homo sapiens
  SIMILAR (346)..(1443): 991254mologous to Escherichia coli Respiratory nitrate reductase 2 a chain (EC 1.7.99.4),accession number D90787,Smith- Waterman Score=2012.
  misc_feature (1)...(3668): n = a,t,c or g
atgaccactcattacggtcaaattactcatctacaaggtcgacgtatattccctgcgtcaggtctcgtgatgtatggcgaatatcttccgcaagcggtttgtgctggacaacaatggtcaatgaaactcaaagttcgtgcagttcatggccaacttaatgatggcggctttgatagccagcgttatgccattgcccagcatcagccgctcaccggccgttttctgcaggcaaatataagcgtacaatattctttcaatgccagaaaacttatcagcgcaaaaaacgtcaacgtcatccagcgtggacctgaaatcaccattgaaaaacaaatgacgatgccccaccagggcgaaccctttgccgatggtcacggacaggtgatgcatagcaaccgcgactgggaggacagctatcgccagcgttggcagttcgacaaaatcgtgcgttccacccacggtgttaactgtacaggctcctgtagctggaaaatctacgttaaaaatggtctggtgacctgggaaatccaacagaccgactacccgcgcactcgccctgacctgcccaatcatgaacctcgcggctgcccgcgtggcgcaagttactcctggtatctttacagcgctaaccgcctgaaatacccgctcattcgtaaacgactgattgaactgtggcgcgaagccctcaagcaacacagcgatccggtactggcgtgggcatcgattatgaacgatccgcaaaagtgcctgagctacaaacaagtgcgtgggcgcggcgggtttatccgctccaactggcaggaactaaaccagctgattgccgccgctaacgtctggaccatcaaaacctacggcccggatcgcgttgccggtttctcgccgatcccggcgatgtcgatggtttcttacgccgccggaacgcgttatctgtcgctgcttggcggcacctgtttaagtttctacgactggtattgcgacctgccgcccgcctcgccgatgacctggggcgagcaaaccgacgtaccggaatctgccgactggtataactccagctacatcatcgcctgggggtctaacgtaccgcagacacgtacgccggacgcccacttctttaccgaagtacgctacaaaggcactaaaaccatcgccattacccctgactactctgaagtggccaaattgtgcgaccagtggctggcaccgaaacaaggcactgatagcgccctggcgatggcaatgggccatgtgattttaaaagagtttcatctcgataatcccagcgactactttatcaactactgccgccgctacagcgacatgccgatgctggtaatgctggagcctcgcgacgatggtagctacgttcccgggcgcatgatccgcgcatctgacctggtggatggactgggcgaaagcaacaatccgcagtggaaaaccgtagcagttatacccgagcnggtgttagccggactgcgtgaaggcggtattgacgcgtatcctgtcgacccgaaagaagtcgacgtgacgcaactgaagtcgatgggctttcagaaagtgtttatcgcgctacacggtcgcggcggtgaagatggtacgctgcaggggatgctcgagctgatgggcttgccttataccggaagcggagtgatggcatctgcgctttcaatggataaactacgcagcaaacttctatggcaaggtgccggtttaccggtcgcgccgtgggtagcgttaacccgcgcagagtttgaaaaaggcctgagcgataagcagttagcagaaatttctgctctgggtttgccggttatcgttaagccgagccgcgaaggttccagtgtgggaatgtcaaaagtagtagcagaaaatgctctacaagatgcattaagattggcatttcagcacgatgaagaagtattgattgaaaaatggctaagtgggccggagttcacggttgcgatactcggtgaagaaattttaccgtcaatacgtattcaaccgtccggaaccttctatgattatgaggcgaagtatctctctgatgagacacagtatttctgccccgcaggtctggaagcgtcacaagaggccaatttgcaggcattagtgctgaaagcatggacgacgttaggttgcaaaggatggggacgtattgacgttatgctggacagcgatggacagttttatctgctggaagccaatacctcaccgggtatgaccagccacagcctggtgccgatggcggcacgtcaggcagctgctctgaacacgcgaaacagcgaagaagaggttcttctcgccgcaataatggacgacaagtcacaagcagtgaaggcacatggcaaggcgactgctagaggagcacaagcaagtaggagcgacaacacactgggcagcacaggggtgctgtttaaggcgctggattttggcatcgatgtttctattcaagccgccaccaaatatctggttgggcattcagatgcgatgattggcactgccgtgtgcaatgcccgttgctgggagcagctacgggatgatacacttcatctcgttggtaaagaccgacgccgcaaatttcaatgccgccacacggtgctgtaccagcccgtgggaggaaacttccattgcgcaaaacgtcgcgccctgatccaccagccccgccagctcatgctgaacatcgactgccgaaccggttgtattttctgtcgggatcactttccccagcaggccgttaccaacggtgcccattaccgcgctgatttcgccaagcagttggctccactgcgccaacagctgggtagtcgtggttttgccgttggtgcccgttacgcccacgagacgtacattgtccgagggttcatggtaaaagcggcccgccagtgcagattaacgctcgttgagctggctgagatagatgaccggcaccacctggcttgccgggccgtaatatttctcggcaaattcattaccaacctgactcggttcaagattcagttccacgagcagttcgccagtgaccagtatcatgctctgttcagccatgcttctgccgttcaggtattaggggcgaaagatgatggcagcgataagcgcctcggtgatggacaaaccgcccgcccggtgtgggaaaccgccaaagatgcgctgcaatttggtcaggacggtcacggtagcggtttcttctttactgaaaaaccggatgctaatgtctgggtcgatggcgcagtttcaagctattaccgcgaaacctatgccgaagcagaacaacgtttaggtgaagttcgcgccctgcgcctggcgggtcataacaatattttccccacgctttcatggctaaacggcactgccacactccgcgtctggcatccgcgcggccctgatcaagttgaagtgtgggcgttctgtattactgacaaagccgcctccgatgaagttaaagccgcttttgaaaacagcgccactcgtgcttttggtcctgctgggtttctcgagcaggatgactcggagaactggtgtgaaatccagaaattgcttataggccaccgcgcccgcaacagcaaactgtgtctggaaatggggcttggtcagaaaagcgccgcgacgacggcattcctggcattactaactatatcttttcagaaactgccgctcgtggaatggaccaccgctgggcc

SEQ ID NO: 18081 - DNA, 918 bp, Homo sapiens
  SIMILAR (540)..(10): 991254mologous to Escherichia coli K12 putative regulator,accession number AE000330,Smith-Waterman Score=881.
ctaccattcaattaacgccgcttccgcttgctctgcgctacatccggtggcgtttttaacaatattgacctgtcgcacatgcagttcttcgttggtggcgaccacatcgaccatgaggttgccgaacactttgccggatttaatcatcagcccggtggaaagcatattgagcaccagtttctgcgctgtacctgctttcatccgcgaagaaccggtaacaacttcggcacctacaatcggtgtaatggcaaactcagcggtggttgaaacggcgctccccggattacaggaaattcccactgtgcggcagccgagctggcgtgcgtattccagtccggcaatcacatacggcgtgcgaccgctggcagcaatgccaaccaccacatcctgtgccgttaaattaatatttttcagatcattaacaccgccttcccggctatcttccgcgccttccaccgcgtgctgaatggcatattctccgccagcaatcaaaccaaccaccagacccggtttcacgccgtatgtgggcggacattcggagatgtaggctgggtagccaaatcctatcaggttgcagaggagagaggctccataaccgaacaccaggtacaaggccaccagtccgatgacaccgaacattttcacggtggcgagattgagcgtcagcagcagcactatcaccgccagcgaggcgacccagtcggagagatcggggaaccagaactgagcataagccgtgatcgccaccacgtctgccataccggttacaacccagcagaaccagtaagtccagccggtgaaatatccaatggcaccgccaatggcaataagctgaatatgtcggtttgtgagattgcgccgtagcgactgttcagccggagcctgatcatcggcaacgacttttacctgatctaccat

SEQ ID NO: 18082 - DNA, 2023 bp, Homo sapiens
actgtgcaggtgcagtgccgtggcattcgttttctcccggctggcactgtattcgcctattaacgccatacgcaattcagtaaatccttgcgcgccgagtttttgggcaaatttcactatgctcgactggctaatgccgagctgtttcgccatctgccgtgaagaaacggattgcagctcactcacgttggcctgcagaaagtcagcgattttttgctcgttttcggtgaattcactccccgcattgcttattttcgtcaggtacaacatcttccactctcctgggctggcagcataaattccgcttaagttcttatgacgctcttcacactctgcgagtgtagactcaatgattcctttaagcctgtcaattcgggatatatgattccatacatctgcaattatttgatcgtaaatagtaaggtcaccaccgatgcaatttgaaaagatgattactgaaggctcgaacaccgcctcggctgaaattgaccgcgtatcgacgctgggaaatgtgccggattatcaacgatgaagataaaaccgtaccgcttgccgttgaagcgcgtactgccggatatcgccgcggcgatccgatgttatccacgcccaggtaagcggcggcgggcgtctgatttacctcggtgcgggaacatccggtcgtctggggattctggatgccagcgaatgtccgcccacctacggcgtgaaaccgggtctggtggttggtttgattgctggcggcgaatatgccattcagcacgcggtggaaggcgcggaagatagccgggaaggcggtgttaatgatctgaaaaatattaatttaacggcacaggatgtggtggttggcattgctgccagcggtcgcacgcctttcctcgatatgagcgatgacgatcgcgatttccatattgacatcaatattaaaggcgtatggaacgtcacgaaggcggtgctgccggagatgattgcccgcaaagatggtcgcattgtgatgatgtcttcagtcactggtgatatggtggccgatcctggcgaaacggcgtacgccttaacgaaagcggcgattgttggcctgacaaaatcgctggcggtggagtacgcgcagtctggtattcgcgttaacgccatttgcccgggatacgtgcgcacaccatggcggaaagcattgcccgccagtcgaacccggaagatccagagtcgtagagatcagtggcgattaagtttgccccgtgacgatatggaactggctgctttatctcttctggtttgcattgggcaaattatcgccccggcaaaagatgacgttgaatttcgacatcgtataatgaatccgctcactgaagatgagtttcaacaactcatcgcgccgtggatagatatgttctaccttaatcacgcagaacatccctttatgcagaccaaaggtgtcaaagcaaatgatgtgactccaatggaaaaactgttggctggggcgaatcaggcaccaggttttggtggtggttttaaaagcggtttacgtggaggaacacctgtaacaacgttcgtacgtgggatcgatcttcgttcaacggtgttactcaatgtcctcacattacctcgtcttcaaaaacaatttcctaatgaatcacatacggaaaaccaacctacctggattaaacctatcaagtccaatgagtctatacctgcttcgtcaattgggtttgtccgtggtctattctggcaaccagcgcatattgaattatgcgatcccattgggattggtaaatgttcttgctgtggacaggaaagcaatttgcgttataccggttttcttaaggaaaaatttacctttacagttaatgggctatggccccatccgcattccccttgtctggtaacagtcaagaaaggggaggttgaggaaaaatttcttgctttcaccacctccgcaccatcatggacacaaatcagccgagttgtggtagataagattattcaaaatgaaaatggaaatcgcgtggcggcggttgtgatggctccttag

SEQ ID NO: 18083 - DNA, 807 bp, Homo sapiens
  SIMILAR (573)..(767): 511254mologous to Escherichia coli methionyl-tRNA formyltransferase,accession number X63666,Smith-Waterman Score=143.
atgcctacagccgttgccgaacgtaggctggataaggcgttacgccgcatccggcaattctctgctcctgatgagggcgctaaatgcccgtggcctggaattattgattgctcaaaccattttgcaaggcttcgatgtcagtatggtcgattcctcgaagtgacctccgcaggcgatgaaaaaccgtatccactttacgatcatcacgttggtctggtcgtggagcaactgcgctgcattataacggccaaagtacggacgcggcatttttactacgtgttaaagagcatacacccggctgttgccggattacccgcgcttcgagattgcggagagctttttaactccgtgtactgtcgaaaaccagcaactggtcccgaactgcaggctgatgttatggtcgtcgtcgcctatggtttaattctccgaaagcagtgctggagatgccgcgtcttggctgtatcaacgttcatgttcactgctgccacgctggcgcggtgctgcaccaatccaacgctcactagggcgggtgatgcagaaactggtgtgaccattatgcaaatggatgtcgagataccagtggtacgctgtacgacaagctggcagagcttggcccacaaggcttatcaccacgttgaaacaactggcagacggcacggcgaaaccagagttcaggacgaaactcttgtcacttacgccgagaagttgagtaaagaagagcgcgtattgactggtcactttcggcagcacagcttgaacgctgcattgcgctttcaatccatggccaatgagctggctggaaattga

SEQ ID NO: 18084 - DNA, 2775 bp, Homo sapiens
  SIMILAR (2775)..(2092): 961254mologous to Escherichia coli methionyl-tRNA formyltransferase,accession number X63666,Smith-Waterman Score= 1122.
tcacaatatccgctggttgccgggcatgaggtgattgggcgcgtggtggcactcgggagcgccgcgcaggataaaggtttgcaggtcggtcagcgtgtcgggattggctggacggcgcgtagctgtggtcactgcgacgcctgtattagcggtaatcagatcaactgcgagcaaggtgcggtgccgacgattatgaatcgcggtggctttgccgagaagttgcgtgcggactggcaatgggtgattccactgccagaaaatattgatatcgagtccgccgggccgctgttgtgcggcggtatcacggtctttaaaccactgttgatgcaccatatcactgctaccagccgcgttggggtaattggtattggcgggctggggcatatcgctataaaacttctgcacgcaatgggatgcgaggtgacagcctttagttctaatccggcgaaagagcaggaagtgctggcgatgggtgccgataaagtggtgaatagccgcgatccgcaggcactgaaagcactggcggggcagtttgatctcattatcaacaccgtcaacgtcagcctcgactggcagccctattttgaggcgctgacatattctgttttgtcgtatcgccagcacagcctgccgacattgttcggtgacattggcaatatcatggttgatatcaatgcgcacaatatcctgttcatctgcttgtggacgctccagtgcctcaaactgactttttagtaacgctaccggcataaaatgcccagcccgacgctgcattcgcgcgagaatagtttcatagtcgccattcagaaatcgtttggcactttgttgtttgccattggcgtagtgcatattgccaacgttaatgcgattcaccggaacgccacctttcaccagcgtcaggaaatcggcgggtgttttacaaaccagcaggattttctgtcgatcggcggcgcgatgaatgttgtcgataactttttgcagcgtccagaaacgtacggcgatcccttctgccagtaccatttccatcaggttttgttgtaccggatcttcggcaacctcatcgttggctaccagcaccagatttgcccccgcaaatccgacccattgaacgccgacctgaccgtgaatcaagcgttcatcaatccggcttaaaacaatatttggcatagcgtgttcctctttgttttgcttattggccttcacaggctgtgtggtatgcgccaggatgtcctgaatatggttgataatgagttcccgtggcgttggctgcagctcgccggagcgaactttcacgtactgcagcggcagatactggctgatcagcggcagcggaattggtgaatccgccagattacgtaccagatgagcgaaagcgtcatcaatctggctgtccggccagtaatagcgcacgcgatccgagtagctataaccacgcgccagacgacgcgcgttgccgtcaccgtggtagtggctttgccagtattccgggcggtcgagcatcacgtcttccagcacctgacgcagaccagaacaggctttcgctggcaccagttcttcttcaatcgccgcccgagagaacagagcttcacgcagggggacagtcaagctgggcccctttcgaatgggaaggggcaccccgcggggaggaatggactctagtatctgtaggggctctaaaataagatctactcgccactcgcatagccaggcggtggcttctttaatgccaactcgtcgcatccgtttgaaaacccaaccgcactgaccaacttcgtgcagatgctggcgatcttcttgatcccaacggcgctgtgctttgcctttggtgaagtgatgggcgatcgccgccaggggcgcatgttggggagagctgttgaccgcgggggggaatgccgggcaaaatgggcaacccgaattgggaaaaacactgccaaagaaaccggcggactggtaccacggattgggcgagtataacaccgaatggtacggacgatgaaggaggtacaaagaggcgacactctttgtgtccttctgcttcacgtcgagaagaagacagaacgaaacatcggacagaggaagagacaaaggatggaccgaactggctgttttgttggcttcaagatcgttcctggctgcagcgttggttgccgtatcaatgaccgatgctttccagactttaaccggctgtccttcaatttccagccagctcattggccatggattgaaagcgcgaatgcagcgttcaagctgtgctgccgaaagtgaccagtcaatacgcgcttcttctttactcaacttctcggcgtaagtgacaagagtttcgtcctgaacttctggtttcgccgtgccgtctgccagttgtttcaacgtggtgataagcccttgtgggccaagctctgccagcttgtcgtacagcgtaccactggtatcttctgcagtaatcgggcaggagagcttatagagcatatcaccggtgtctaaaccgacatccatttgcataatggtcacaccagtttctgcatcacccgcccatagtgagcgttggattggtgcagcaccgcgccagcgtggcagcagtgaaccatgaacgttgatacagccaagacgcggcatctccagcactgctttcggcagaattaaaccataggcgacgacgaccataacatcagcctgcagttcggcgaccagttgctggttttcttgtggacgcagggaaacaggttgaaaaacgggcagacctttttcctcagccagaactttaaccgggctgggcat

SEQ ID NO: 18085 - DNA, 1656 bp, Homo sapiens
  SIMILAR (1065)..(457): 1001254mologous to Escherichia coli sun,accession number Y10307,Smith-Waterman Score=1070.
ttaattacgcagggcgctatttgccagacgatcgtcttctgcctggcaagctgccgcagtgaacagcacgtcagttgaagagttcagcgcggtttcgcaagagtcctgcaatacgccgatgataaagccgacggcaaccacctgcatggcgatatcgttcgaaataccgaacatattacaggccagtgggatcagcagcagagacccccccgccacgccggatgcgccacaggcacacagagaagccaccacgctcaacagcagcgccgtgggcagatcgaccggaatacccagcgtattaaccgcagccagcgtcaacacggtaatagtgattgctgcgcccgccatattgatggtggctcccagcggaatagaaacggaataggtatcgcgatccagattcagcttttcacacagcgccatattcaccggaatgttcgctgcagagcttgcggcttgtgctgatgcatcctgaacggtaacccatccgtcttcaaaaccaggtagcgcatgaacaggtgcaggtgtttccagacgtacagcatcagggtaatccgcatgcgggaaacctttcattcctgcttcatccagcaatgcaagccagctgtcgcgggaatgatgcgtacgattaatacgcagccacattggcggacgctggttattggcttcgacgatggattgccactgctctggatacgctttttgcagacgcttcagcaaccaggaaggatgcagataacgtgcatcactggcattaaactcggctaataactcttcttgctgacgctggaactggcgtaatacaccgtttatcaaccctttaagttgcggacgcttaattgcgatagcgccttcaaccgtttcagccagcgcagcatgaggtggaatgcgggtataaagcagttgatacaaaccaaccataatcaggtaatgcacggtccgctgtttgccggtcatcggacgggccattaacttattaatcagccagtctaactgcgaaagcgtacgcagtacgccaaagcacaactcttgaagaagtgctttgtctttatcggaaactttttgcagacggttgcccggaacaaaccattcccgacgagagttcaggaggtcttgcgcgctcatcgctttcttacccgcaggttgtaacgagagcaggttcaggatgccatcaccagtcgcaacctgaatgccttgtttgttggcttcaaggatcgttcctggtgcagcgttggttgccgtatcaatgaccgatgctttccagactttaaccggctgtccttcaatttccagccagctcattggccatggattgaaagcgcgaatgcagcgttcaagctgtgctgccgaaagtgaccagtcaatacgcgcttcttctttactcaacttctcggccagtgcgctgccgccctttctttggcggtggacggagatcaaattcaatggtcggctggtaatacccagcgctttcagaccttcgcggatggcatcatcgacgcgtgcgcgaaagcgacggtctggcgtcacttcatcactttcaatcgtagaaagtgcgcacgaacgttcttttccagctgtcccgataacccctcgacctgtagacggacgttcgcggcgacggcagatccgcttaagcagagtaagcttacacagcat

SEQ ID NO: 18086 - DNA, 816 bp, Homo sapiens
  SIMILAR (333)..(713): 1001254mologous to Escherichia coli ORF_f128,accession number U18997,Smith-Waterman Score=635.
tcaatatgaatcttgatgtccgttctcgcagattatgagcacctttgtgccgccagaaaccccggatgtcggttcaagcgtcaactttgcctcttctgttgaagatctgttacccaaacgctggagttcaccatcgaagaagtgaatgccgatcgcaatgtttctaataacgccaaaaatcgtcagatcgtgctgaatctctacgagaaagggatcttcgatattaaagatgcgatcaaccaggttgctgaccgcctgaacatctccaaacacactgtctatctctacatccgccagttcaagagcggtgatttccaggggcaagataagtaatgcgttttgccatcgtggtgaccgggccagcatacggtacgcaacaggcgagtagtgcttttcagtttgcgcaggcgctgatagcagatggccatgagttaagcagcgtctttttctatcgggaaggggtctataacgctaaccaattgacctctccggcaagtgacgaatttgacctcgtacgggcctggcaacaactgaatgcgcaacatggtgtggcgctgaatatctgcgtagcggcagcattacgccgtggcgttgttgatgaaacggaggccggaagactggggctggcttcgtcaaaccttcagcagggatttaccttaagcggacttggggcgctggcggaagcctcgctgacctgtgacagggtggtacaggtctgatgaaacgaattgcgtttgttttttttactgcccctcatggtacacccggaggcccggaaaggttaaatgctttaatgggcacttcccgattatctgc

SEQ ID NO: 18087 - DNA, 2655 bp, Homo sapiens
  SIMILAR (910)..(1542): 991254mologous to Escherichia coli methionyl-tRNA formyltransferase,accession number X63666,Smith-Waterman Score= 1085.
atgaaaatggtctcacgtattaccgcgatcggcctggctggcgtcgcgatttgctatttagggttatctggttatgtgtggtaccacgataataaacgcagtaaacaggccgatgttcaggcatctgctgtcagtgaaaataataagtgtgactgtgggaagatggaggagtatgagaagttctgtgaaaagagtcttgccagaatacaagaagcatcactatccacagagagctgtctccgtgctcagtctgaaagtatctcacttattcgctttcatggagtgggctcaatatgtggcacaaggagaataggagttcacactatccgggcgacctataccgttaggcgaatggcaccggaaggcaaccaaagcggggaagacagagcgaacacaggggcccagggtcccacaggaccacaggaaaccgaaagcgcccagaggtcagagagctataccgtgaggggacaaagcgcgaaaagcgcgaaaagagttggaccccacacagtggacaagatacgtgttgagtcctgctcgcccttcattccgaagaagcagacagaggagccaaccagcaaggcacgacagcgcacagcaagagcaacagaagcaaagaaacagcaaagaggagcctactcaaagcctcgtacctgcagagcagctgctactaccaacccctgtgccagaaccagcccctgcctaaaccccacgggaactggagcttcagcccagggtaagccgtcacgacctatgccagaaccatgcagcacctaccctcttgggaccaaaagcaccagctccacagagcagcaacccattggagctgagttgatggcacaccactcttggggacagagttcagtccagtggcagtcacaaaccagactggccaatagacagcaggatcttagaccagagcgaccggcaggacgcggtaaaaaactgatgcccagcccggttaaagttctggctgaggaaaaaggtctgcccgtttttcaacctgtttccctgcgtccacaagaaaaccagcaactggtcgccgaactgcaggctgatgttatggtcgtcgtcgcctatggtttaattctgccgaaagcagtgctggagatgccgcgtcttggctgtatcaacgttcatggttcactgctgccacgctggcgcggtgctgcaccaatccaacgctcactatgggcgggtgatgcagaaactggtgtgaccattatgcaaatggatgtcggtttagacaccggtgatatgctctataagctctcctgcccgattactgcagaagataccagtggtacgctgtacgacaagctggcagagcttggcccacaagggcttatcaccacgttgaaacaactggcagacggcacggcgaaaccagaagttcaggacgaaactcttgtcacttacgccgagaagttgagtaaagaagaagcgcgtattgactggtcactttcggcagcacagcttgaacgctgcattcgcgctttcaatccatggccaatgagctggctggaaattgaaggacagccggttgacgatctgcatgatgcccacttcctggtgagtattggcatcgaccgccgccatggtgatgaggatatccaccggatcgttgtcatcgtggttgaactcccgcggctttttcagcgttaccagagagaaaccggttttcttaacgccctcttccggacgcccccggactggcctgcattaactaaccttgatattgaactggactttattaacgacggtttatggatgaaaaccgatggcgttaatctgggcggcgtgcgcgcgagtaatcttaccgcagtgatccctgactactcaaaagaaaaactgctgattgacgctgacattaaaggtccgggtaaagccgttggcccttactttgatgagacaccgctgaaagattctctgcgtgcgaccctgcaagaactccagctcgacggcgatgtgaatgctcgcttacatcttgatatcccgctgaacggcgaactggtaaccgcgaaaggtgaagtgacgctgcgtaataacagtctgtttatcaaaccactcgacagcaccctgaaaaatttgagcggtaaattcagctttatcaatagcgatctgcaaagtgaaccactgacagcaagctggtttaatcagccgttgaacgtggatttttccaccaaagaaggggcaaaagcctaccagcgtgtaatcggcatgaataaacgcctctttgctccccgcttctcgccgcgtggtgccgagacaacaaaacacaatgtcgatgggatcggtgacaatgcgctcaggcttaccgaaatcttcttcccacggctgttcgaagccaggaattcgcaggttggaaacggagaaaccaaccagacccgctttcggctttgcgccgcgcccggtggcaccttcatcgcggatttcaccgccggaaccggtcgccgcgcccggccacggagaaatcgccgtcgggtggttgtgagtttcgactttcatcagaatatgcgccggttcctgatggaaatcgtagcggcccgtttcgtggtcagcaaagtagcggcccacttcagaaccttccattacggcggcgttatctcttataagcagagagaacgtgatctggcgtggtttcgaaagtatttttga

SEQ ID NO: 18088 - DNA, 2760 bp, Homo sapiens
  SIMILAR (1252)..(2112): 961254mologous to Escherichia coli ftsH,accession number M83138,Smith-Waterman Score=1415.
ttatactgtaaaataccagatgcttgcctctgctgtccaaaagtcagttgcacaaaaacctcccagtaacccaaagggaaagtcccagacctcttcgcgatggatgacgagtgatcgacgatcggtcacggatcgatggacgatcgatggtcgacgatgatcgatgatggatgacgatgaggataatgataagagagtgaaacgctgtatgcgtctgagtccctctagaggatccccttccctgatactcgtgaaatggcctccgggctttccatgccggttggttttaaaaacggcaccgacggcagtctgtatgttgggacgcttaattgcgatagcggcttcaaccgtggcaaccagcgcagcatgaggaggaatgcgggtataaagcagttgatacaaaccaaccataatcaggtaatgcacggtccgctgtttgccggtcatcggacgggccattaacttattaatcagccagtctaactgcgaaagcgtacgcagtacgccaaagcacaactcttgaagaagtgctttgtctttatcggaaactttttgctggagcggaggcagaatgttgcttaatgattgcccttgctcgacgacttgtgtaacggcctgggccggcatgcccaggttgtaacaaagcaggttcagaatgccatcaccagtcgcaacctgaatgccttgtttgttggcttcaaggatcgttcctggtgcagcgttggttgccgtatcaatgaccgatgctgtccagactttaaccggctgtccttcaatttccagccagctcattggccatggattgaaagcgcgaatgcagcgttcgagctgtgctgccgaaagtgaccagtcaatacgcgcttcttctttactcaacttcagagcaattttgccttccccgttgagcacgctaaacgctgcaacgtcctgagcatttgcaccttttagcggaacgcagatataaaaaatccccggctttttgggccagggatatgtgttaatgaaaccttcttgacgctgattttttttcaactctgctttttcttcgacgggagttgttgaggttaagggtgaaatcaatgccgccagtgaaccgcctgaaacgccaatttcattgagcaaagagtcaatcagcggggcctgtgtgccgtaataaaaagcggctgataatgcttgttccgacaagtttccgccccacacattacccgtgtttgcatcacccgcatcgaccccacaattgagaccatccgacttgataattccaagaacgtcaaggttgtcggtgaaccgcctgaagaaccaagcctgctggcttctatcttcatctcctggttcccgatgctgttgctgattggagtctggatcttcttcatgcgtcaaatgcagggcggcggtggcaaaggtgccatgtcgtttggtaagagcaaagcgcgcatgctgacggaagatcagatcaaaacgacctttgctgacgttgcgggctgcgacgaagcaaaagaagaagttgctgaactggttgagtatctgcgcgagccgagccgcttccagaaactcggcggtaagatcccgaaaggcgtcttgatggtcggtcctccgggtaccggtaaaacgctgctggcgaaagcgattgcaggcgaagcgaaagttccgttctttactatctccggttctgacttcgtagaaatgttcggcggtgtgggtgcatcccgtgttcgtgacatgttcgaacaggcgaagaaagcggcaccgtgcatcatctttatcgatgaaatcgacgccgtaggccgccagcgtggcgctggtctgggcggtggtcacgatgaacgtgaacagactctgaaccagatgctggttgagatggatggcttcgaaggtaacgaaggtatcatcgttatcgccgcgactaaccgtccggacgttctcgacccggccctgctgcgtcctggccgtttcgaccgtcaggttgtggtcggcttgccagatgttcgcggtcgtgagcagatcctgaaagttcacatgcgtcgcgtaccattggcacccgatatcgacgcggcaatcattgcccgtggtactcctggtttctccggtgcttagctcggtacccctatgaacaaccctcatcggcacagcgctagcagtttgaacgacatcgacgcgaccccttcctgtccgattggcttgcatgcactgcgccggctgcgctggcacgaacgtgtagcccacgtgctgcgtctgaccgtatcggaatcccttggcaaactgtgtcatctttttaacccggccatttgttttgggcattgcaaccctttgaccatttgggaagaagcagccttcaatttcagtgccttccagcgccatctgacgcaggcggatgtaatagagcgttttgatacccttgcgccaggcgtaaatctgcgctttgttgatatcgcgagtggtggcggtatcggggaaaaaaagcgtcagcgacagcccctgatcgacatggcgagtcgcttccgcgtaggtgtcgatgatcttttctgcgccaatttcgtaagcgtcctgatacagcgccagattctcgttagtcataaacggggcagggtagtaaacgcgtcctgttttgccctctttgcgtatctctactttcgccacaatcggatgaatactcgacgtagcatgggtgatataagagatagaaccgggtggcggcaccgcctgaagattctggttggatatgccgtagcgcattacgtcgtcgggcaactgcgcccacat

SEQ ID NO: 18089 - DNA, 1201 bp, Homo sapiens
  SIMILAR (564)..(734): 1001254mologous to Escherichia coli Probable oxidoreductase OrdL (EC 1.-.-.-),accession number D90768,Smith-Waterman Score=291.
tcaatttccagccagctcattggccatggattgaaagcgcgaatgagcgttcaagctgtgctgccgaaagtgaccagtcaatacgcgcttcttcttactcaacttctcggcgtaagtgacaagagtttcgtcctgaacttctgtttcgccgtgccgtctgccagttgtttcaacgtggtgataagcccttgtggccaagctctgccagcttgtcgtacagcgtaccactggtatcttctgcgtaatcgggcaggagagcttatagagcatatcaccggtgtctaaaccgaatccatttgcataatggtcacaccagtttgtcggctggcttggtccatcggcgcgcgcatctgtgtgtatgtggacccgttgcgtcctaaagtcgcgaagagatgttcggtccggtccttgtgttaacggtttcacatcagaagaacaggcgcgcagagccgacgcctgaaagccggttccgtcttcgtcaataactacaacgacgcgatatgaccgtgccgtttggcggctataagcagagcggcaacggtcggacaaatccctgcatgcccagcagttactacgccgccagtgcgaataaatatgcaccattcgacacgctgaatgagtcaatcacctgcgacgtttgcgtggttggcggcggatataccgggctctcctccgcgctgcatctggcggaagcgggctttgacgtagtggttctcgaagcctcacgcatcggcgagctattattttctgtggggctgcgttgcggattggtttcttggtgtgctgtggggttgttcggttcttgctggggggcttcttttgtgtcgtggttgtgactggctgcgtgtgttttgttgacgtggtcctgggcttggccgtagcggctgatctgtgtggtgttgtgtgtgtgtggtgatggttgggcatgatggcggtaccgccggtcatgtgtacttgcctctctgttgaagatctggttacccaaacgctggagttcaccatcgaagaagtaatgccgatcgcaagtttctaataacgccgaaatctcagatcggcgaattctagagaaagggatcttcgatattaaagatgcgatcaaccaggttgctaccgcctgaacatctccaaacacactgtctatctctaatcgcagttcaaagcgggatttccaggggcaagataagtaatagcgttttgccat

SEQ ID NO: 18090 - DNA, 2946 bp, Homo sapiens
  SIMILAR (1)..(651): 1001254mologous to Homo sapiens p53-GM-CSF immunostimulant fusion protein,accession number W19763,Smith-Waterman Score=1167.
atggccatctacaagcagtcacagcacatgacggaggttgtgaggcgctgcccccaccatgagcgctgctcagatagcgatggtctggcccctcctcagcatcttatccgagtggaaggaaatttgcgtgtggagtatttggatgacagaaacacttttcgacatagtgtggtggtgccctatgagccgcctgaggttggctctgactgtaccaccatccactacaactacatgtgtaacagttcctgcatgggcggcatgaaccggaggcccatcctcaccatcatcacactggaagactccagtggtaatctactgggacggaacagctttgaggtgcgtgtttgtgcctgtcctgggagagaccggcgcacagaggaagagaatctccgcaagaaaggggagcctcaccacgagctgcccccagggagcactaagcgagcactgcccaacaacaccagctcctctccccagccaaagaagaaaccactggatggagaatatttcacccttcagatccgtgggcgtgagcgcttcgagatgttccgagagctgaatgaggccttggaactcaaggatgcccaggctgggaaggagccaggggggagcagggctcactccagccacttgaagtccaaaaagggtcagtctaggctaggtacccgttttctctgtcagcctgccgtgacggtcataccggtaaagatagtgcgcgtcacgggcgatacggttatccggccacatgctgagggtgctgtccgggtgcagctccgggtcgggcaggcggttacctgccgggtctgtggcatacgggatgcggatatccagattcgctgcggtggtgtgaacgccggtcagcctgccggtggtgctgtagctgtaactccgggtctggcgcgggctgctgatgcggatgagttcgccgttgtcgttccaggtcagccattccacggcgggcaggctgtacggtatacagcggttcgccagcccctgcgcgttggacgcatgtctggtctcatgctggcaaaaacatgctttcgtctgcaggtgatgcaccgtctgacgctcaccgttttcagtcagaaagtgttcactgaaagtattgaagtggtcgaagccttaaaggtcaatctgatgcgtgtgtttttacgccgtatggacctgcgccaacatcgcaagatgatcatgatcgataattacatcgcgtacaccggcagcatgaatatggtcgatcctcgctactttctccgtgatgctctccctcactgccccaaccctctgactggccccacattcgcggtgctcgaaaaacttggatatccgcatactttcgtttctaccgacttcaatacagtcgcgctagatgttaagacgttcggcatcaaagcgaatgacgacaaagccaagctcaaagcgctgggggaaatcgcgcacgcatgtgtcgacgcaacgatcatttattgcaagtcaccaactgttgcgggcctggtggcgcgcgagctgatcaagcttgggcatggcactccgactgagaatccccatgtctactggtcgcccttagaaacggtattggcttgcattttggcgcgctaccgagggcactgcagcaatacactggcgaccaattcaatgctggaaaactgcgctttttgctctgcacctccacgatcattgaaggagtcaacactatcgcttaataccgttgtgatctacgacaaccgcgatggaactcgcagcattgacaaattcaatcgattttgcattcatgcatttcctaaaattatcaggaatgcaatttatgaagtggaacagcatacgcaggcccctcaaggtttgattgctgcttctgctcttggggtaatttctcttgcctgtcagaaccggattgatgtttgccgattgaataatctacgtggcccggtatcacttttcttaatgactctggctgaatcaggtgaacgtaagagtacggttgataaactgctgatgaagccattatatcaactggaagaggatttatttgaaaaatacacccacgatcttaccgcatggaaaaatgatgaaacaatttttaatattgaaaaaaaagcactgatgtcaaaacttaaatcaaatattcgacctattaaactcatctcttggggcacttgcgatcagtcggcatcatgtctgatgaagctgggatcatttttaatgggtacacacttaacgagcctgccgttatcaataagatgtgggatggttcaatatttatcaacccggaatctccctggccgcctcgaagcactgctcaacttccagcaggtaacgctggatttgactggactggatatggcctctgcttctcttctggacgaggccaccgctgccgccgaagcaatggcgatggcgaaacgcgtcagcaaactgaaaaatgccaaccgcttcttcgtggcttccgatgtgcatccgcaaacgctggatctcatgtcttacttcacctcaaactcgcccctgcccggggttttttattgtaaaagtggggccacacggctgtcgagtgtcatctctcgcagtgctcgcgaaggtgcgtctggcacccacggagcaagaaggtcgcgcaaattacgatctgccacctgtcccctcgccttgattaatcacaaattcatttttatcgcccgttgtcagcgcatccggctcgatgttcatggtacgcaatacgccgcccatgatggcaccaaagaccggcgcggaaacggcgccgccgtagtatttacccgcctgcggatcgttgataacaacaaccagcgcgaagcgcggctgactcgcaggcgcaacgcctgcggtataagcaatatatttattgatgtagcgaccgtccggcccgacctttttcgcggtaccggttttaatggcgatacgatagcctttaatcgccgacttcacgccgccgccgaccggtag

SEQ ID NO: 18091 - DNA, 776 bp, Homo sapiens
  SIMILAR (1)..(591): 831254mologous to Escherichia coli glucosamine-6-phosphate deaminase protein,accession number M19284,Smith-Waterman Score=833.
atggacgaatatgtcggtctgccgaaagagcatccagaaagctactacagctttatgcaccgtaatttcttcgatcacgtggatattccaagcagaaaccttcacccttttcaaccggcaccgccccgaatatcgccgccgagtgccgccagtatgaagaaaaaatccgttcttaccgaaaaattcctgctgtttatgggcggtgtaggtaacgacggtcatattgcatttaacgaaccggcgtcttctctggcttctcgtactcgtatcaaaaccctgactcatgacactcgcgtcgcaaactctcgtttctttgataacgatgttaatcaggtgccaaaatatgccctgactgtcggtgttggtacactgctggatgccgaagaagtgatgattctggtgctgggtagccagaaagcactggcgctgcaggccgccgttgaaggttgcgtgaaccatatgtggaccatcagctgtctggaactgcatccgaaagcgatcatggtgtgcgatgaaccttccaccatggagctgaaagttaaaactttaagatatttccctggattagaagccgaaaacatcccaggtctggacattggtatccctgccctggctccttgctcagggcaatattttttataaatcggggggcagaaagtgtatgcattaacccagggccggatctttaccggccacgaatttcttgatgaccacgcggttgttatcgctgatggcctgattaaaagcgtctgtccggtagcggaactgccgccaga

SEQ ID NO: 18092 - DNA, 1260 bp, Homo sapiens
  SIMILAR (391)..(894): 1001254mologous to Escherichia coli N-acetylglucosamine-6- phosphate deacetylase,accession number AF052007,Smith-Waterman Score=878.
atgcgtgtgtttttacgccgtatggacctgcgccaacatcgcaagatgatcatgatcgataattacatcgcgtacaccggcagcatgaatatggtcgatcctcgctacttcaaacaagatgcgggcgtagggcaatggattgatctgatggcgcgtatggaaggccctatcgccaccgcgatggggattatttattcctgcgactgggagattgaaaccggaaaacgtattctgccgtggaccatcagctgtctgcaactgcatccgaaagcgatcatggtgtgcgatgaaccttccaccatggagctgaaagttaagactttaagatatttcaatgaattagaagcagaaaatatcaaagggcaatattttttaaaatcgggggtcagaatgtatgcattaacccagggccggatctttaccggccacgaatttcttgatgaccacgcggttgttatcgctgatggcctgattaaaagcgtctgtccggtagcggaactgccgccagagatcgaacaacgttcactgaacggggccattctctcccccggttttatcgatgtgcagttaaacggctgcggcggcgtacagtttaacgacaccgctgaagcggtcagcgtggaaacgctggaaatcatgcagaaagccaatgagaaatcaggctgtactaactatctgccgacgcttatcaccaccagcgatgagctgatgaaacagggcgtgcgcgttatgcgcgagtacctggcaaaacatccgaatcaggcgttaggtctgcatctggaaggtccgtggctgaatctggtaaaaaaaggcacccataatccgaattttgtgcgtaagcctgatgccgcgctggtcgatttcctgtgtgaaaacgccgacgtcattaccaaaggcctgaaggggcggggccttaaacattatccaatcagggacgctggactgggaccgtccaatcaggcacgcagctggagcggacagggcggcttccgggatgtggtaggaccgttggctctcgctgcacgcggaggtcaaggtgtcgtccttactgctgtgtgtcgtccgctcctaaaggcccagcttctatggccctgtgacctgcaggtattgggagattcacaactaagtcgccaggacccccggaagcctagaaatggaggtattgtgacatattcctggaccaagtacctaggtgagattgtgacaaatatcctggcccaactcataggtgctatgatgatacctggaatcagccaatag

SEQ ID NO: 18093 - DNA, 347 bp, Homo sapiens
  SIMILAR (3)..(197): 871254mologous to synthetic construct lactose permease,accession number U90436,Smith-Waterman Score=299.
gtgccaaccattcggcatttagccttaagctggcactggaactgttcagacagccaaaactgtggtttttgtcactgtatgttattggcgtttcctgcacctacgatgtttttgaccaacagtttgctaatttctttacttcgttctttgctaccggtgaacagggtaccagctcgagttcgtatctcaacgtgctgtggaatgacaacgatggcggctgtaaaggtgcctgcgaccgcgtgcctcaccagaacgtcaccgcgctgaatctacctgatcagtgcatcaacggcgctggtgttcccggaaaccttgccgttgttacctgcactggagcagttccgtaa

SEQ ID NO: 18094 - DNA, 2874 bp, Homo sapiens
  SIMILAR (2874)..(2200): 961254mologous to Escherichia coli K12 putative EC 3.5. amidase-type enzyme,accession number AE000130,Smith-Waterman Score= 1163.
ttattgcgctgatcctcccggaaaaaccagaaatagccaatgagttggtaccctatacggcgtttccagttcggcaatctgttccggcttcaaagtgatatccaccgcgttcaatagctcatcaagctgttcttcgcgcgaagttccgataatcggtgcggcaatgcccggtttactcaacaaccaggccagcgcaacttgtgctcgtgtcgcccccagttcttcactgacgcctgttaaccgctctgcgatctgcgcgtcattttcatcgctttctttatagagatttttccccacctcatcagacaccagtcgtgcggtagtttctccccacggacgcgtcagacggccccttgccagcgggctccatggaattaccgccacgccctcctgataacacagtggtagcatctcgcgctcttcttcacgataaatcagattgtagtgatcctgcatactgacaaactgcgcccagccgtgctgtttttggagttccagtgcctgagcaaactgcgaagcgtgcattgatgacgcgccgatataacgcgctttcccggcttttaccacgtcgttgagggcttccagcgtctcttcgatcggcgtgttgtaatcccagcgatgaatttgcaggatatcgacataatccatgccaaactgacgccggaaaacgcgacaaaaatagtcgctatccggaaaaccgcaacgctgtgccacttcatgaattgacagatgatatttctgcaaaatcatcctcgccttcgccattcgcacccaacgcacatactcgataaaacgcatcgttccatgctgagcaaacagttttgacagatgattgggcgtgatattaaaaaactgcgccacgctctcgcgggtgagcggctgggcataattatcctgaacccagttacaaatgcgcgttgcaggctgggaagctggatctggcgagcaggtttccggttgttcaacagcagccataccacccaggatctcgcctttgaagatccacactttaacgccgattacaccgtaagtggtgtgcgcttcagaggacagcaccggggagatcagcagcagaataagcgtcgccagcacaatgtcttccgcacgtttgagcagtgattgtacaccatcggcagccacggtccgacctattacaaccgctatccgcctcagttcaggaaatttacggaggggaccctttattatctcacagtttctgtagatccgaaatccaggcaggtccaacagaaacctctgctcaggatcgcccaaggccaacatcaaagaatcagaactattcctctccagaggcttggtgatgccgataacgccgtttgagatcatgatggcgaagatctggtcgatggggctggtggtgctggtggtatcgggattatcgctggtgctgatggtgaaaggtgtactgggcgtaccgattgaaggctcgatcccgctgtttatgctgggcgtggcgctcagtctgtttgccaccacgtcaatcggcatttttatggggacgatagcgcgttcaatgccgcaactggggctgctggtgattctggtgctgctgccgctgcaaatgctttccggtggttccacgccgcgcgaaagtatgccgcagatggtgcaggacattatgctgaccatgccgacgacacactttgttagcctcgcgcaggccatcctcggggtgccggattcgaaatcgtctggccgcagtttctgacgctgatggcaattggcggcgcatttttcaccattgcgctgcttgcccatgcaagatgaaaaactcagagatgcataggtgttcttctgaagatctgctccaactctgggagggagctgcgggcagctggggtcctcatccatgtccccacacccactctcacaggggctctccagggcagggatctggggtccccgtaggagctgctggtcttggccactgtcctcgtccgtggggctgcccagctcccgctctacgtcgtaggccttgggagccaggcacagtgacggcagagcaccttggggctccgaggggaccagcggctcatctgcaaatgtcagccaggggcccagctcagggttcagtctccgagaacgccggggatccttccaggtcctgcccatgttcctagagatatattcaatgtaagaaccgttcccatacaggaaggctgatgctataacactacttaaaaaggctgtaagggatttgatcgacagctccgcatcaatgcgcgttgcctgatgcgcgtcggcagtagcgataatctctccttgcggattaatcacccggctgtcaccgcgataatggcagccgttgccatcgctgccgacgcgattgcatcccgccacatacgcctgattctcaatcgcgcgggccgtcagcaatgcctgccagtgcagagagcgcggagcaggccagttggcgacgtacagggcgaggtcataatcgttgagattgcgcgaccacacaggaaaacgtaagtcgtagcacaccagcggcaaaatacgccagccgcgccatttcacaatcactcgcgcattgcccgctttataatgtagatgctcatctgccatgcggaacagatgacgcttatcataaaaatgtaccgtgccgcccggctcaaccagcaaaaagcggttaaccgaaccagactccgtttgtaatgcaacactgcctgcaatcagcgcattgcactgctgcgccttagctgtcatccagttcactacgtcatcttgtgctagcgacgaagctgccgcttccatggcaaagccgctggtaaacatctccggtagaacgatcacatcgcgcccggtaataccttccagttgacgatcaaaatgacgcaggttggcaggaccatccat

SEQ ID NO: 18095 - DNA, 1109 bp, Homo sapiens
  SIMILAR (492)..(1058): 991254mologous to Escherichia coli yjdB,accession number U14003,Smith-Waterman Score=1035.
ttgcatgctcatctgtctttactcccgtgattcaattggtgacaattaccagctagcctttttcagacccgggatttcaccgcgcatagcggcttcacggaccttaatacggctcaacccgaacttccgcaggaaaccatgcggacgacctgtttgacggcagcggttacgctgacgagacgggctggaatcacgcggcagagtctgcagcttgagaacagcgttccaacgatcttcgtcggaagcgttcacatcagacctgcaggcagcagagttgcaaaatcgagcttcgaatcgcccggccagaataggacacgcttcatttggtcattttcccggtccagagttcttgggatgtagagaaaactagcttctcccagggacaatcttgtgattccgcaggagaaggctctgaaagaatacatcaagattgggaatctggtgatgagcttagcagcagctccactgaacagataaggtctcttaaagagtggaatgacaacgatggcggctgtaaaggtgcctgcgaccgcgtgcctcaccagaacgtcaccgcgctgaatctacgtgatcagtgcatcaacggcgaatgctatgacgaagtgctgttccacgggcttgaagagtacatcaataacctgcaaggtgatggcgtgattgtcttacacaccatcggcagccacggtccgacctattacaaccgctatccgcctcagttcaggaaatttaccccaacctgcgacaccaatgagatccagacctgtaccaaagagcaactggtgaacacttacgacaacacgctggtttacgtcgactatattgttgataaagcgattaatctgctgaaagaacatcaggataaatttaccaccagcctggtttatctttctgaccacggtgaatcgttaggtgaaaatggcatctatctgcacggtctgccttatgccatcgccccggatagccaaaaacaggtgccgatgctgctgtggctgtcggaggattatcaaaaacggtatcaggttgaccagaactgcctgcaaaaacaggcgcaaacgcaaaaagattgtgtcttattgatctttgccaaacaaccctttgacaacagataa

SEQ ID NO: 18096 - DNA, 747 bp, Homo sapiens
  SIMILAR (535)..(738): 981254mologous to Salmonella typhimurium ATP dependent protease binding subunit,accession number AF010250,Smith-Waterman Score=323.
atggtgctccttgaactacacatatcacaaacaagaacccacagcagtcctggttggcactctgtagaaacaggatctccaatgatgaaggaagagaggaaaggagggggagaaggagaaactctggttgatagagctgacgtgatttggcccaaaattagccccaaagcctgtattccccatatacaccacccaagcctactgcttcagttaaaccaggctactcgtagctttgcaaatatgatgtacattcccaccttgtccccatctgatcacacgcctaagcgtgctcccactgcttgcttactaattatcaaacaagttatgaaattattgatggtgctaattatttgggcggttgacccgcaatatcgcctgaatgcgatgattgccaccaccgtggtgttgctgctactggcactgattggcggtatctggacgctacgtaaatcgctaaagaacacagatgaagaggagagatattttatatcagagaaactttctcagaatgacggcaggcaacgagttggatttgcagcggcgacgttgtctcatcgctacattgctgaccgtcagctgccggataaagccatcgacctgatcgatgaagcagcatccagcattcgtatgcagattgactcaaaaccagaagaactcgaccgactcgatcgtcgtatcatccagctcaaactggaacaacaggcgttaatgaaagagtctgatgaagccagtgaaaaacatggatga

SEQ ID NO: 18097 - DNA, 1341 bp, Homo sapiens
  SIMILAR (1341)..(673): 941254mologous to Cloning vector pZC320 SopA,accession number U26464,Smith-Waterman Score=1086.
tcatgaccggcagacagcgctttcacacccgcacaaacaagtttcacggtccgaccccagcaccaccgctcgctcatccagcgccgaccgtgtcaacgccagcgagtacccaacatccagcgaggagacatcaggtcgctcgtccagataggtcatcaacgccgttgcctgcgcggatagcgcttcgggtgttttgcccgacaccatccacggcaccaccggaacatccacgacagaacccgaacccggccccgcagactgactcggcactcccgggggctgttcgaggatgacgtgcgcgttagtaccactgatcccgaacgacgacacccccacccgacgaacacgaccactcctgggccagggcgtgttctccgtaaggagttgaaccgtccccgccgaccaatccacctccggcgacggcgattccacgtgcaacgtgcgtggcagctgcccgtgccgcatcgccatcaccatcttgatcacaccagccacacccgccgccgcttgcgtatgaccgatgttcgacttgaccgaccccaaccacaacggccggccaggatcacgatcacggccgtaggtggcgatcagcgcctgcgcctcgatcggatcacctgtcagatatgcttcaagaacaagtatgtctttattaccattaattctttcatcaactagatcaggctcgaaccctttaagatcaacgttcttgagcagatcacgaagcatatcgaaaaactgcagtgcggaggtgtagtcaaacaactcagcaggcgtgggaacaatcagcacatcagcagcacatacgacattaatcgtgccgatacccaggttaggcgcgctgtcaataactatgacatcatagtcatgagcaacagtttcaatggccagtcggagcatcaggtgtggatcggtgggcagtttaccttcatcaaatttgcccattaactcagtttcaatacggtgcagagccagacaggaaggaataatgtcaagccccggccagcaagtgggctttattgcataagtgacatcgtccttttccccaagatagaaaggcaggagagtgtcttctgcatgaatatgaagatctgtacccatccgtgatacattgaggctgttcccttccacgagcaaaacacgtagccccttcagagccagatcctgagcaagatgaacagaaactgaggttttgtaaacgccacctttatgggcagcaaccccgatcaccggtggaaatacgtcttcagcacgtcgcaatcgcgtaccaaacacatcacgcatatgattaatttgttcaattgtataaccaacacgttgctcaacccgtcctcgaatttccat

SEQ ID NO: 18098 - DNA, 1002 bp, Homo sapiens
  SIMILAR (750)..(67): 631254mologous to Streptomyces noursei NysC,accession number AF263912,Smith-Waterman Score=671.
tcatccagctcggcacaagttcgtcaaaggcagcagcgaacaccgtaaaagcccggtaaagcccccgcccatccccagccactgaccaccttgaccggaaaacacaaacccgatgcggcccctagcccctacagatccggtcaccaacctcagaagcctcatgaccggcagacagcgcttcacaccgtacaacaacgtttcacggtccgaccccagcaccaccgctcgctcatccagcgccgaccgtgtcaacgccagcgagtacccaacatccagcgaggagacatcaggtcgctcgtccagataggtcatcaacgccgttgcctgcgcggatagcgcttcgggtgttttgcccgacaccatccacggcaccaccggaacatccacgacagaacccgaacccggccccgcagactgactcggcactcccgggggctgttcgaggatgacgtgcgcgttagtaccactgatcccgaacgacgacacccccacccgacgaacacgaccactcctgggccagggcgtgttctccgtaaggagttgaaccgtccccgccgaccaatccacctccggcgacggcgattccacgtgcaacgtgcgtggcagctgcccgtgccgcatcgccatcaccatcttgatcacaccagccacacccgccgccgcttgcgtatgaccgatgttcgacttgaccgaccccaaccacaacggccggccaggatcacgatcacggccgtaggtggcgatcagcgcccagggattggctgagacgaaaaacatattctcaataaaccctttagggaaataggccaggttttcaccgtaacacgccacatcttgcgaatatatgtgtagaaactgccggaaatcgtcgtggtattcactccagagcgatgaaaacgtttcagtttgctcatggaaaacggtgtaacaagggtgaacactatcccatatcaccagctcaccgtctttcattgccatacggaactccggatgagcattcat

SEQ ID NO: 18099 - DNA, 723 bp, Homo sapiens
atggtgatggcgatgcggcacgggcagctgccacgcacgttgcacgtggaatcgccgtcgccggaggtggattggtcggcggggacggttcaactccttacggagaacacgccctggcccaggagtggtcgtgttcgtcgggtgggggtgtcgtcgttcgggatcagtggtactaacgcgcacgtcatcctcgaacagcccccgggagtgccgagtcagtctgcggggccgggttcgggttctgtcgtggatgttccggtggtgccgtggatggtgtcgggcaaaacacccgaagcgctatccgcgcaggcaacggcgttgatgacctatctggacgagcgacctgatgtctcctcgctggatgttgggtactcgctggcgttgacacggtcggcgctggatgagcgagcggtggtgctggggtcggacgtgaacgttgttgtacgctggccgctgcaaaacgctgacggaacagtagctgaatacaacggctatcacgttgtgtttgctcttgcgggaagcccgaaagacgctgatgacacatcaatctacatgttttatcaaaaggtcggcgacaactcaatcgacagctggaaaaacgcgggccgtgtctttaaagacagcgataagttcgacgccaacgatccgatcctgaaagatcagacgcaagaatggtccggttctgcaacctttacatctgacggaaaaatccgtttattctag

SEQ ID NO: 18100 - DNA, 1410 bp, Homo sapiens; identical to SEQ ID NO: 13433
  SIMILAR (655)..(1407): 1001254mologous to unidentified cloning vector 29kD protein essential for the replication of mini F plasmid,accession number AB015619,Smith-Waterman Score=1309.
  misc_feature (1)...(1410): n = a,t,c or g

SEQ ID NO: 18101 - DNA, 1776 bp, Homo sapiens; identical to SEQ ID NO: 15758
  SIMILAR (1561)..(1773): 971254mologous to Homo sapiens proline-rich protein G1,accession number X07881,Smith-Waterman Score=424.

SEQ ID NO: 18102 - DNA, 3084 bp, Homo sapiens
  SIMILAR (1554)..(1054): 1001254mologous to Cloning vector pZC320 SopA,accession number U26464,Smith-Waterman Score=886.
tcacggttccgaaccccaagcaccaccggttcgttcatccagcgcggacggtgtcaccgccagcgagtacccaacatccagcgaggagacatcaggtcgctcgtccagataggtcatcaacgccgttgcctgcgcggatagcgcttcgggtgttttgcccgacaccatccacggcaccaccggaacatccacgacagaacccgaacccggccccgcagactgactcggcactcccgggggctgttcgaggatgacgtgcgcgttagtaccactgatcccgaacgacgacacccccacccgacgaacacgaccactcctgggccagggcgtgttctccgtaaggagttgaaccgtccccgccgaccaatccacctccggcgacggcgattccacgtgcaacgtgcgtggcagctgcccgtgccgcatcgccatcaccatcttgatcacaccagccacacccgccgccgcttgcgtatgaccgatgttcgacttgaccgaccccaaccacaacggccggccaggatcacgatcacggccgtaggtggcgatcagcgcctgcgccttggttgccgctgaagagatctttaatttgctttctatcagcgcatttttggcttgatgtgcgaaggccaaaaaggatggtgtaaaccggtacaggttagcgcgacgttcacggtgatcgccgataacaatctctacagacagaattcctttgtttacagcttcacggaatgcacgaacgacggttgattggctataaccagtttctgccgcgatcaggcggtgaggcttgtgaatgaagtattcactggttgttgccgcgagatttgcacattgcgacaggatatgcccggcgcttttaaatataagttccagtttcaggtcatttctttgcgtatgcatatgagcataggttgttagaaacagccaggccacatcttgaagactttgctgcttagaaatttcttccactggataccctaaatcatccatctcaagttccaagtatccacagatccctagagcaggggcacagtgcagccaggctgtttgatcaggctcgaaccctttaagatcaacgttcttgagcagatcacgaagcatatcgaaaaactgcagtgcggaggtgtagtcaaacaactcagcaggcgtgggaacaatcagcacatcagcagcacatacgacattaatcgtgccgatacccaggttaggcgcgctgtcaataactatgacatcatagtcatgtgcaacagtttcaatggccagtcggagcatcaggtgtggatcggtgggcagtttaccttcatcaaatttgcccattaactcagtttcaatacggtgcagagccagacaggaaggaataatgtcaagccccggccagcaagtgggctttattgcataagtgacatcgtccttttccccaagatagaaaggcaggagagtgtcttctgcatgaatatgaagatctggtacccatccgtgatacattgaggctgttccctgggggtcgttaccttccacgagcaaaacacgtagccccttcagagccagatccaacacatcacgcatatgattaatttggttcaattggataaccaacacgttgctcaacccgtcctcgaatttccatatccgggtgcggtagtcgccctgctttctcggcatctctgatagccagcacaacgtggagatacaggtccggaagcgcagtccgggcatgcggagcagggtgcccaggctggcaggaggctggcccatgctcagctcctcccgcatggctgaaagcaagacctcaggggtcagggtgtcctgcactgccccctttccgttgatggcagccaccctccacagctcctgcaggccccaatccagcctgccgtcatcaccgaaacgcgcgaggcagctgcggtaaagctcatcagcgtggtcgtgaagcgattcacagatgtctgcctgttcatccgcgtccagctcgttgagtttctccagaagcgttaatgtctggcttctgataaagcgggccatgttaagggcggttttttcctgtttggtcactgatgcctccgtgtaagggggatttctgttcatgggggtaatgataccgatgaaacgagagaggatgctcacgatacgggttactgatgatgaacatgcccggttatggaacgttgtgagggtaaacaactggcggtatggatgcggcgggaccagagaaaaatcactcagggtcaatgccagcgcttcgttaatacagatgtaggtgttccacagggtagccagcagcatcctgcgatgcagatccggaacataatggtgcagggcgctgacttccgcgtttccagaccgtggccaggacccaacgctgcccgagatgcgccgcgtgcggctgctggagatggcggacgcgatggatatgttctgccaagggttggtttgcgcattcacagttctccgcaagaattgattggctccaattcttggagtggtgaatccgttagcgaggtgccgccggcttccattcaggtcgaggtggcccggctccatgcaccgcgacgcaacgcggggaggcagacaaggtatagggcggcgcctacaatccatgccaacccgttccatgtgctcgccgaggcggcataaatcgccgtgacgatcagcggtccaatgatcgaagttaggctgcctggacagcatggcctgcaacgcgggcatcccgatgccgccggaagcgagaagaatcataatggggaaggccatccagcctcgcgtcgcgaacgccagcaagacgtagcccagcgcgtcggccgccatgccggcgataatggcctgcttctcgccgaaacgtttggtggcgggaccagtgacgaaggcttgagcgagggcgtgcaagattccgaataccgcaagcgacaggccgatcatcgtcgcgctccagcgaaagcggtcctcgccgaaaatgacccagagcgctgccggcacctgtcctacgagttgcatgataaagaagacagtcataagtgcggcgacgatagtcatgccccgcgcccaccggaaggagctgactgggttgaaggctctcaagggcat

SEQ ID NO: 18103 - DNA, 783 bp, Homo sapiens; identical to SEQ ID NO: 4999
  SIMILAR (403)..(780): 921254mologous to Plasmid F Protein D,accession number M12987,Smith-Waterman Score=586.

SEQ ID NO: 18104 - DNA, 856 bp, Homo sapiens
  SIMILAR (564)..(31): 691254mologous to Streptomyces noursei NysC,accession number AF263912,Smith-Waterman Score=604.
tcacggttccgaaccccaagcaccaccggttcgttcatccagcgcggacggtgtcaccgccagcgagtacccaacatccagcgaggagacatcaggtcgctcgtccagataggtcatcaacgccgttgcctgcgcggatagcgcttcgggtgttttgcccgacaccatccacggcaccaccggaacatccacgacagaacccgaacccggccccgcagactgactcggcactcccgggggctgttcgaggatgacgtgcgcgttagtaccactgatcccgaacgacgacacccccacccgacgaacacgaccactcctgggccagggcgtgttctccgtaaggagttgaaccgtccccgccgaccaatccacctccggcgacggcgattccacgtgcaacgtgcgtggcagctgcccgtgccgcatcgccatcaccatcttgatcacaccagccacacccgccgccgcttgcgtatgaccgatgttcgacttgaccgaccccaaccacaacggccggccaggatcacgatcacggccgtaggtggcgatcagcgcctgcgccttggttgccgctgaagagatctttaatttgctttctatcagcgcatttttggcttgatgtgcgaaggccaaaaaggatggtgtaaaccggtacaggttagcgcgacgttcacggtgatcgccgataacaatctctacagacagaattcctttgtttacagcttcacggaatgcacgaacgacggttgattggctataaccagtttctgccgcgatcaggcggtgaggcttgtgaatgaagtattcactggttgttgccgcgagatttgcacattgcgacaggatatgcccggcg

SEQ ID NO: 18105 - DNA, 547 bp, Homo sapiens
  SIMILAR (381)..(4): 921254mologous to Plasmid F Protein D,accession number M12987,Smith-Waterman Score=586.
tcaggataattgtttcagcatcgcaaccgcatcagactccggcatcgcaaactgcacccggtgccgggcagccacatccagcgcaaaaaccttcgtgtagacttccgttgaactgatggacttatgtcccatcaggctttgcagaactttcagcggtataccggcatacagcatgtgcatcgcataggaatggcggaacgtatgtggtgtgaccggaacagagaacgtcacaccgtcagcagcagcggcggcaaccgcctccccaatccaggtcctgaccgttctgtccgtcacttcccagatccgcgctttctctgtccttcctgtgcgacggttacgccgctccatgagcttatcgcgaataaatacctgtagaacggagtaccctcggtgtgcggttgtatgcctgctgtggaaggatgctgtgtcctgcttatccacaactttttgcgcacggttatgtggacaaaatacctggttacccaggccgtgccggcacgttaaccgggctgcatccgatgcaagtgtgtcgctgtcgacggtgacc

SEQ ID NO: 18106 - DNA, 1113 bp, Homo sapiens; identical to SEQ ID NO: 5003
  SIMILAR (187)..(504): 1001254mologous to Homo sapiens GDNF receptor alpha,accession number U95847,Smith-Waterman Score=595.

SEQ ID NO: 18107 - DNA, 1173 bp, Homo sapiens; identical to SEQ ID NO: 5004
  SIMILAR (826)..(1170): 1001254mologous to Plasmid F Protein D,accession number M12987,Smith-Waterman Score=584.

SEQ ID NO: 18108 - DNA, 961 bp, Homo sapiens
  SIMILAR (960)..(511): 731254mologous to Streptomyces noursei NysC,accession number AF263912,Smith-Waterman Score=567.
atgcccaaccataaagcaatccttatcaaattcaaaaaaactgaaatcataccaatcacactcttggaccacagtacaataaaaattgaaatcaatattaagaaaattgctcaaaatcatacaatcacatggaaattaaacaacttgctcctgaattacttttggcctcttactgtttctctgtgtgaaatgtgcaaggatttttacagtctgggaatagagttttcccgttttcccctacaggagctccagaacaaagactgtgcattagagaagcctcacattgggcacagatgtggccttaatatccctgccctgctaagcactggtggagttgcaggagagaacatgtccttgtcgtcaacgctgcagcacatcctgaaactcatactggcatttttcggactaactgcgcgcaatgaagcgcagaaacgagcaatgcaagcgttaagcaattcgaagcctttcacgttccttaccggcccggcaggatctgaaattgctgagttaaagcgcttcgggtgttttgcccgacaccatccacggcaccaccggaacatccacgacagaacccgaacccggccccgcagactgactcggcactcccgggggctgttcgaggatgacgtgcgcgttagtaccactgatcccgaacgacgacacccccacccgacgaacacgaccactcctgggccagggcgtgttctccgtaaggagttgaaccgtccccgccgaccaatccacctccggcgacggcgattccacgtgcaacgtgcgtggcagctgcccgtgccgcatcgccatcaccatcttgatcacaccagccacacccgccgccgcttgcgtatgaccgatgttcgacttgaccgaccccaaccacaacggccggccaggatcacgatcacggccgtaggtggcgatcagcgcctgcgcctcgatcggatcaccaagcagcgtgccc

SEQ ID NO: 18109 - DNA, 873 bp, Homo sapiens; identical to SEQ ID NO: 5005
  SIMILAR (526)..(870): 1001254mologous to Plasmid F Protein D,accession number M12987,Smith-Waterman Score=584.

SEQ ID NO: 18110 - DNA, 1425 bp, Homo sapiens; identical to SEQ ID NO: 5017
  SIMILAR (1078)..(1422): 1001254mologous to Plasmid F Protein D,accession number M12987,Smith-Waterman Score=584.

SEQ ID NO: 18111 - DNA, 1602 bp, Homo sapiens; identical to SEQ ID NO: 13207
  SIMILAR (1255)..(1599): 1001254mologous to Plasmid F Protein D,accession number M12987,Smith-Waterman Score=584.

SEQ ID NO: 18112 - DNA, 1575 bp, Homo sapiens
  SIMILAR (942)..(229): 601254mologous to Streptomyces noursei NysC,accession number AF263912,Smith-Waterman Score=710.
tcatgatacacagacacagataaaagatgtaagtagacagcttgaggtttcagagtccctcctgcagtgtgtatagcacagatacaagataaatatccgaaacatgatagaacaaactgtagcctcccaaacccgtaattgcctgcccgaagatgtggatccaagtcggacagaagtttcgtcaaaaggcagcagcgacaccgtgaaaagcccggtaaagccccaggccaatcccaagccactgacaaccctgaccgaaaatacaaacccgatgcggcccccagcccccacagatccggtcaccaacccagaagcctcatgaccggcagacagcgctttcacaccgcacaacaacgtttcacggtccgaccccagcaccaccgctcgctcatccagcgccgaccgtgtcaacgccagcgagtacccaacatccagcgaggagacatcaggtcgctcgtccagataggtcatcaacgccgttgcctgcgcggatagcgcttcgggtgttttgcccgacaccatccacggcaccaccggaacatccacgacagaacccgaacccggccccgcagactgactcggcactcccgggggctgttcgaggatgacgtgcgcgttagtaccactgatcccgaacgacgacacccccacccgacgaacacgaccactcctgggccagggcgtgttctccgtaaggagttgaaccgtccccgccgaccaatccacctccggcgacggcgattccacgtgcaacgtgcgtggcagctgcccgtgccgcatcgccatcaccatcttgatcacaccagccacacccgccgccgcttgcgtatgaccgatgttcgacttgaccgaccccaaccacaacggccggccaggatcacgatcacggccgtaggtggcgatcagcgcctgcgcctcgatcggatcacctaagccgcggcccgccctatcgatgatcctgctacaaggaagcaagttatttaaatcccgatgagtctcagtttcctcatttgtaataatggggataagaatatgtgttctgtgggttatagtgtgaattggagataatgagcctaaaatgaggagtggagggctggcatgtaggagatgcctgagaattgataggtgctgctggtgttgtaatagtatttcctcggttactgattcctcttcttgcttccaatcttgtacacgggggaaagatgaagaacaattgtgctcctcaaattcctcatcaggagtaaatttacccaggagcccaggagggaagcagtgtcctccgagaagacccttgccaactggtcccttctgaagagccctcctcaacgtggcctgtggcccagggacttcctctgcgagctcgatgcagaacctgaatggacaacttctggaacacgaggagtgcccctggagacccactgaaatcactgggggagatacttgaacagccctggcctctgtaactaatgcaatggcatattgcagaaatgacagagcgccgtctgaggttaagtcataaaagccttgtcttgctttctcttgggtcactctttgtgggggaaagtcagccgccat

SEQ ID NO: 18113 - DNA, 895 bp, Homo sapiens; identical to SEQ ID NO: 5009
  SIMILAR (548)..(892): 1001254mologous to Plasmid F Protein D,accession number M12987,Smith-Waterman Score=584.

SEQ ID NO: 18114 - DNA, 1536 bp, Homo sapiens
  SIMILAR (906)..(115): 521254mologous to Streptomyces noursei NysC,accession number AF263912,Smith-Waterman Score=652.
ctaatttctcttcgtcaaaggcagcagcgaacaccgggaaagcccggtaaaggcccccggcccatccccagcccatggccaccctgaccggaaaacacaaacccgatgcggccccccagccccacaagatccggtcaccaacccagaagcctcatgaccggcagacagcgctttcacaccgcacaacaacgtttcacggtccgaccccagcaccaccgctcgctcatccagcgccgaccgtgtcaacgccagcgagtacccaacatccagcgaggagacatcaggtcgctcgtccagataggtcatcaacgccgttgcctgcgcggatagcgcttcgggtgttttgcccgacaccatccacggcaccaccggaacatccacgacagaacccgaacccggccccgcagactgactcggcactcccgggggctgttcgaggatgacgtgcgcgttagtaccactgatcccgaacgacgacacccccacccgacgaacacgaccactcctgggccagggcgtgttctccgtaaggagttgaaccgtccccgccgaccaatccacctccggcgacggcgattccacgtgcaacgtgcgtggcagctgcccgtgccgcatcgccatcaccatcttgatcacaccagccacacccgccgccgcttgcgtatgaccgatgttcgacttgaccgaccccaaccacaacggccggccaggatcacgatcacaaccgtaggtggcgatcagcgcctgcgctttctttgtcgcgcggatggctatgttagcgttgtaatgcgtggccagggaggcgcaggtagggggtagcaaaccgttaaaaggctgtggttgcgactgcgacatgggctccttttggatgtctggccactctggactgaagagcgagttcttggactgcgacgagtgctgggatgcctccggaggcatctgttgctgctgagactgaggcactggctgctgctgcatgtggccgtagctctggctctgggaatagggcaattgctgctcgagaggcggcatgccatggacggtggaccggatttgctgcgatggccgccgtatccggcgggaggcgggggctgggatccattgtagcgccggctgctgctgcggctgctggggcttggagcccgaagtcatcttgtggctgccgtgaggtggcatgcccagccctaccggcggcatgccgcgagaggatttgtgatagtccacgggcatagacggtcggccaggctgctggccgtatgagcgtcgggcggcatgccaccagggtaatttggcatcttgtgactggaggaagacgacgaagagctgctgcctggcactccgctcactgaggacgagcgctgatggccaccatcctgtcgtctttgctgcggcaccatcagccggtggcggcagtagtgacgacggatcccgttcccgctctctctcccgttcacgatctcggtcccgatcccggctgtcgttgccgtttaacagctctggtggtgtcgtgatgtttgagtggtagcccttcatcat

SEQ ID NO: 18115 - DNA, 1419 bp, Homo sapiens; identical to SEQ ID NO: 3349
  SIMILAR (715)..(957): 811254mologous to Mus musculus Pro-Pol-dUTPase polyprotein,accession number Y12713,Smith-Waterman Score=375.

SEQ ID NO: 18116 - DNA, 2787 bp, Homo sapiens; identical to SEQ ID NO: 13217
  SIMILAR (841)..(1989): 741254mologous to Homo sapiens TRIP protein,accession number AJ223075,Smith-Waterman Score=1408.

SEQ ID NO: 18117 - DNA, 1434 bp, Homo sapiens
tcaggataattgtttcagcatcgcaaccgcatcagactccggcatcgcaaactgcacccggtgccgggcagccacatccagcgcaaaaaccttcgtgtagacttccgttgaactgatggacttatgtcccatcaggctttgcagaactttcagcggtataccggcatacagcatgtgcatcgcataggaatggcggaacgtatgtggtgtgaccggaacagagaacgtcacaccgtcagcagcagcggcggcaaccgcctccccaatccaggtcctgaccgttctgtccgtcacttcccagatccgcgctttctctgtccttcctgtgcgacggttacgccgctccatgagcttatcgcgaataaatacctgtgcggtgaagaaggctggggtgagggatcccgaggggagggctgggctgttgagggcgatggagccgatgtcggtgccggagagcaccagcgggggcgctgagatttccaagcctttgggttttttggcctttgggggaagagatggagacttggtcttggagcccgatgacaggttcaagggctccagggaatcggagtcatggcaggcggcctccaggaagaggcttctgtgttcagaagggaggggtgagttgggggacagggacggggaccgagatgagaagggtgaggcggatgaaatactggcagcgtttggcaacattaaagaggagatcttggccgagacggacgagaacaggaaggcggacgccgccgcagcctctgacgtggaaggcagggacaccaccggcctggtgacgtgcttgtcggttttattggtcacaaacctgatcacagtcctgacttcttccacgggggggctgtcttcgggcggctcctccagcttctccgtcttgatggccttgaaggcgtctggtgggttctgcagggaattaatggtgaaggacgagtacaggcctgagtggatgtattcgttgcggctcgtgcttctgagggcggccaggccgtgtttgtgggcctcgcggccctccggagacgccttgcagtcgctgtcctgcagcagaaggctctcccggctgatctccaccgcgtgaggatccatcttcaggatctccgggaaagagacaaacttgtacacaaacttctgcccgatcaccttcttgatgatgttcttgtcataatagtatcgcagggctctgctcagcttatcatagttcatatttgttttgttttttcggagtccccacagcttggccacttcttctgctttgaggagcttgaattcaccatcgttcgaggtccagcagatcaaatgctcatgtttctgatccagcagcaactgcaacaggaactgccacagcgtgattgcactctccataccatgctgcaggtcaaagcccaccatcacagatgcacagatgggaaaagcaatttctcccat

SEQ ID NO: 18118 - DNA, 1314 bp, Homo sapiens
  SIMILAR (1)..(393): 871254mologous to Cloning vector pZC320 SopA,accession number U26464,Smith-Waterman Score=596.
gatctggctctgaaggggctacgtgttttgctcgtggaaggtaacgacccccagggaacagcctcaatgtatcacggatgggtaccagatcttcatattcatgcagaagacactctcctgcctttctatcttggggaaaaggacgatgtcacttatgcaataaagcccacttgctggccggggcttgacattattccttcctgtctggctctgcaccgtattgaaactgagttaatgggcaaatttgatgaaagtaaactgcccaccgatccacacctgatgctccgactggccattgaaactgttgctcatgactatgatgtcatagtctatgttgaagtcgaggagcttatcggggaaataggagaagtacggacgccacacgtatttattcgcgataagctcatggagcggcgtaaccgtcgcacaggaaggacagagaaagcgcggatctgggaagtgacggacagaacggtcaggacctggattggggaggcggttgccgccgctgctgctgacggtgtgacgttctctgttccggtcacaccacatacgttccgccattcctatgcgatgcacatgctgtatgccggtataccgctgaaagttctgcaaagcctgatgggacataagtccattcagtcaacggaagtctacacgaaaggttttgcgctggatgtggctgccccgcaccgggtgcagtttgcgatgccggagtctgatgccggtgcaatgctgaaacattatcctgagaataaatgcttggcctttatatggaaagcagcttcggtccccggtccccctcgttctgcccatgcaagagctgcatctatagtcaagttcgaccgtcttctcagcgctccgccagggccgtgggccgaccccggcggggccgatccgagggcctcactaaaccatccaatcggtagtagcgacgggcgttacgcgacccccgacggtcggcgtcccccacttcttagaggcaagtggcgttcaccacccgagattgacatacaggtctgtgatgcccttagagtccggggctgcacgcgcgctacactgactggctcagcgtgtgcctaccctacgccggcaggcgcgggtaacccgttgaaccccattcgtgatggggatcggggattgcaattattccccatgaacgaggaattcccagtaagtgcgggtcataagcttgcgttgattaagtccctgccctttgtacacaccgcccgtcgctactaccgattggatggtttagtgaggccctcggatcggccccgccggggtcggcccacggccctggcggagcgctga

SEQ ID NO: 18119 - DNA, 1424 bp, Homo sapiens
  SIMILAR (25)..(405): 981254mologous to synthetic construct chloramphenicol acetyltransferase,accession number A02739,Smith-Waterman Score=691.
atgataatagtccgcctaagcactaccgttttccatgagcaaactgaaacgttttcatcgctctggagtgaataccacgacgatttccggcagtttctacacatatattcgcaagatgtggcgtgttacggtgaaaacctggcctatttccctaaagggtttattgagaatatgtttttcgtctcagccaatccctgggtgagtttcaccagttttgatttaaacgtggccaatatggacaacttcttcgcccccgttttcaccatgggcaaatattatacgcaaggcgacaaggtgctgatgccgctggcgattcaggttcatcatgccgtttgtgatggcttccatgtcggcagaatgcttaatgaattacaacagtactgcgatgagtggcaagacagggctgcagaacgataccacgctgatcgccagaccgtgggtcaagccataccttggtttggagataatgaggatagtaggaaattgaccacatcttacctggtgtttcccttgtactatgtacatacctcttttctctcagctattgtgttgccctgtgagctttggccaatgtggggcattccgaaacccgggacacccaccttccccgaaccccgaatttttcctgggccccagaaggtgcaatccaagtctcgggcacaaagctttggttcaagaggcagcaagcgacacacccggaaaaagctccgggtaaaagccccccgggccccatccccaagcccattggaccaccctgacccggaaaacacaaacccgatgcggcccccagcccccacagatccgggtcaccaaacccagaagcctcatgaccggaagacagcgctttcacaccgcacaacaacgttttcacggtccgaccccagcaccaccgctcgctcatccagcgccgaccgtgtcaacgccagcgagtacccaacatccagcgaggagacatcaggtcgctccgcttcgggtgttttgcccgacaccatccacggcaccaccggaacatccacgacagaacccgaacccggccccgcagactgactcggcactcccgggggctgttcgaggatgacgtgcgcgttagtaccactgatcccgaacgacgacacccccacccgacgaacacgaccactcctgggccagggcgtgttctccgtaaggagttgaaccgtccccgccgaccaatccacctccggcgacggcgattccacgtgcaacgtgcgtggcagctgcccgtgccgcatcgccatcaccatcttgatcacaccagccacacccgccgccgcttgcgtatgaccgatgttcgacttgaccgaccccaaccacaacggccggccaggatcacgatcacggccgtaggtggcgatcagcgcctgcgcctcgatcggatcaccaagccgcgtgcccgtcccaattga

SEQ ID NO: 18120 - DNA, 2489 bp, Homo sapiens
  SIMILAR (1860)..(2276): 351254mologous to Rattus norvegicus dendrin,accession number X96589,Smith-Waterman Score=100.
  misc_feature (1)...(2489): n = a,t,c or g
ccatttccatataaaggcaaaggcatttattctcaggataattgtttcagcatcgcaaccgcatcagactccggcatcgcaaactgcacccggtgccgggcagccacatccagcgcaaaaaccttcgtgtagacttccgttgaactgatggacttatgtcccatcaggctttgcagaactttcagcggtataccggcatacagcatgtgcatcgcataggaatggcggaacgtatgtggtgtgaccggaacagagaacgtcacaccgtcagcagcagcggcggcaaccgcctccccaatccaggtcctgaccgttctgtccgtcacttcccagatccgcgctttctctgtccttcctgtgcgacggttacgccgctccatgagcttatcgcgaataaatacnccgaagaggacctcctcggtttggcttatgacatctaggatctccccgacactgtcgctcagttccgctgtcttcccatcttcctctggcgaactgtttccaacctcgggcagggtcctctcattccgccaggaggcgcccggggcttctgtgtcgcttccatcagaggagccgctatggacgctgagctcctcagcttcgtccgtgtccgagtcaggggctgtgtggcggcggatacgggacacggcttctcgcagggccccggcgtagggccctggggtccgcgcccagccccggccggcgcgccgctggaccaccgccacttccgacccctcggctctgccctgggctcccgaagctgctgggcctaaggcttggtgctctgggctacctggctgcgtgggggcgtcccgcaggtttacttcgggggccgggagccccaagatgcggaaagtgcgctcctccagtgtggagtcccccggcctcccgccctcagcttcgcccccgcggcccccgccgggctggtgtaaaaggcgactgctcgacagccgcttttgacaaggggaaggaaagaccgtggccccttcaccctcctccttgccgggcttcgattggctgggggaatcccccaccacgcgtgtcaccccagagggcaaaagctgcacctgctgggttcggggggttggaacatattgggatcgtatcactacgcacgtggcgtcaatgacaaagacgccttccccacgggacaggccctgggaactgcggggcaaggtgtgggcacggcgggtcgccttccaaccctccagggtctccggtcctgccccctctccaagacccagagattctctccatccggtgcctccgggagcccagggtctggggagtgtctggctatggcggggcggctgctttttaggggagggaatccagcatttgggaaaccagatctgttctccttctttcccttccctcgagcccttgaggtggtgcctggatctgggagcgggatgcggggcacagggagccgcagttgcagaccccgcaggagctatctcggtgcctgcgctccctgtagctttggcttggggatggctgtcgctaccactgttcaggtcagcagcagccagccccaggcttttctccacgacccccttgccgggctctggccttgctctggccgctccacagcctggggatccccccaagagaccttgcccctgtcggagaccccaagccccgaggacgtcccggtagatccgaggatccagcctcttctttgtgcgccctccgtctgtcctggctggagtcgcagctggggctgatgaagtgggcacctgagagttcccggggcctctcttagtccccaaggtcctatgggggccttcgtaagaaggtggagccacgtagggtggcggccggtcccagcggcgtcgtggggcggtcccggcagaacctctcagcagcaggtgagcctcgtagcttgggggcccgggccgccgacctccccagggccccgcccacgccgaccctgggtcgctctgcggctgcgcggatggacggggcgctcgccccacaggcgccaggcgctccggccgcaagggagcagggagccctgccagctgggccacccgaggggcgttgcggggctccgggcggggtcgacccggggggctccgtcgggccccaccagccttgcgcctttttcgctcggtctccttggcctcccgctcctgcgacgccgctttccttttctcttgctcccgagctcggacctcggccaggggccccgcccgccagttggtcgcctcctgcagcaccctggaggcccagggccggcggggcggcggctgtggggatcccgggcgcggcccacacgtgcggttctggaacccgcgagcccagtggctggcctggaagtccatgggctgtcgagaaggggcgcggcgactataatgacaggaaatagtcttcacttctatcaccaatagcttggacttctgcacccagaggcagctgccagactcctcatcctggagctcccgggggctgtcaggcccctcggagaacagtgggccatccagcat

SEQ ID NO: 18121 - DNA, 1422 bp, Homo sapiens
  SIMILAR (705)..(262): 721254mologous to Streptomyces noursei NysC,accession number AF263912,Smith-Waterman Score=553.
atggcaaaccatcgaggcggttccggcaattttgcagaagaccgcgaaagagcatcagaagcagctcgtcaaaaagccatcaccgccggttacccggtggttgatactgatgaaaaatcgccgccgtatttttcggttctccctgcccgggatccttccttgttccggcaggtcaggtgctttcactccgcctcaaccgccgtttctcggttccgcctccgagcccccccggttctctcttccagcgccggcccgtgtcatccgccacgcttcgggtgttttgcccgacaccatccacggcaccaccggaacatccacgacagaacccgaacccggccccgcagactgactcggcactcccgggggctgttcgaggatgacgtgcgcgttagtaccactgatcccgaacgacgacacccccacccgacgaacacgaccactcctgggccagggcgtgttctccgtaaggagttgaaccgtccccgccgaccaatccacctccggcgtcggcgattccacgtgcaacgtgcgtggcagctgcccgtgccgcatcgccatcaccatcttgatcacaccagccacacccgccgccgcttgcgtatgaccgatgttcgacttgaccgaccccaaccacaacggccggccaggatcacgatcacggccgtaggtggcgatcagcgcctgcgcctcgatcggatcaccaagccgcaatgggaaagagaagaacttgataaaaagcaaaaagaaaaggcatctttatggaaagagaagaaaaccagagtgggaaatctgggaaagggttacctaccttacggaagtgaactacactccccagagagaagccccaaaacatacaggttctctgaatcctcagagagattatttaatgggcatcatttgcaagacatcagtttctcaactccaaaaggagaaggtcagaattcaggaaatgttagaagtccagcctcccctaatgagttcgcatttggtagctacgtgccttcgtttgcaaaaacatcagagaggtcaaatccatttagtcaaaaaagtagttttttggatttccaaagaaacagtatggaaaaacttagtaaagatggtgtagatttaattacaagaaaagagaaaaaagctaatttgatggaacagttatttggtgccagtggtagcagcaccatttcctccaaaagcagtgacccaaattctgtggcttccagtaaaggagacattgaccctctaaattttctccctgggaataaaggcagcagagatcaagaacatgatgaagatgaagactttttcctcagtgaaggaagaagttttaatccaaataggcaccgattaaaacatgcagacgataaaccagcagtaaaagcagctgattctgtagaagatgaaattgaagaagtagcactgagatga

SEQ ID NO: 18122 - DNA, 1891 bp, Homo sapiens
  SIMILAR (1)..(1320): 1001254mologous to Homo sapiens KIAA0701 protein,accession number AB014601,Smith-Waterman Score=2211.
atcctgctttcagagaacttaaggaaagatgtagaagctgtaactggcagtcctgctagtcagacatccatttgtattggaattttacttagaagtgcagaactggctcttttgctccatccagtggatcaagcaaatactcttaagtctcctgtttctgaaagtgtgagcccagtggtacctgattatttgcctacagaaaatggggattttttgtcttcaaaaagaaaacaaattagtagggatataaatagaattagaagtgtaactgttaatcatatgtcagacaacagatctatgagtgttgaccttagccatatccctttaaaggatcctttgctttttaaatcagctagtgatacaaatctgcaaaaaggcatttcttttatggactatttatcagataaacatttagggaaaataagtgaagatgaaagtagtggacttgtttacaaaagtggctcaggagaaattggatcagaaacaagtgacaaaaaggattcattttatacagattcaagtagtatcttaaactacagagaagattcgaatatactttcatttgatagtgatggtaatcaaaacatactttcaagtactttaactagtaaaggaaatgaaaccatagagtccatctttaaagctgaagatttgcttccagaagcagcttcactctctgaaaacctggatatcagtaaagaagagacccccccagttagaacacttaaatcacagtcatctttaagtggaaagcctaaggaacgttgcccacccaacctggctcctctctgtgtttcttataagaatatgaaaagaagctcttcacaaatgtcattggataccatttcacttgacagcatgatattggaagaacagttattagaaagtgatggaagtgatagccatatgtttttggaaaaaggaaataaaaagaacttaactacaaattacaggggcacagcagaaagtgtgaatgctggtgcaaacctacagaattatggtgaaacttctccagatgccatcagtacaaattcagagggtgctcaggaaaatcatgatgacctgatgtccgttgtggtatttaaaattactggtgttaatggggaaattgacatccgaggggaagatacagaaatctgtcttcaagtgaaccaggtgacaccagaccaattaggcaatatcagccttcggcattacctttgtaatcgtccagttggttccgatcagaaagctgtaattcattccaaatcctctcctgagatttctctgagatttgaaagtgggcctggtgctgtaatacactctttacttgcagaaaaaaaatggatttctgcagtgccacatagaaaacttcagcactgagtttcttacatcttctcttatgaatattcaacattttttggaagatgaaactgttgcaacagtaatgccaatgaagatacaagtttctaacacgaaaataaatttaaaagatgatagtccccggagtagtacagtatcccttgaaccagctcctgtaactgtacatattgatcatcttgtggtagagagaagtgacgatggctcttttcatatcagagattctcacatgcttaacactggaaatgatttgaaagaaaatgtcaaaagcgattcagtgctgctgaccagtggaaagtatgatctgaagaaacaacgcagtgtcacgcaagccactcagacaagcccaggggttccttggccttctcagtcagctaactttcctgagttctcctttgacttcactagggaacagctcatggaagagaatgaatctcttaaacaggaactggctaaagctaaaatggctcttgcagaggctcacttggaaaaagatgctcttcttcatcatataaagaagatgacagttgaa

SEQ ID NO: 18123 - DNA, 1800 bp, Homo sapiens
  SIMILAR (1)..(720): 801254mologous to Escherichia coli, LBB84, plasmid pXT107, IS10L/R-1, Peptide PlasmidTransposonInsertionMutant, 402 aa transposase,accession number S67119,Smith-Waterman Score=977.
atgtgcgaactcgatattttacacgactctctttaccaattctgccccgaattacacttaaaacgactcaacagcttaacgttggcttgccacgcattacttgactgtaaaactctcactcttaccgaacttggccgtaacctgccaaccaaagcgagaacaaaacataacatcaaacgaatcgaccgattgttaggtaatcgtcacctccacaaagagcgactcgctgtataccgttggcatgctagctttatctgttcgggcaatacgatgcccattgtacttgttgactggtctgatatccgtgagcaaaaacggcttatggtattgcgagcttcagtcgcactacacggacgttctgttactctttatgagaaagcgttcccgctttcagagcaatgttcaaagaaagctcatgaccaatttctagccgaccttgcgagcattctaccgagtaacaccacaccgctcattgtcagtgatgctggctttaaagtgccatggtataaatccgttgagaagctgggttggtactggttaagtcgagtgggttggcggcgtcatgctcagaacaaagttggagcagctcgttcatcagaaacccggtaccggcacgtaggcaaccagaacgcctttaccgtgggcagtaatctgggccggtcattgcatttgaaaaaacactcgcgctgcgacgcttttgaagattcttgtgaaatgctgttcatgggggccctcttcagacatataaaggtttttgctgggggggctgcagtagttcataatgggacgggcacgcggcttggtgatccgatcgaggcgcaggcgctgatcgccacctacggccgtgatcgtgatcctggccggccgttgtggttggggtcggtcaagtcgaacatcggtcatacgcaagcggcggcgggtgtggctggtgtgatcaagatggtgatggcgatgcggcacgggcagctgccacgcacgttgcacgtggaatcgccgtcgccggaggtggattggtcggcggggacggttcaactccttacggagaacacgccctggcccaggagtggtcgtgttcgtcgggtgggggtgtcgtcgttcgggatcagtggtactaacgcgcacgtcatcctcgaacagcccccgggagtgccgagtcagtctgcggggccgggttcgggttctgtcgtggatgttccggtggtgccgtggatggtgtcgggcaaaacacccgaagcgctatccgcgcaggcaacggcgttgatgacctatctggacgagcgacctgatgtctcctcgctggatgttgggtactcgctggcgttgacacggtcggcgctggatgagcgagcggtggtgctggggtcggaccgtgaaacgttgttgtgcggtgtgaaagcgctgtctgccggtcatgaggcttctgggttggtgaccggatctgtgggggctgggggccgcatcgggtttgtgtttttccggtcagggtggtcagtgctggggatgggccgggggctttacccgggcttttcccgggggttggcttgctggccttttgaccaaaacctttgggcccgaagctcgggatgccccacttctgggggcccaggaaaaactccgggggttctggggcaaggtggtttgttcccggtttctggtatagccccaacctttgctctgggaatatcgggcaccgtttggtgtctggagatggctgaggagcccatgactttcctgtatgatcccttgaacgtaacttccaagtcagtagatttcttctcaggttttggaggtttctattaa

SEQ ID NO: 18124 - DNA, 1574 bp, Homo sapiens
  SIMILAR (230)..(1195): 751254mologous to Cloning vector pSacBII SacB,accession number U09128,Smith-Waterman Score=1249.
  misc_feature (1)...(1574): n = a,t,c or g
acaggaagctacagacgtagaaaccaaggcagtgagtgaagtctgtctggtggcagaggaggaggaaggaggcagcccgaaagacgctgatgacacatcaatctacatgttttatcaaaaggtcggcgacaactcaatcgacagctggaaaaacgcgggccgtgtctttaaagacagcgataagttcgacgccaacgatccggggctgaaagatcagacgcaagaatggtccggttctgcaacctttacatctgacggaaaaatccgtttattctacactgactattccggtaaacattacggcaaacaaagcctgacaacagcgcaggaggctaggcagaaaatacttgacccaatcttggctaaatctctgattgggactctagaggatccccggccgctgcaaaacgctgacggaacagtagctgaatacaacggctatcacgttgtgtttgctcttgcgggaagcccgaaagacgctgatgacacatcaatctacatgttttatcaaaaggtcggcgacaactcaatcgacagctggaaaaacgcgggccgtgtctttaaagacagcgataagttcgacgccaacgatccgatcctgaaagatcagacgcaagaatggtccggttctgcaacctttacatctgacggaaaaatccgtttattctacactgactattccggtaaacattacggcaaacaaagcctgacaacagcgcaggtaaatgtgtcaaaatctgatgacacactcaaaatcaacggagtggaagatcacaaaacgatttttgacggagacggaaaaacatatcagaacgttcagcagtttatcgatgaaggcaattatacatccggcgacaaccatacgctgagagaccctcactacgttgaagacaaaggccataaataccttgtattcgaagccaacacgggaacagaaaacggataccaaggcgaagaatctttatttaacaaagcgtactacggcggcggcacgaacttcttccgtaaagaaagccagaagcttcagcagagcgctanaaaacgcgatgctgagttagcgaacggcgccctcggtatcatagagttaaatatgattaccattgaaaaagtatttattcgcgataagctcatggagcggcgtaaccgtcgcacaggaaggacagagaaagcgcggatctgggaagtgacggacagaacggtcaggacctggattgtcgaggcggatgccagccgctgctgctgacggtgtgacgttctctgttccggtcacaccacatacgttccgccattcctatgcgatgcacatgctgtatgccggtataccgctgaaagttctgcaaagcctgatgggacataagtccatcagttcaacggaagtctacacgaaggtttttgcgctggatgtggctgcccggcaccgggtgcagtttgcgatgccggagtctgatgcggttgcgatgctgaaacaattatcctgagaataaatgccttggcctttatatggaaatgtggaactgagtggatatgctgtttttgtctgttaaacagagaagctggctgttatccactgagaa

SEQ ID NO: 18125 - DNA, 1860 bp, Homo sapiens
  SIMILAR (628)..(1500): 991254mologous to Cloning vector pZC320 SopA,accession number U26464,Smith-Waterman Score=1514.
atggcggaaacagcggttatcaatcacaagaaacgtaaaaatagcccgcgaatcgtccagtcaaacgacctcactgaggcggcatatagtctctcccgggatcaaaaacgtatgctgtatctgttcgatgaccagatcagaaaatctgatggcaccctacaggaacatgacggtatctgcgagatccatgttgctaaatatgctgaaatattcggattgacctctgcggaagccagtaaggatatacggcaggcattgaagagttacgcggcgaaggaagtggttctttatcgccctgaagaggatgccggcgatgaagaaggctatgaatcttttccttggtttatcaaacgtgcgcacagtccatccagagggctttacagtgtacatatcaacccatatctcattcccttctttatcgggttacagaaccggtttacgcagtttcggcttagtgaaacaaaagaaatcaccaatccgtatgccatgcgtttatacgaatccctgtgtcagtatcgtaagccggatggctcaggcatcgtctctctgaaaatcgactggatcatagagcgttaccagctgcctcaaagttaccagcgtatgcctgacttccgccgccgcttcctgcagtgcataaacgctggtcatgaaatgacgaaggctatcgccattgcacagtttaatgatgacagcccggaagcgaggaaaataacccggcgctggagaataggtgaagcagcggatttagttggggtttcttctcaggctatcagagatgccgagaaagcagggcgactaccgcacccggatatggaaattcgaggacgggttgagcaacgtgttggttatacaattgaacaaattaatcatatgcgtgatgtgtttggtacgcgattgcgacgtgctgaagacgtatttccaccggtgatcggggttgctgcccataaaggtggcgtttacaaaacctcagtttctgttcatcttgctcaggatctggctctgaaggggctacgtgttttgctcgtggaaggtaacgacccccagggaacagcctcaatgtatcacggatgggtaccagatcttcatattcatgcagaagacactctcctgcctttctatcttggggaaaaggacgatgtcacttatgcaataaagcccacttgctggccggggcttgacattattccttcctgtctggctctgcaccgtattgaaactgagttaatgggcaaatttgatgaaggtaaactgcccaccgatccacacctgatgctccgactggccattgaaactgttgctcatgactatgatgtcatagttattgacagcgcgcctaacctgggtatcggcacgattaatgtcgtatgtgctgctgatgtgctgattgttcccacgcctgctgagttgtttgactacacctccgcactgcagtttttcgatatgcttcgtgatctgctcaagaacgttgatcttaaagggttcgagcctgatgtatttattcgcgataagctcatggagcggcgtaaccgtcgcacaggaaggacagagaaagcgcggatctgggaagtgacggacagaacggtcaggacctggattggggaggcggttgccgccgctgctgctgacggtgtgacgttctctgttccggtcacaccacatacgttccgccattcctatgcgatgcacatgctgtatgccggtataccgctgaaagttctgcaaagcctgatgggacataagtccatcagttcaacggaagtctacacgaaggtttttgcgctggatgtggctgcccggcaccgggtgcagtttgcgatgccggagtctgatgcggttgcgatgctgaaacaattatcctga

SEQ ID NO: 18126 - DNA, 1068 bp, Homo sapiens
  SIMILAR (753)..(199): 701254mologous to Streptomyces noursei NysC,accession number AF263912,Smith-Waterman Score=631.
tcatctattagaatcaacaggacttaagactaatttcaggaactgtgactcagacctgccagtgtttgatgtcatgtaaaccagacttccaaggctcactttatgaacaactctgtaagtagttaggttgcggagatcacaaacacctagaagcctcatgaccggcagacagcgcttcacaccgcacaacaacgtttcacggtccgaccccagcaccaccgctcggtcatccagcgccgaccgtgtcaacgccagcgagtacccaacatccagcgaggagacatcaggtcgctcgtccagataggtcatcaacgccgttgcctgcgcggatagcgcttcgggtgttttgcccgacaccatccacggcaccaccggaacatccacgacagaacccgaacccggccccgcagactgactcggcactcccgggggctgttcgaggatgacgtgcgcgttagtaccactgatcccgaacgacgacacccccacccgacgaacacgaccactcctgggccagggcgtgttctccgtaaggagttgaaccgtccccgccgaccaatccacctccggcgacggcgattccacgtgcaacgtgcgtggcagctgcccgtgccgcatcgccatcaccatcttgatcacaccagccacacccgccgccgcttgcgtatgaccgatgttcgacttgaccgaccccaaccacaacggccggccaggatcacgatcacggccgtaggtggcgatcagcgccatggccatgcaggcccgtgggctcaagagggtggaatagcgtaggggctggcagatggcaacatatcggtcataggccatggccgtgagcaggcagcactccgagatgcccaggacaatgaagacgtacatctgggctgcacagccctggaaagagatggcctggggatgcggggagcccagattggccagggtcctgggcacgatgtcagtggtgtagaagagctccaccactgagagttggcgcaggaagaagtacatgggggagtgcagggcagggctgaccgtcagggcaacggtaaggctgtgaaccaccgtcat

SEQ ID NO: 18127 - DNA, 2537 bp, Homo sapiens
  SIMILAR (750)..(2000): 991254mologous to Cloning vector pBACe3.6 levansucrase,accession number U80929,Smith-Waterman Score=2193.
cagacttcgaagaaaagttgactcgggtcctcagttgacccaaagtatctatgataccatgatctcatggctgatggaactattcagtgctgctgaaacagacctctctgaggagccctggatcctccactctgggttcatcaatggggacgggcacgcggcttggtgatccgatcgaggcgcaggcgctgatcgccacctacggccgtgatcgtgatcctggccggccgttgtggttggggtcggtcaagtcgaacatcggtcatacgcaagcggcggcgggtgtggctggtgtgatcaagatggtgatggcgatgcggcacgggcagctgccacgcacgttgcacgtggaatcgccgtcgccggaggtggattggtcggcggggacggttcaactccttacggagaacacgccctggcccaggagtggtcgtgttcgtcgggtgggggtgtcgtcgttcgggatcagtggtactaacgcgcacgtcatcctcgaacagcccccgggagtgccgagtcagtctgcggggccgggttcgggttctgtcgtggatgttccggtggtgccgtggatggtgtcgggcaaaacacccgaagcgctatccgcgcaggcaacggcgttgatgacctatctggacgagcgacctgatgtctcctcgctggatgttgggtactcgctggcgttgacacggtcggcgctggatgagcgagcggtggtgctggggtcggacgtgaaacgttgttgtgcgatccctaaacagcagcaaaacgaaaaataccaagtgcctcaattcgatcaatcaacgattaaaaatattgagtctgcaaaaggactcgatgtgtgggacagctggccgctgcaaaacgctgacggaacagtagctgaatacaacggctatcacgttgtgtttgctcttgcgggaagcccgaaagacgctgatgacacatcaatctacatgttttatcaaaaggtcggcgacaactcaatcgacagctggaaaaacgcgggccgtgtctttaaagacagcgataagttcgacgccaacgatccgatcctgaaagatcagacgcaagaatggtccggttctgcaacctttacatctgacggaaaaatccgtttattctacactgactattccggtaaacattacggcaaacaaagcctgacaacagcgcaggtaaatgtgtcaaaatctgatgacacactcaaaatcaacggagtggaagatcacaaaacgatttttgacggagacggaaaaacatatcagaacgttcatttttttatcgatgaaggcaattatacatccggcgacaaccatacgctgagagaccctcactacgttgaagacaaaggccataaataccttgtattcgaagccaacacgggaacagaaaacggataccaaggcgaagaatctttatttaacaaagcgtactacggcggcggcacgaacttcttccgtaaagaaagccagaagcttcagcagagcgctaaaaaacgcgatgctgagttagcgaacggcgccctcggtatcatagagttaaataatgattacacattgaaaaaagtaatgaagccgctgatcacttcaaacacggtaactgatgaaatcgagcgcgcgaatgttttcaaaatgaacggcaaatggtacttgttcactgattcacgcggttcaaaaatgacgatcgatggtattaactcaaacgatatttacatgcttggttatgtatcaaactctttaaccggcccttacaagccgctgaacaaaacagggcttgtgctgcaaatgggtcttgatccaaacgatgtgacattcacttactctcacttcgcagtgccgcaagccaaaggcaacaatgtggttatcacaagctacatgacaaacagaggcttcttcgaggataaaaaggcaacatttgcgccaagcttcttaatgaacatcaaaggcaataaaacatccgttgtcaaaaacagcatcctggagcaaggacagctgacatggctccaagtagcgaagcgagcaggactgggcggcggccaaagcggtcggacagtgctccgagaacgggtgcgcatagaaattgcatcaacgcatatagcgctagcagcacgccatagtgactggcgatgctgtcggaatggacgatatcccgcaagaggcccggcagtatttattcgcgataagctcatggagcggcgtaaccgtcgcacaggaaggacagagaaagcgcggatctgggaagtgacggacagaacggtcaggacctggattggggaggcggttgccgccgctgctgctgacggtgtgacgttctctgttccggtcacaccacatacgttccgccattcctatgcgatgcacatgctgtatgccggtataccgctgaaagttctgcaaagcctgatgggacataagtccatcagttcaacggaagtctacacgaaggtttttgcgctggatgtggctgcccggcaccgggtgcagtttgcgatgccggagtctgatgcggttgcgatgctgaaacaattatcctga

SEQ ID NO: 18128 - DNA, 873 bp, Homo sapiens; identical to SEQ ID NO: 5019
  SIMILAR (526)..(870): 1001254mologous to Plasmid F Protein D,accession number M12987,Smith-Waterman Score=584.

SEQ ID NO: 18129 - DNA, 2071 bp, Homo sapiens
  SIMILAR (1522)..(815): 631254mologous to Streptomyces noursei NysC,accession number AF263912,Smith-Waterman Score=672.
  misc_feature (1)...(2071): n = a,t,c or g
tcagtcagtagagatggaccactgtggtggagggcccggggctgctgagagaaaggcaggatacatctgtagaactgcccatggcaggttcatgttccagggctcccatctgggtacctgagcattttccatatagatcacaggtgttggggcccacatcggctcctgaaagtctccgggaatgccataggcgtggggctggtgctcgggaggtgcaaggtcagccacatcagcacagggaggacctgagaagacgctgatcttccatctgtatcccagaatcctgtgcagggcctctccataaggacattgcaaggggtggcaccttggcctctggttggcctcatgaatagtgaagtataagtcctgcaagcttatcagcatctggagacattcctgccagctcttctttatacctctgtgcttgagatgcggggcaactgcttttgatactgtgtgatacttcttcaccccgtacacttcacgctcaagaaattcccattcttgcaggaaactctggacttcctggctactccatggtttaattaactggactgagggcttttctggtccctggactgctttttttccctttggggaacccccgtataatccaaaatttaagaaaggccccttgcaagggacaacggatgtgggccccacaatgtcgttatcaaaaaatggggatttcgacggganccctttttcggaaccgatttttttccttgggccagatggtgcatccagcttcggcacaagttttggtccaagggcaagcagcggaccacgaaaaaagccccggtaaagcccccgggcccatccccagccattgaccacccttgaccgggaaaacacaaacccgatgcggccccaagcccccacagatccggtcaccaacccaaaacctccatgaccggcagacagcgctttcacaccgcacaacaaccgtttcacggtccgaccccagcaccaccgctcgctcatccagcgccgaccgtgtcaacgccagcgagtacccaacatccagcgaggagacatcaggtcgctcgtccagataggtcatcaacgccgttgcctgcgcggatagcgcttcgggtgttttgcccgacaccatccacggcaccaccggaacatccacgacagaacccgaacccggccccgcagactgactcggcactcccgggggctgttcgaggatgacgtgcgcgttagtaccactgatcccgaacgacgacacccccacccgacgaacacgaccactcctgggccagggcgtgttctccgtaaggagttgaaccgtccccgccgaccaatccacctccggcgacggcgattccacgtgcaacgtgcgtggcagctgcccgtgccgcatcgccatcaccatcttgatcacaccagccacacccgccgccgcttgcgtatgaccgatgttcgacttgaccgaccccaaccacaacggccggccaggatcacgatcacggccgtaggtggcgatcagcgcctgcgcctcggtcggcgttccaccctgtggtctgccaggtgacagcttgccccagcccctgctggagctcatgaggcccccgtggggaccctttcttccccagcacctatggtccgactcctctgaaggttcctcttcctgctcctggcccttgcctctccatggcggcttcacagattccaggcccacattgagaactctttctgtggccagctcctgtttgataaaccaaggaaaagattcatagcctttttcatcgccggcatcctcttcagggcgataaaaaaccacttccttccccgcgaaactcttcaatgcctgccgtatatccttactggcttccgcagaggtcaatccgaatatttcagcatatttagcaacatggatctcgcagataccgtcatgttcctgtagggtgccatcagattttctgatctggtcaacgaacagatacagcatacgtttttgatcccgggagagactatatgccgcctcagtgaggtcgtttgactggacgattcgcgggctatttttacgtttcaagagattgataaccgctgtttccgccat

SEQ ID NO: 18130 - DNA, 4274 bp, Homo sapiens
  SIMILAR (3323)..(2775): 681254mologous to Streptomyces noursei NysC,accession number AF263912,Smith-Waterman Score=646.
atgagtgaactcccattcacaattgcttccaagagaataaaatacctaggaatccaacttacaagggatgtgaaggacctcttcaaggagaactacaaaccactgctcaaggaaataaaagaggatacaaacaaatggaagaacattccatgctcatgggtaggaagaatcaatatcgtgaaaatggccatactgcccaaggtaatttacagattcaatgccatccccataaagctaccaatgactttcttcacagaattggaaaaaactactttaaagttcatatggaaccaaaaaagagcctgcatcgccaaggcaatcctaagccaaaagaacaaagctggaggcatcacactacctgacttcaaactgtactacaaggctacagtaacgaaaacagcatgtttgttaaacagaagggctctccccctggcaaaccggggaagaaaaaaccctgtttttggggggcccccaaaaacggtgccgatatccccagccaaagttggcggccatccggaaacccgggaacaaccccccctctcccgaaaccccccagttttttccctggggcccccagaatggggcaatcccaagcttggggccacaaaggcttttggttcaaaaagggcaagccaaccgaaccccccggaaaaaaggcccgggttaaaaagccccccgggggccaatcccccaaggccattggacccacccgtggcccgggaaaaccaccaaaacccgatatgcgggcccccaagccccccacagattccggtcaccaaacccagaagccctcatgaccggcagacagcgctttcacaccgcacatcaacgtttcacggtccgaccccagaaccaccgctcgctcatccagcgccgaccgtgtcaacgccagcgagtacccaacatccagcgaggagacatcaggtcgctcgtccagataggtcatcaacgccgttgcctgcgcggatagcgcttcgggtgttttgcccgacaccatccacggcaccaccggaacatccacgacagaacccgaacccggcgccgcagactgactcggcactcccgggggctgatgacgtgcgcgttagtaccactgatcccgaacgacgacacccccacccgacgaacacgaccactcctgggccagggcgtgttctccgtaaggagttgaaccgtccccgccgaccaatccacctccggcgacggcgattccacgtgcaacgtgcgtggcagctgcccgtgccgcatcgccatcaccatcttgatcacaccagccacacccgccgccgcttgcgtatgaccgatgttcgacttgaccgaccccaaccacaacggccggccaggatcacgatcacggccgtaggtggcgatcagcgcctgcgcctcgatcggatcaccaagccgccgaagcgagcaggactgggcggcggccaaagcggtcggacagtgctccgagaacgggtgcgcatagaaattgcatcaacgcatatagcgctagcagcacgccatagtgactggcgatgctgtcggaatggacgatatcccgcaagaggcccggcagtaccggcataaccaagcctatgcctacagcatccagggtgacggtgccgaggatgacgatgagcgcattgttagatttcatacacggtgcctgattttgggctccgttgaagagagctcggtcttttggggtgtcaccaacttcaattatcttggcgccagccaagagttgcattataaggccagacgtgacaataggagagatccctagctccatcaatgtgcctctgttagaggctagaatcactctcatccaatagaaagggtcagctgaatctgaagacatgatcccaaacaggggaatctggcagcacactaagaagataaagagggtgatagcggtccacagcactttctccttaaactgaatttgccatggcggcggctgctcgggctccgggtcccgcttcagctcagctctgctccgcgtgaggcgacgctgcccgcggcccagcgcgttccactgcacagcagctccgccgagagacacgtcagtgcgagcaccctcgctgtctgagtcattaagcaaacccggaggcttgtcgtgggtgtgggtccccttccatctgagaacgaatgggatgagtttctggagagacttggccggagaagggccggggcagctcgggaagtagtctgcctcacagaagaattcaggaaggcctcctgggagagtacctttgtgccgagccttgatagattctcggccagtgttgacagtagtggggctgaatgccttccatacgatggtttcacagatgttagttgcaatgaagagagaaataccagagccaaggccatatcctttttgcaggagttcatccaaaagtaggacaattaagccagcaacaaagagctgaatggtgattagcaggcaaattccagcacccatttcagaagggtccccatacatcccggtcatcacatacacgatagactggccgatagtaatgatcatgccaaataccagctcggccaaagcttcgtcaaaggcaccagggaacaccggaaaagcccggtaaagccccgggcccatccccagccattgaccaccttgaccggaaaacacaaactcgtatcggaccgccagactcccacagaaccgggtcaacaacccagtaagctcaatgaccggcagaacagcgcttatcacaccgcacactaacgtttcacggtccgaccacagcaccaccgctcgctcatccagcgccgacccgtgtcaacgccagcgagtacccaacatccagcgaggagacatcaggtcgctcgtccagataggtcatcaacgccgttgcctgcgcggatagcgcttcgggtgttttgcccgacaccatccacggcaccaccggaacatccacgacagaacccgaacccggccccgcagactgactcggcactcccgggggctgttcgaggatgacgtgcgcgttagtaccactgatcccgaacgacgacacccccacccgacgaacacgaccactcctgggccagggcgtgttctccgtaaggagttgaaccgtccccgccgaccaatccacctccggcgacggcgattccacgtgcaacgtgcgtggcagctgcccgtgccgcatcgccatcaccatcttgatcacaccagccacacccgccgccgcttgcgtatgaccgatgttcgacttgaccgaccccaaccacaacggccggccaggatcacgatcacggccgtaggtggcgatcagcgcctgcgcctcgatcggatcaccaagccgcgtgcccgtcccattgataacgcagatgccgttggcgtacatgaagttcacgccgtctggcctggtagccgcatgcgcaccatggcttcggcagcggcgggtagtaacagctgggtacaggtgaaaacacaccgcaccattggcgatgccgtcgctcatctcaaaggccagggcatgcagattctggcaacccatctttctgataacgctgtcgatttccgcgaaattgattacactcgcccgacctgcattttgatgggacaggagaaaacgggcatcacgcaggaagcattggccctgcgtgaaaacagcatgttgccggaagcagagcaacaacgcctgttgtttgaaggcggctatccggtgctggcgaaagtcgcaaaacgcaaaggcctgccttatccccacgtcaatcagcaaggcgagatcgaagctgatgccgactgatgggctactatgcaggtgacgtatcatttggtccgcccgaaacaggttggccagcgtgaataacatcgccagttggttatcgtttttcagcaaccccttgtatctggctttcacgaagccgaactgtcgcttgatgatgcgaaatgggtgctccaccctggcccggatgctggctttcatgtattcgatgttgatggccgttttgttcttgcgtggatgctgtttcaaggttcttaccttgccggggcgctcggcgatcagccagtccacatccacctcggccagctcctcgcgctgtggcgccccttggtagccggcatcggctgagacaaattgctcctctccatgcagcagattacccagctgattgaggtcatgctcgttggccgcggtggtgaccaggctgtgggtcaggccactcttggcatcgacaccaatgtgggccttcatgccaaagtgccactgattgcctttcttggtctgatgcatctccggatcgggtttctgctctttgttcat

SEQ ID NO: 18131 - DNA, 1776 bp, Homo sapiens
  SIMILAR (1776)..(829): 951254mologous to Cloning vector pZC320 SopA,accession number U26464,Smith-Waterman Score=1559.
tcaggataattgtttcagcatcgcaaccgcatcagactccggcatcgcaaactgcacccggtgccgggcagccacatccagcgcaaaaaccttcgtgtagacttccgttgaactgatggacttatgtcccatcaggctttgcagaactttcagcggtataccggcatacagcatgtgcatcgcataggaatggcggaacgtatgtggtgtgaccggaacagagaacgtcacaccgtcagcagcagcggcggcaaccgcctccccaatccaggtcctgaccgttctgtccgtcacttcccagatccgcgctttctctgtccttcctgtgcgacggttacgccgctccatgagcttatcgcgaataaatacctgtgacggaagatcacttcgcagaataaataaatcctggtgtccctgttgataccgggaagccctgggccaacttttggcgaaaatgagacgttgatcggcacgtaagaggttccaactttcaccataatgaaataagatcaattcctgggcatcctgtcctactgatgaatttctcactgggagagcaccagataatggcattgcaggaacaggggtgaaacctgcaccaacacgcctttcctgtgccttctccagcttacaaccctgctctgggtaaataccactgccccagatcattttcttttccactgaaagaatcttatcttggtgacccaggaaatccagggcttgcagccagatacggtgctgtgggtgtggtgcctccgcttggccaaacagccgcatataacaacacagaattagaagtggagtcagggcaatgcgtctcactcgccactcttttatctctggagacaggttgctattaatcactccgaccacatctatcaggcttctatcaggctcgaaccctttaagatcaacgttcttgagcagatcacgaagcatatcgaaaaactgcagtgcggaggtgtagtcaaacaactcagcaggcgtgggaacaatcagcacatcagcagcacatacgacattaatcgtgccgatacccaggttaggcgcgctgtcaataactatgacatcatagtcatgagcaacagtttcaatggccagtcggagcatcaggtgtggatcggtgggcagtttaccttcatcaaatttgcccattaactcagtttcaatacggtgcagagccagacaggaaggaataatgtcaagccccggccagcaagtgggctttattgcataagtgacatcgtccttttccccaagatagaaaggcaggagagtgtcttctgcatgaatatgaagatctggtacccatccgtgatacattgaggctgttccctgggggtcgttaccttccacgagcaaaacacgtagccccttcagagccagatcctgagcaagatgaacagaaactgaggttttgtaaacgccacctttatgggcagcaaccccgatcaccggtggaaatacgtcttcagcacgtcgcaatcgcgtaccaaacacatcacgcatatgattaatttgttcaattgtataaccaacacgttgctcaacccgtcctcgaatttccatatccgggtgcggtagtcgccctgctttctcggcatctctgatagcctgagaagaaaccccaactaaatccgctgcttcacctattctccagcgccgggttattttcctcgcttccgggctgtcatcattaaactgtgcaatggcgatagccttcgtcatttcatgaccagcgtttatgcactggttaagtgtttccatgagtttcat

SEQ ID NO: 18132 - DNA, 2337 bp, Homo sapiens
  SIMILAR (1933)..(2325): 981254mologous to Escherichia coli hopQ,accession number U18997,Smith-Waterman Score=634.
ttaccaatggtagctttcccgaaccaaccctttcccattaagggccaggcatttattctcagaataatgtttcagcatcgcaaccgcatcagactccggcatcgcaaactgcacccggtgccgggcagccacatccagcgcaaaaaccttcgtgtagacttccgttgaactgatggacttatgtcccatcaggctttgcagaactttcagcggtataccggcatacagcatgtgcatcgcataggaatggcggaacgtatgtggtgtgaccggaacagagaacgtcacaccgtcagcagcagcggcggcaaccgcctccccaatccaggtcctgaccgttctgtccgtcacttcccagatccgcgctttctctgtccttcctgtgcgacggttacgccgctccatgagcttatcgcgaataaataccaggtcatcatgattttcctgagcaccctctgaatttgtactgatggcatctggagaagtttcaccataattctgtaggtttgcaccagcattcacactttctgctgtgcccctgtaatttgtagttgagttctttttatttcttggaaaatcctttccatctggatagtaatattctgtgaattctatatagacagctgacatttcttgtggaagatatagggattttttattgcagcaaatcatgcttttgggggaagaacgacattgttccgctgtagagactagtgggtagatccacaggacgggtgtggtcgccatgatcgcgtagtcgatagtggctccaagtagcgaagcgagcaggactgggcggcggccaaagcggtcggacagtgctccgagaacgggtgcgcatagaaattgcatcaacgcatatagcgctagcagcacgccatagtgactggcgatgctgtcggaatggacgatatcccgcaagaggcccggcagtaccggcataaccaagcctatgcctacagcatccagggtgacggtgccgaggatgacgatgagcgcattgttagatttcatacacggtgcctgactagcaacaggatcttgggtttcagtaaccttctcaaatgctcttcttaggctctggtggactttttctggttctatttccttccttccttccttccttccttccctccttccctccttcccaccttccttccttctcattgaaggtgggaaaaaaattggcggcttggtgatccgatcgaggcgcaggcgctgatcgccacctacggccgtgatcgtgatcctggccggccgttgtggttggggtcggtcaagtcgaacatcggtcatacgcaagcggcggcgggtgtggctggtgtgatcaagatggtgatggcgatgcggcacgggcagctgccacgcacgttgcacgtggaatcgccgtcgccggaggtggattggtcggcggggacggttcaactccttacggagaacacgccctggcccaggagtggtcgtgttcgtcgggtgggggtgtcgtcgttcgggatcagtggtactaacgcgcacgtcatcctcgaacagcccccgggagtgccgagtcagtctgcggggccgggttcgggttctgtcgtggatgttccggtggtgccgtggatggtgtcgggcaaaacacccgaagcgctatccgcgcaggcaacggcgttgatgacctatctggacgagcgacctgatgtctcctcgctggatgttgggtactcgctggcgttgacacggtcggcgctggatgagcgagcggtggtgcttgggtcggaccgtgaaacgttgttgtgcgacgtactaacgctgggtaccgggacaaactgcgaaccgccacaatggttgtggcaacggcaaggagatacaaatgaagcaatggatagccgcactactgttgatgctgatacccggcgtacaggcggcaaagccgcaaaaagtgacgctgatgctcaggtgttgcaggcgctggctgaacaggagaagttgaacctggtcgtgtcgccagacgtcagcggtacggtgtcgttacatctaacagatgttccctggaagcaggcactacaaactgtagtgaaaagcgccggactgataacgcggcaggaaggcaacattctctcagtgcattccattgcctggcagaataacaatatcgcccgccaggaggcggagcaggcgcgggcgcaggcaaatctgccgctggaaaatcgcagtataaccctgcaatacgccgacgcgggagaactggcgaaagcgggggagaagctactgagtgccaaagggagtatgaccgtcgataaacgcaccaatcgccttttgctacgagataacaaaacgggcgttaagcgcgcttga

SEQ ID NO: 18133 - DNA, 3799 bp, Homo sapiens
  SIMILAR (1461)..(832): 1001254mologous to unidentified cloning vector 29kD protein essential for the replication of mini F plasmid,accession number AB015619,Smith-Waterman Score=1098.
  misc_feature (1)...(3799): n = a,t,c or g
tcattgtttggttcgcttctccagggaataccagccagcttctctgtttaccagacaaaacnagcatatccactcagttccacatttcaaataaagggccaaggcatttatctcaggataatgtttcagcatcgcaaccgcatcagactccggcatcgcaaactgcacccggtgccgggcagccacatccagcgcaaaaaccttcgtgtagacttccgttgaactgatggacttatgtcccatcaggctttgcagaactttcagcggtataccggcatacagcatgtgcatcgcataggaatggcggaacgtatgtggtgtgaccggaacagagaacgtcacaccgtcagcagcagcggcggcaaccgcctccccaatccaggtcctgaccgttctgtccgtcacttcccagatccgcgctttctctgtccttcctgtgcgacggttacgccgctccatgagcttatcgcgaataaatacctgtgacggaagatcacttcgcagaataaataaatcctggtgtccctgttgataccgggaagccctgggccaacttttggcgaaaatgagacgttgatcggcacgtaagaggttccaactttcaccataatgaaataagatcacttcagggcatggtaaccgattagattttggagatgaaggagagacactaccaaaggactctctcagatgacaagtatggataacggggtcatgagctaagattgtgtcaacaggaggtaaaacttttttaatggagaagatgataaatttcattctaaacgtgaagttctgggtgcctttgggacagccagcatgagccagaaaatgctgcaggaagcggcggcggaagtcaggcatacgctggtaactttgaggcagctggtaacgctctatgatccagtcgattttcagagagacgatgcctgagccatccggcttacgatactgacacagggattcgtataaacgcatggcatacggattggtgatttcttttgtttcactaagccgaaactgcgtaaaccggttctgtaacccgataaagaagggaatgagatatgggttgatatgtacactgtaaagccctctggatggactgtgcgcacgtttgataaaccaaggaaaagattcatagcctttttcatcgccggcatcctcttcagggcgataaaaaaccacttccttccccgcgaaactcttcaatgcctgccgtatatccttactggcttccgcagaggtcaatccgaatatttcagcatatttagcaacatggatctcgcagataccgtcatgttcctgtagggtgccatcagattttctgatctggtcaacgaacagatacagcatacgtttttgatcccgggagagactatatgccgcctcagtgaggtcgtttgactggacgattcgcgggctatttttacgtttcttgtgattgataaccgctgtttccgccatgacagatccatgtgaagtgtgacaagtttttagattgtcacactctgctttccttcctactgtcttcactgtgaggcaggccctctccatgtgggcatccctggctctggctgtgctaggttcttggaagtcctggctgaactcagagaactggttcttgggccatgccgggggtgcaggcaagtaagcctgcatgtgggtgaaaggtagccccagcagcaaggcgtgtgccacaccccctccatatgttgcctcattctggccactccgcagcctctggtggtgcctcatgcccactttgcagaggatgagccacaggttctgatcaggtgctaaagcatgcgttccggaaaggccgatccagcaactgcgcatcgaacgggactccccccccgaacgccgatttcctgggccaggatgtgcatccagctcggcacaagcttcgtcaaaagtcagcaagcgaaccccgaaaaaaagcccggtaaagccccccgggcccatccccagcccattgaccaccctgaccggaaaacacaaaacccgatgcggccccccagccccccacagtatccggtcaccaaacccagaagcctcatgaccggccagacagccgctttcaccacggcacaacaaacgtttcacggtccgaccccagcaccaccgctcgctcatccagcgccgaccgtgtcaacgccagcgaggtacccaacatccagcgaggagacatcaggtcgctcgtccagataggtcatcaacgccgttgcctgcgcggatagcgcttcgggtgttttgcccgacaccatccacggcaccaccggaacatccacgacagaacccgaacccggccccgcagactgactcggcactcccgggggctgttcgaggatgacgtgcgcgttagtaccactgatcccgaacgacgacacccccacccgacgaacacgaccactcctgggccagggcgtgttctccgtaaggagttgaaccgtccccgccgaccaatccacctccggcgacggcgattccacgtgcaacgtgcgtggcagctgcccgtgccgcatcgccatcaccatcttgatcacaccagccacacccgccgccgcttgcgtatgaccgatgttcgacttgaccgaccccaaccacaacggccggccaggatcacgatcacggccgtaggtggcgatcagcgcctgcgcctcgatcggatcacctaagccgcgtgcccgtcccaattgatgaacttactttgcattcttgacattctgtgcagctccatgtcatcactgccccgaaatcctttggcaaagggattattctcaatctttaattgcgtgatcatttgtcttgcggtcggggcctggataactggcgcgccatcaacaggccgctgggagcgaacagagctctgcccggagggcaccaggagcctcgggttcgccaggctacaacctttcctcttggtacaatggtaaatctggctatgctcctggggcagtgggtatgggttggttggaggcaggaggtcctgggaggggccggaaacaccattctcacactggtattggacccccaaattggatgaggtggagagagctcgagactcgctgctgaaaggactgtggttggaggccactttttgcctcacggtgctcctggggaccacgggatattctttacattcttcatcctggttcagtagcctagaagctgacattgtgtagataccacaaatgggccccacgcccactaggtcctggtgggtaaggccaataggaagctccacggaatagtcagtgtataataaacggatttttccgtcagatgtaaaggttgcagaaccggaccattcttgcgtctgatctttcaggatcggatcgttggcgtcgaacttatcgctgtctttaaagacacggcccgcgtttttccagctgtcgattgagttgtcgccgacctttgtataatacatgtagattgatgtgtcatcagcgtctttcgggcttcccgcaagagcaaacacaacgtgatagccgttgtattcagctactgttccgtcagcgttttgcagcggccagctgtcccacacatcaagtccttttgcagactcaatatttttaatcgttgattgatcgaattgaggcacttggtatttttcgttttgctgctgtttagggatctgcagcatatcatggcgtgtaatatgagagacgccgtacgtttctttgtatgctttttggttattttctttcgcgaaggcttgagtcgctcctcctgccagaagtgcagtcgtaaaagtcagaactgtggcttgttttacaatttttttgatgttcatgttcat

SEQ ID NO: 18134 - DNA, 2495 bp, Homo sapiens
  SIMILAR (259)..(1617): 921254mologous to Homo sapiens Mi-2 protein,accession number X86691,Smith-Waterman Score=2180.
atgaacatgaacatcaaaaaaattgtaaaacaagccacagttctgacttttacgactgcacttctggcaggaggagcgactcaagccttcgcgaaagagaatgaccaaaaagcatacaaagaaacgtacggcgtctctcatattacacgccatgatatgctgcagatccctaaacagcagcaaaacgagaaataccaaaggtccccaggccgccggcaggagcagctgggccaattccctggccgggagcggaaggggatggcgtcgggcctgggctccccgtccccctgctcggcgggcagtgaggaggaggatatggatgcacttttgaacaacagcctgcccccaccccacccagaaaatgaagaggacccagaagaggatttgtcagaaacagagactccaaagctcaagaagaagaaaaagcctaagaaacctcgggaccctaaaatccctaagagcaagcgccaaaaaaaggagcgtatgctcttatgccggcagctgggggacagctctggggaggggccagagtttgtggaggaggaggaagaggtggctctgcgctcagacagtgagggcagcgactatactcctggcaagaagaagaagaagaagcttggacctaagaaagagaagaagagcaaatccaagcggaaggaggaggaggaggaggatgatgatgatgatgattcaaaggagcctaaatcatctgctcagctcctggaagactggggcatggaagacattgaccacgtgttctcagaggaggattatcgaaccctcaccaactacaaggccttcagccagtttgtcagacccctcattgctgccaaaaatcccaagattgctgtctccaagatgatgatggttttgggtgcaaaatggcgggagttcagtaccaataaccccttcaaaggcagttctggggcatcagtggcagctgcggcagcagcagcggtagctgtggtggagagcatggtgacagccactgaggttgcaccaccacctccccctgtggaggtgcctatccgcaaggccaagaccaaggagggcaaaggtcccaatgctcggaggaagcccaagggcagccctcgtgtacctgatgccaagaagcctaaacccaagaaagtagctcccctgaaaatcaagctgggaggttttggttccaagcgtaagagatcctcgagtgaggatgatgacttagatgtggaatctgacttcgatgatgccagtatcaatagctattctgtttctgatggttccaccagccgtagtagccgcagccgcaagaaactccgaaccactaaaaagaaaaagaaaggcgaggaggaggtgactgctgtggatggttatgagacagaccaccaggactattgcgaggtgtgccagcaaggcggtgagatcatcctgtgtgatacctgtccccgtgcttaccacatggtctgcctggatcccgacatggagaaggctcccgagggcaagtggagctgcccacactgcgtgagtgtctggccattgtggccccttggaacccatgagaagaagggtgggacagtaaagctcttcggggcctggatggaaatggaaatgctggtgctgcgggttgagaaggaaggcatccagtgggaagctaaagaggacaattcggagggtgaggagatcctggaagaggtatttattcgcgataagctcatggagcggcgtaaccgtcgcacaggaaggacagagaaagcgcggatttggggaagtggacggacagaacggtcaggaacctggattggggaggccggttgcccgccgctgctgctgacggtgtgacgttctctgttccggtcacaccacatacgttccgccattcctatgcgatgcacatgctgtatgcccggtataccgctgaaagttctgcaaagcctgatgggacataagtccatcagttcaacggaagtctacacgaaaggtttttgcgctggatgtggctgccccgcacccggtgcagtttgcgatgcccgagtctgatgcggttgcgatgcctgaaacaattatcctgagaataaatgccttggcctttatatggaaatgccgcaactgagtggataatgctgttttttggctgctaaaaaaagaagctgggctgttatcccactgagaagcgaacgaaacaggccgggaaaatctccccttattggggaagatccggattatttaatctaaggaccctggggtaccggttataggaaagaatggttctgtcatgatgcctgcatgcggtaacgaaaacgatttgaatatgccttcaggaacaatacaaatctttctgcgggggtaccttgaattggagcggattatgttagcaatgggccgaacaacctaatgaacacaaaaccatgatggggcctgtccttttacagccagtagtgctcgccgcagtccagcgacagggcgaagccctcgagtgagcgagggagcacccaggaacagcacttatatattctggg

SEQ ID NO: 18135 - DNA, 912 bp, Homo sapiens
atggggcatttggagaaggctggagggaaacatttcgatctctctgaggaatttaagccaattcagagaggtcttgttatccataatctggaattcttattaggattttaccaagaggcctccgatcctgttcctccttactgggtacgacttcaagacaggggtgtccagccacctcctacaggtgtgttcaggcctccaacaggtcagcaccccctgggacagagcttccagagggagaagcaggctgccacttttgttgtttcacagccttcactggtgaaacctccaggtatgggaaaaactgagaacgaccgaattgaacgtccccagggtggcggcggaggttccggcagtggtcagggccaggccagccaggatggtgaaggtcaggatgaatttgtctttcagatttcgaaagatgagtatcttgatctgctctttgaagatttggccttaccgaatctgaaacaaaaccaacaacgccagctgaccgaatataaaacgcatcgggcgggttataccgctaacggcgttccggccaatatcagcgttgtgcgttcattgcagaactcactggcgcgacgcacagccatgacggcaggcaagcggcgggaacttcatgcactggaagagaatttggccatcatcagcaacagtgaacctgcgcaactgctggaagaggaacgtctgcgcaaagaaattgcagaattacgtgccaaaattgaacgcgtcccttttattgacaccttcgatttacgttacaagaactacgagaagcggcccgatccctccagccaggcagtgatgttttgcctgatggacgtttccggttcaatggatcaatccactaaagatatggctaagcgtttttatattctgctgtatctgttcctcagcagaacaaaatga

SEQ ID NO: 18136 - DNA, 454 bp, Homo sapiens; identical to SEQ ID NO: 17133
  SIMILAR (124)..(411): 941254mologous to Homo sapiens uncharacterized hematopoietic stem/progenitor cells protein MDS032,accession number AF220052,Smith-Waterman Score=449.
  misc_feature (1)...(454): n = a,t,c or g

SEQ ID NO: 18137 - DNA, 813 bp, Homo sapiens; identical to SEQ ID NO: 17135
  SIMILAR (23)..(175): 1001254mologous to Homo sapiens uncharacterized hematopoietic stem/progenitor cells protein MDS032,accession number AF220052,Smith-Waterman Score=250.

SEQ ID NO: 18138 - DNA, 890 bp, Homo sapiens; identical to SEQ ID NO: 17136
  SIMILAR (853)..(341): 781254mologous to Homo sapiens uncharacterized hematopoietic stem/progenitor cells protein MDS032,accession number AF220052,Smith-Waterman Score=579.

SEQ ID NO: 18139 - DNA, 603 bp, Homo sapiens
  SIMILAR (1)..(297): 781254mologous to Escherichia coli K12 putative transport protein,accession number AE000174,Smith-Waterman Score=386.
atgcgtgccctgctgattctctatctcaccaatcaactaaaatacagcgatactcacgcctacgagttatttagcgcctactgttcgctggtgtatgtcacgccaatcctcggtggctttttggcgcataaagttctcggcaatcgcatggcggtgatgctgggggcgttgttgatggcgatcggtcatgtggtgctgggtgccagtgagatccatccgtcattcctctgtctgttccgacggttaatcagtggttacggcagcgggcataacatcggtcatatatttccaccaacgttggcaaacatcagtgctggcaaccgcattccagcgttcttcagattcaatctctaccatggcaaacagcagattacgcgctttgtcgagatagatggcgtagttatgcgcaccgtgagatttcagcactgcttccagttctggccagatgggattatgccgacgctgatactcttcgtgggcgtcggggtttacctgcatgacaaaggctttgcggatcatgtttgctccttacagcgccagcgcactggcgagtgcgtaacgccgaaacgcttgccgagcgctatcaactcttcacggctgatg

SEQ ID NO: 18140 - DNA, 636 bp, Homo sapiens
  SIMILAR (118)..(624): 921254mologous to Escherichia coli 37KD protein, similar to YI22-ECOLI,accession number D85613,Smith-Waterman Score=812.
atgaaagcaggccagcgtttaacgcttaaacgcccgcagcacgggatgcgcagttatctggcggtcgcgggtggtattgatgttccgccgagatccccggaccggctcgttcatcccttgttgcttaccgaaaaacttctttaccgcccatcgaaacgggcacatacaggcagagtggccctgaaagaaagcaatcagcgatgtcctcctgacgggttcaagttctcttgtgataacggagagagactgcgtgtcacgttcgcgctggactgctgtgatcgtgagccactgcactgggcggtcactaccggcggcttcaacagtgaaacagtacaggacgtcatgctgggagcggtggaacgccgcttcggcaacgatcttccgtcgtctccagtggagtggctgacggataatggttcatgctaccgggctaatgaaacacgccagttcgcccggatgttgggacttgaaccgaagaacacggcggtgcggagtccggagagtaacggaatagcagagagcttcgtgaaaacgataaagcgtgactacatcagtatcatgcccaaaccagacgggttaacggcagcaaagaaccttgcagaggcgttcgagcattataacgaatgcatccgcata

SEQ ID NO: 18141 - DNA, 1898 bp, Homo sapiens
  SIMILAR (1729)..(1445): 981254mologous to Escherichia coli ATP synthase delta subunit (atp-5),accession number J01594,Smith-Waterman Score=469.
atgaacatcgatgcaaaaatcctcaataaaatactggcaaaccgaatccagcagcacatcaaaaagcttatccaccacaatcaagttagcttcatccctgggatgcaaggctggttcaacatacacaaatcaatgaaagtaatccagcatataaacagaaccaaagacaaaaactacatgattatctcaatagatgcagaaaaggcctttgacaaaattcaacagcccttcatgctaaaaactctcaaaaaactagtggctggcatgatggcagtggctgctcctgacgacccgccaccgccatcggtatcatcttccaagccatcaacagtggcacctccgggccgcatctccccgtcggggcgcgccctctgcaccagcttacccagtgccttgagcagctcgtcgaaattctcgctgctgcgcatcttccaggtgccggcgaagttgggcatggtggcggtggcggcggcggcaggtgtgaacgccatgctgaggaaagtggccgtagcggctgcgtccaagccgcacgtggagatccgccaggacggggatcagttctacatcaagacatccaccacggtgcgcaccactgagatcaacttcaaggtcggagaaggctttgaggaggagaccgtggacggacgcaagtgcagggtgaggccccagagccactacagcgtccccgtgtccccgctcggtgcccatggcccactgctgctggaggaacctgtgtctccctttgcagcctgtggcgcgccttccttgcaggtgcctcaaggcgcgcagcgctgggcgcatagcgccagtctccgccttgcgagctcagagtgtgcccgctgcacctacgctgtcggtccctcacgcaacagcctctgcccccatgcccaatttcgtcggcacttgaataatgctcagcgagctgaaaatttctcctatctgctcaaggcactggggtacgaactggcaagaattcttccgcttcttaatgagcgcttttaccctgtgctttccattagaacccatactggggttagcttcgttttcattcagtgcctggcctctgtcctcgatatcagtttagccacttgggagaatgagaacaagatccgctgcacgcaaactcttcttgaaggggacggccccaaaacatactggacccgtgagctggccaacgatgaacttatcctgctgattgaatttggtgtggtcgccgcacctgagggccagcagtccacagctgtctaccactggtgcaataccgcggtgctggacccactggcatgtatgttactaattttgatgaatcttgccaaattgctttccacagagcttgggtaccgagctcgaagctttccctcaacccaaaaaaacctttttaaaaatacaagtcgacactgcatgttcactcagtgcggcagcgaaaatgacgtatacttcagcgggtagcctcactcacggcacgcaggtgaataaactgctgcagaacatccgggagcgcgttaagacgaccattttcagccataacccgaatcaggttctgaccgttttcgtccagttgctcaccacaaactgcgataaacgactcggcgagcgtttctggcgcaagcgcgccagagagaagctctgccatttgttcgtttttggttacctcggcggcaaacgccagcatgtcctgccagcgttctacactttggtgttcgacggcaaagtcaaaagctgctttggcttcagcgacaagtttatccacgatgtcgctgttagcagcttcatccacggaacgttcgatgatcttctcggcgccagcaacagccaggatagcaacttgcttacgcagctcttcacgggcacgtttacgctcggcttcaatttccgcctgcgcctgggccacgatttta

SEQ ID NO: 18142 - DNA, 942 bp, Homo sapiens
  SIMILAR (546)..(217): 991254mologous to Escherichia coli K12 putative carboxylase,accession number AE000174,Smith-Waterman Score=586.
ttactgagctggagcgacttcagcgtcagatacccactccacacccgcgtaatggtcgtcatccagcaacccacaccgaagatgcacgggtcccacgcataccatggagggaatatagatgctagttggacgtgagtgcaggatgcctgaggtcctgtattgataccgcgcgattactttgcgagctaagctgccagggcgaaccacggatgcatccggcggaacatcaataccacccgcgaccgccagataactgcgcatcccgtgctgcgggcgtttaagcgttaaacgctggcctgctttcatcggcaatcgccagccggtccagacggcattatcatccagccgcgcttcgcaaccggcacccgtcagagcaaaccacccatcagtttcgaactcaacagttaactgaccgagcgtgatctccagcgcgggggcattggcgtcattacccaccagtaggttagcaatgcgtaacgcgggcatatccagtgcgccgcagtggctgatacccgactggcgaaaaccgtgacgaccgccatcccggcgttgccagcggataaacaccagtctgcggcccgccgatcccgacagaacctgccggaacgagtaagcgcggttcagcgcgccgtggcgtgtgtagttgttccggcaaactcccgagatacgggaagcccggttgaaaacccgcgccatataatatgcatcgacatattcaccagttagcaatgcgtacttcttaccagtcccttcaatttcaaagccgtattttttatagaccttaattgccggggcgttatcgacaaacacggttagttcaatgcgatctacccgcaaccagttgtcgcacatttcaatcatctctcgcatcagggcgctggcacggctgggacggaagtcgctgtcgtcctcaaaatcggtggagctgcatgacaaagtcat

SEQ ID NO: 18143 - DNA, 642 bp, Homo sapiens
  SIMILAR (137)..(565): 951254mologous to Escherichia coli K12 putative carboxylase,accession number AE000174,Smith-Waterman Score=730.
tggcgactggcgcagcgtctggtggatatgccgaatgtggttgaagccattcccggcatgaacaatatcacggtgattttgcgtaatcctgagtcgctggcgctggatgccatagagcgtttgcaacgctggtgggaagagaaccaagcctttgaaaccgaattctcgctttattgaaattccggtggtttacggtggtgcaggcggaccggatttggcggtggtcgcggcgcattgcgggttgagcgaaaaacaggttgttgaattgcactcctccgtggaatacgtggtctggtttttaggttttcaaccgggcttcccgtatctcgggagtttgccggaacaactacacacgccacggcgcgctgaaccgcgcttactcgttccggcaggttctgtcgggatcggcgggccgcagactggtgtttatccgctggcaacgccgggtggctggcagttgattggtcatacctcactcagcctgtttgatccggcgcgtgacgaacccatcttattacgtccgggagacagtgtgcgctttgtaccgcagaaagagggagtatgctgaagattattcgtgcggtcatgtataccactgtgcaggaaggcggccgcacggttttcgcccgtcgggttcaacct

SEQ ID NO: 18144 - DNA, 3359 bp, Homo sapiens
  SIMILAR (2454)..(3359): 791254mologous to Escherichia coli Flagellar motor switch protein FliG,accession number D90834,Smith-Waterman Score=1115.
atgacgtttaaaccaggaaacaagctaaatcccgccaaaagacgagttttaacgggcgtattaaaagtgataatcataagatatctggtgcgggagacgctcaaaagccagctggcgatactcttcatctggcttttgatcttcttctgtcaaaagttagtgaggatcctcggcgcagcggttgacggcgatattccggcgaatctggtgctctcccttctcgggttgggcgtgccggaaatggcgcagcttatcctgccattaagcctgttcctcgggctgctgatgacgctgggcaaactgtataccgaaagtgaaattacggtaatgcatgcctgcggcctgagcaaagcggttctggtgaaagcggcaatgatccttgcggtattcacggcaatcgtagcggcggttaacgtgatgtgggcgggaccgtggtcatcgcgtcatcaggatgaagtgttagcagaagcgaaagcgaaccctggcatggcggcgctggcgcaagggcaattccagcaagcgactaatggcagctcggtgctgttcatcgaaagcgttgacggcagcgatttcaaagatgtgttcctcgcgcaaattcgaccaaaaggtaatgcacgtccttctgtggtggtggccgattccggacatttaacccagctgcgcgacggctcccaggttttcaaccgggcttcccgtatctcgggagtttgccggaacaactacacacgccacggcgcgctgaaccgcgcttactcgttccggcaggttctgtcgggatcggcgggccgcagactggtgtttatccgctggcaacgccggcgtgcgctttgtaccgcagaaggagggagtatgctgaagattattcgtgcgggcatgtaataccactgtgcaggatgggggtcgtcacggttttcgccagtcgggtatcaagccactgcggcgcactggatatgcccgcgttacgcattgctaacctactggtgggtaatgacgccaatgcccccgcgctggagatcacgctcggtcagttaactgttgagttcgaaactgatgggtggtttgctctgacgggtgccggttgcgaagcgcggctggatgataatgccgtctggaccggctggcgattgccgatgaaagcaggccagcgtttaacgcttaaacgcccgcagcacgggatgcgcagttatctggcggtcgcgggtggtattgatgttccgccggtaatgggctcatgcagcaccgatctcaaagtggggattggcgggctggaaggccgtttactgaaggctggtgaccgactcccgattggcaaatcgaagcgtgattctatggaagcgcagggcgttaaacagctgctaaaacacaagcacgccgcgcaactattacgtgacgttgccgtcaattgtggaattattatgaataaacacgcatcacagccgcgcgctatttactatgtcgttgcgctgcaaatctgggaatattttagcttttacggcatgcgtgccctgctgattctctatctcaccaatcaactaaaatacaacgatactcacgcctacgagttatttagcgcctactgttcgctggtgtatgtcacgccaatcctcggtggctttttggcggataaagttctcggcaatcgcatggcggtgatgctgggggcgttgttgatggcgatcggtcatgtggtgctgggtgccagtgagatccatccgtcattcctctatctgtccctggcgattatcgtctgcggctatggcctgtttaaatctaacgtaagctgtctgctcggcgagctgtatgagccaaccgatccgcgtcgtgatggcggtttctcgctgatgtatgcggcggcggctcgagatattgcttatctgatgtatctggagaacgccttgcgagctgaaggcgctggcgggaatccgaatctatcgcggatggcgatgccgcctatcaacctctaccagaatcagagaggaggagtggcttgcaaccccctcacccccatcttatacattttcccgaggactccttggattgcttcgcgtcagcgtacgacccataacaaccgcacctacagagtcgcgctcgaggttcagtgcgatagcgtaacggttacccggcagggagatcatttcaccctgcatacaatcggccaggccgtgaatgcggataacaccgtcacttacagaaacaatagtaccttcgttgtgagcttcactcacaacattgaactgagcaatgcgctgcttgatcagttcgctgatttcggtggaattcagttgcatgctccagtccccttaagactgcaagacgtctgcaaggcgctcaagacgacccgcacgtttttccatcgcagcagaaattttcgcgagctgttgttcactcagtgcggcagcggaaatgacgtctacctcagcggtagcctcactcacggcacgcaggtgaataaactgctccagaacatccgggagcgcgttaagacgaccattttcagccataacccgaatcaggttctgaccgttttcgtccagttgctcaccacaaactgcgataaacgactcggcgagcgctgtgtcgagcgcgccagagagaagctctgccatttgttcgtttttggttacctcggcggaccatggaagcttgcttctccgggtgaagacgcggccaccttgttggaaaatattctcaaacttcgcgataccgccagcggtattgaaacgctcaactttatggagccacagagcgccgccgatctgattcgcgatgagcatccgcaaattatcgccaccattctggtgcatctgaagcgcgcccaagccgccgatattctggcgttgttcgatgaacgtctgcgccacgacgtgatgttgcgtatcgccacctttggcggcgtgcagccagccgcgctggcggagctgaccgaagtactgaatggcttgctcgacggtcagaatctcaagcgcagcaaaatgggcggcgtgagaacggcagccgaaattatcaacctgatgaaaactcagcaggaagaagccgttattaccgccgtgcgtgaattcgacggcgagctggcgcagaaaatcatcgacgagatgttcctgttcgagaatctggtggatgtcgacgatcgcagcattcagcgtctgttgcaggaagtggattccgaatcgctgttgatcgcgctgaaaggagccgagcagccactgcgcgagaaattcttgcgcaatatgtcgcagcgtgccgccgatattctgcgcgacgatctcgccaaccgtggtccggtgcgtctgtcgcaggtggaaaacgaacagaaagcgattctgctgattgtgcgccgccttgccgaaactggcgagatg

SEQ ID NO: 18145 - DNA, 462 bp, Homo sapiens
  SIMILAR (241)..(456): 981254mologous to Escherichia coli K12 putative transport protein,accession number AE000372,Smith-Waterman Score=346.
atgcattttgccatccagcgtatcggcagatggcgcgatcgttcccgcattggtaacccacattggcgaagcggaactgacgttggaaagccagtgcggtgcctggcgtgcaactttttccagtacgtgttcatcgctaccagtgaatcccaactgacgcagcaccggaataaacggacgttcgtgcggcgggatcacggcctgggggaatcccgcatcggcaagggctttcattttcacagcatgaaaagcgacggttttcacgaagagttaatcatgtcgtcgcttctcggcgtctccttcgtgggcgcatttctggtggtcggatcttcatttatgttgccctatttacgtcgggttattacgcctaccgtcagcggtattgtggtactgatgatcggcttaagcctgattaaagtcggcattatcgattttggtggaggatttgcagccaaattcttg

SEQ ID NO: 18146 - DNA, 1284 bp, Homo sapiens
  SIMILAR (675)..(4): 1001254mologous to Escherichia coli right origin-binding protein,accession number M97495,Smith-Waterman Score=1193.
ttaacgacggatcggaatcagcagttcacagcgtagattaattgggcgatctcccgctttggcatcttctgccgggtagtatcgctcaatatcctgacctttacggcgcgtcaggttgagcattggcatgcacgttccgtataccgtcaggataaactcctgcacgccggttcccagaccttcataggtaaacatcacatattcgccgccctgcagcatcaccggatgccccgtcagtacatagccatctgcctgatcctgggctaacgcggtggtatagaatacctcttgctcgtcgtctttatcctgactcggacgcgtttcattcaggccgtagagcaccggcggaatggtcggcgcgttgccgagaaaatcgtgccagaactgataacgcatttcatggcggaaatcagagatttgctccagcgaacaggagtagctctgggtaacaccaatcagcggcgtatcttccagggtgacaaatttgtgctctggcatagtgaattcacccaggcgtagcggcgggcgaataccaaaggcgctccattcaggagaacggcggtaaagtgcaggagtctgggcaaactgcttcttgaatgcgcgggtaaatgtctgttgagagtcgaagcggtattgcagcgcgatgtccagaatcggacgcgcagtcaggcgtagttcacaggtcaagatggaatcagtctctgcctgcacgatttggagcaggaagagattatagagaagcaagctaaggaaaaatggctggttatcctttaaatcaagttctgcctgtctgcgaagcagcgcccatacccgacgataaccatacgttggcagctctccgataacatggtgtatacggagaagcacatccgtatcatcagtgtgacgactgcggcggccatccatccagtcatcggttcgttccccatccccgggcaataagggcgcgtgcgctatccacttttttgcccgtccatattcaacggcttctttgaggagttcattttccatcgttttcttgccgagcaggcgctggagttctttaatctgcttcatggcggcagcaagttcagaggcaggaacaacctgttctccggcggcgacagcagtaagacttccttcctggtattgcttacgccagagaaataactggctggctgctacaccatgttgccgggcaacgagggagaccgtcatccccggttcaaagctctgctgaacaattgcgatcttttcctgtgtggtacgccgtctgcgtttctccggccctaagacatcaatcat

SEQ ID NO: 18147 - DNA, 2193 bp, Homo sapiens
  SIMILAR (810)..(40): 991254mologous to Escherichia coli right origin-binding protein,accession number M97495,Smith-Waterman Score=1353.
tcagcagttcacagcgtagattaattgggcgatctcccgcttggcatcttctgccgggtagtatcgctcaatatcctgacctttacggcgcgtcaggttgagcattggcatgcacgttccgtataccgtcaggataaactcctgcacgccggttcccagaccttcataggtaaacatcacatattcgccgccctgcagcatcaccggatgccccgtcagtacatagccatctgcctgatcctgggctaacgcggtggtatagaatacctcttgctcgtcgtctttatcctgactcggacgcgtttcattcaggccgtagagcaccggcggaatggtcggcgcgttgccgagaaaatcgtgccagaactgataacgcatttcatggcggaaatcagagatttgctccagcgaacaggagtagctctgggtaacaccaatcagcggcgtatcttccagggtgacaaatttgtgctctggcatagtgaattcacccaggcgtagcggcgggcgaataccaaaggcgctccattcaggagaacggcggtaaagtgcaggagtctgggcaaactgcttcttgaatgcgcgggtaaatgtctgttgagagtcgaagcggtattgcagcgcgatgtccagaatcggacgcgcagtcaggcgtagtgcgaccgccgatttcgacaaacgacgagcacgaatatacgcgccaatagcatggccagtgacatctttaaacattctctgtaagtgccacttggaataacctgctttcgccgctacattgtcgagcgacaggggctgatccagatgactgtcgaaccgtttatccagtggttgttggaagataacttcgtcgctgggcgtcctgcctgggaagtcgcaggtgtacaaatggtgaatgatgtcgtcagcggcgttgatgatgccggaaatgccattgatgttcgcgatccgcttagcgataaaattcgcgaacttgttgcgggcagcagcagtgaacaacgcgtaaccgccctgctttccctgcgtgaagttttcggtgatgatctgccagataacccgcattttgtgcaggccatcgaacaagcctggcaacaaatcgtacaattcggcgcacatcaggcgcttcgtccgctgatcccccggccccttaaaatgttcccgggacccccggcccgtcttgttcggtgaataacgcggcgtgttgagtgcaacgcagtcggcattaatctcctggcgagtcgccatattgtcggtacagttcgagcactcatattcgggtcccccgttggcatatcgcggcaattccttgttaacgccctcacccgttaaccgttgttgtaatgctgtcagttgaatgtcgggattcaactgtgtcagtcgctgttggctgacctgcgatttcgggcgatcgatatcttcagtggtaaagaggatttgtcgttgcagattgcttaaatgcacatcgtcgtcatctgccagtaccagcgtcccgacgccagcgcccgccaggtacagcgcagcaggtgtacccagcccgcccagaccgataatcagcacctggctgtcgagcagtttttgctgcccgtccagagcgatatcgtcgagcaggatttggcggctataacgcataaagtcacggtcattcatcgccactcctgcaatttccagcaactgtgccgttgcccaaacgccagtctgcggcttgagtaatggcgctgcggaccagctatttatcagcaaatcggggcccatctggtcaaaccgaacctcccgccagtgtgaacctggaaaatgaacccagcggattccggcggcccaaaaacaaggatcccgctgcatcgtcgacagttctgccgaagcgttaagtgcagcactggcaattggtaacatcgagttggttaagcccagccggacgatgtccgcaaagccgcgcaggaaatcgttaatagcggcaaggccaaacgggttgtcgtttccctgggtccacaaggagcgctgggtgttgatagtgaaaactgtattcaggtggtgccaccaccggtgaaaagccagagtaccgttggcgctggtgacagcatggtcggcgcgatgacactgaaactggcagaaaatgcctctcttgaagagatggttcgttttggcgtagctgcggggagtgcagccacactcaatcagggaacacgtctgtgctcccat

SEQ ID NO: 18148 - DNA, 1557 bp, Homo sapiens
  SIMILAR (1)..(405): 911254mologous to Escherichia coli phoE protein,accession number V00316,Smith-Waterman Score=648.
atgggcattgtggcatctgcatctgtacaggctgcagaaatatataataaagacggtaataaactggatgtctatggcaaagttaaagccatgcattatatgagtgataacgccagtaaagatggcgaccagagttatatccgttttggtttcaaaggcgaaacacaaattaacgatcaactgactggttatggtcgttgggaagcagagtttgccggtaataaagcagagagtgatactgcacagcaaaaaacgcgtctcgcttttgccgggttgaaatataaagatttgggttctttcgattatggtcgtaacctgggggcgttgtatgacgtggaagcctggaccgatatgttcccggaatttgaccgacaactaatgaccgatggtcacaccccccctcggagggagaatttctgtccacacgaaacggcgcgggacacgcccttgcgcgttattcgacgcccaccgcgggtcaggagcaccatgagaagggggcgaaccccgcggccccgcgttttaaaagcgagaactcgttcgacccgcgggacccatgaaaaaacgggtctcgcggcaacacaaaaaaagaggtttcggacccttattgcgcttcggccctatgaaactgtgcagaagccgattcgatgggcgaataacactcgcttcggactctcttgcggtctggtttcccccgagcgggaaaagttcgatcaactgttgctggaggcgcggccggggattgttaactggaacaaaccgcttaccggtgctgccagtaccgcgccattcggcggcattggtgcttccggtaaccatcgccccagcgcctggtatgccgcagattactgcgcatggccgatggcgagcctggagtcggactcgttaacattgcccgccacgcttaaccccgggctggatttttccgatgaggtggtgtctaacccgcgactggcggcgaagcagggcttactgaaaatgaaagcccttgccgatgcgggattcccccaggccgtgatcccgccgcacgagcgtccgtttattccggtgctgcgtcagttgggattcagtggtagcgatgagcaggtactggaaaaagttgcacgccaggcaccgcactggctttccagcgtcagttccgcttcgccaatgtgggtagccaatgcggcaacgatcgcgccatctgccgatacgctggatggcaaagtgcatctcaccgttgccaacctgaacaataaatttcaccgttcgctggaagcgcccgtcactgaatcgctgttaaaagcgatttttaacgacgaagagaaatttagcgtccattcggcgtgccacagacagtcgtctgaaaaacgcacggatctcggtgatataatgccagaaatggagcagacagactggtcagcggaacagaaatccagacgaaatattgttcaactgcagcccgtagcgtcggtgcggcattcgacggacaaaacggacagtatcgttacatgggaaataatggccccatgcaactggaagtcccccgtgatcagtatgccggcgctgttgaaaccatga

SEQ ID NO: 18149 - DNA, 1344 bp, Homo sapiens
  SIMILAR (1)..(774): 891254mologous to Escherichia coli K12 putative protein transport,accession number AE000378,Smith-Waterman Score=1143.
atggaagaaattgtggcccttagtgtaaagcataacgtctcggatctacacctgtgcagcgcctggcccgcacgatggcgcattcgcggcagaatggaagctgcgccgtttgatacgccggacgtcgaagagctactgcgggagtggctggatgacgatcagcgggcaatattgctggagaatggtcagctggattttgccgtgtcgctggcggaaaaccagcgattgcgtggcagcgcattcgcgcaacggcatggcatttcgctggcgttacggctgttaccttcgcactgcccgcagctcgaacagcttggcgcaccaacggtattgccggaattactcaagagcgagaatggcctgattctggtgacgggggcgacggggagtggcaaatctaccacgctggcggcgatggttggctatctcaatcaacatgccgatgcgcatattctgacgctggaagatcctgttgaatatctctatgccagccagcgatgtttgatccagcagcgggaaattggtttgcactgtatgacgttcgcatcgggattgcgggccgcattgcgggaagatcctgatgtgattttgctcggagagctgcgtgacagcgagacaatccgtctggcactgacggcggcagaaaccgggcatttggtgctggcaacatacatacgcgtggtgccgcgcaggcagttgagcgactggtggattcatttccggcgcaggaaaaagaccccggcgaatcaactggcaggaccgactcattgccttcttctcgcccacaaaaagttgcatacccggttcaccgtaatgaccgccgagacgattgtggtttgccgccccctcatcaccgagcaacgctacctgtggcaacgccgaatggacgctaaatttctcttcgtccgattcagtgacgggcgcttccagcgaacggtgaaatttattgttcaggttggcaacggtgagatgcactttgccatccagcgtatcggcagatggcgcgatcgttgccgcattggctacccacattggcgaagcggaactgacgctggaaagccagtgcggtgcctggcgtgcaactttttccagtacctgctcatcgctaccactgaatcccaactgacgcagcaccggaataaacggacgctcgtgcggcgggatcacggcctgggggaatcccgcatcggcaagggctttcattttcaacacctgaaaacggtgacgggtagaggcttcattaccaaacgacaggcccgcgtaatgatgcgtcagccctaccagcccgtcgatacttcccaggcgttcatcgcaccacctcatcggaaaaatccagcccggggttaa

SEQ ID NO: 18150 - DNA, 1970 bp, Homo sapiens
  SIMILAR (943)..(1665): 971254mologous to Escherichia coli maltodextrin phosphorylase,accession number U18997,Smith-Waterman Score=1275.
atgaaggctttcaataagctgttttccctcgttgttgcatctgttctggttttctctcttgctggctgcggtgacaaagaagaatcgaagaaattcagcgccaatctgaacggcactgaaattgccattacctatgtctacaaaggtgacaaggtgcttaagcaatcttctgaaaccaaaattcaatttgcctccattggtgcaaccaccaaagaagatgctgccaagacacttgagccgttaagcgccaaatacaaaaacatcgcgggtgttgaagaaaaattaacctataccgatacctacgcgcaggaaaacgtgactatcgatatggaaaaagtggattttaaagccctgcagggtatttcaggaatcaacacattccgccgactgtggccaaccattgcgcctttcaaagcgggtctgatcgtggcgggcgtagcgttaatcctcaacgcagccagcgataccttcatgttatcgctccttaagccacttcttgatgatggctttggtaaaacagatcgctccgtgctggtgtggatgccgctggtggtgatcgggctgatgattttacgtggtatcaccagctatgtctccagctactgtatctcctgggtatcaggaaaggtggtaatgaccatgcgtcgccgcctgtttggtcacatgatgggaatgccagtttcattctttgacaaacagtcaacgggtacgctgttgtcacgtattacctacgattccgaacaggttgcttcttcttcttccggcgcactgattactgttgtgcgtgaaggtgcgtcgatcatcggcctgttcatcatgatgttccattacagttgggcactgtcgatccatttgattgtgctggcccgattgtttcgattgcgattccgttgtatcgaagcgtttcgaacatcagtaaaaacatgcagaacacctggggcagcgacgcacgcgcatccgtttgatctgactaaatttaacgacggtgatttcttgcgtgccgaacagcagggcatcaatgcggaaaaactgaccaaagttctctatccaaacgacaaccatactgccggtaaaaagctgcgcctgatgcagcaatacttccagtgtgcctgttcggtagcggatattttgcgtcgccatcatctggcggggcgtaaactgcacgaactggcggattacgaagttattcagctgaacgatacccacccaactatcgcgattccagaactgctgcgcgtgctgatcgatgagcaccagatgagctgggatgacgcctgggccattaccagcaaaactttcgcttacaccaaccataccctgatgccagaagcgctggaacgctgggatgtgaaactggtgaaaggcttactgccgcgccacatgcagattattaacgaaattaatactcgctttaaaacgctggtagagaaaacctggccgggcgatgaaaaagtgtgggccaaactggcggtggtgcacgacaaacaagtgcatatggcgaacctgtgtgtggttggcggtttcgcggtgaacggtgttgcggcgctgcactcggatctggtggtgaaagatctgttcccggaatatcaccagctatggccgaacaaattccataacgtcaccaacggtattaccccacgtcgctgggatcaaacagtgcaacccggcactggcggctctgttggataaactcccagcaaaaagagtgggctaacgatctcgatcagctgatcaatctggaaaaattcgctgatgatgcgaaattccgtcagcaatatcgcgagatcaagcaggcgaataaagtccgtctggcggagtttgtgaaagttcgtaccggtattgagatcaatccacaggcgattttcgatattcagatcaaacgtttgcatgagtacaaacgccggttttttgtggtccagttctttcacccacttagcaacgacaatggtcgctacgccgttaccgaccag

SEQ ID NO: 18151 - DNA, 3064 bp, Homo sapiens
  SIMILAR (1988)..(2575): 1001254mologous to Escherichia coli similar to,accession number D90889,Smith-Waterman Score=976.
cacccgcaccgcgctcgccatcgtcaataaaccacccagcagcgcaatcccgcccaccagcgggctggcaagcagaaaacgaaatcctgccagtaatgatttcaacggatgctcacgcggctgcggtggcggtggcaacgccggaaggcttaacaacggtagcaaggctacgccaccggtcgccagcaataaaccgccaatcatgggcgaaatcaccgaccccagacgcacggtcaacatggtgatcgccccggcctgcattaagttttcacgccctaccagtgctggtgtcgccgccaatagcgccgtaacgccaagcgatgcgaaaaaaccatcccataaaccaaacacaacaccggaaggcttaaccacggcaacacggttactaacatgcacgacgccgacaccgcacagttacaagctacgccacctgatcgtcaccattaaaccgccaatagacggccatatcaccgaccccatacgctccgtcaacatagagaccggccatgacggcacttattacctacgccctaccaaagctgttaacactgccccccaaattcccatcacgaatatccataagcccaccggaatagcgcaggcgttgttatcaacccggcaacatggaggagcccagtgcaccaacggtattaccccacgtcgctggatcaaacagtgcaacccggcactggcggctctgttggataaatcactgcaaaaagagtgggctaacgatctcgatcagctgatcaatctggaaaaattcgctgatgatgcgaaattccgtcagcaatatcgcgagatcaagcaggcgaataaagtccgtctggcggagtttgtgaaagttcgtaccggtattgagatcaatccacaggcgattttcgatattcagatcaaacgtttgcatgagtacaaacgccagcacctgaatctgctgcatattctggcgttgtacaaagaaattcgtgaaaacccgcaggctgatcgcgtaccgcgcgtcttcctcttcggcgcgaaagcggcaccgggctactacctggcgaagaatattatctttgcgatcaacaaagtggctgacgtgatcaacaacgatccgctggttggcgataagttgaaggtggtgttcctgccggattattgcgggcgattcagtgacgggcgcttccagcgaacggtgaaatttattgttcaggttggcaacggtgagatgcactttgccatccagcgtatcggcagatggcgcgatcgttgccgcattggctacccacattggcgaagcggaactgacgctggaaagccagtgcggtgcctggcgtgcaactttttccagtacctgctcatcgctaccactgaatcccaactgacgcagcaccggaataaacggacgctcgtgcggcgggatcacggcctgggggaatcccgcatcggcaagggctttcattttcaatgggagctctcttgtagagcatggatccacaaggcaggatacgcagtagtcactctaaatgacgtcattaaaagtgtgtctcttcctccaggcacaagcgctcaattagctgagctaatagctcttacaagagcaattgaattaagcaaaggaaaggtagctaatatttacactgactcccagtatgctttcctagttctccatgctcatgcagccatttggaaggaaaggcattttcttaccaccaatggatctcctataaaacatcaccaggaaattaaaaggttactttcctcagttttccttccacgagaaatcacagaaatgcattgtaggggacatcagaagggaacagatgaggtagccgaaggaaatagattagccagtcaggtagctaggtcagcggcaagaaagcctcaagacatcaacacacttcaaacccctctaatctgggaaggctccataagagaaattaaacctcaatactccactacaaaaggagaatgggccacttctcgagggtgtacatttcaacccttaggcggtacgctgacagtcaacgataatggcaaagcgacagatatcgtccagaacagcggtgccgctctccagacgagcacggctaacggtattgaaatcagcggtactcatcagtacggtactttttccatttccggcaatttagcgaccaatatgttgctggaaaatggcggtaatttattggtattagcaggtaccgaagctcgcgactccacggttggcaagggtggggcaatgcaaaacctgggtcaggactccgccacaaaggttaactctggcgggcaatatacccttgggcggtcaaaagatgagtttcaggctctggcccgggcagaagatctccaggtcgctggcggtacggcaatcgtctacgcaggtacgctggcggatgcatcggtcagtggcgcgacaggaagcctgtcgttaatgacgccacgggataatgttacgccagttaaactcgaaggggcggtccggattaccgatagcgcgacattgactctgggaaatggcgtcgataccacgcttgccgacctgacggctgccagccggggcagtgtctggcttaacagcaataattcctgtgcagatcccctcgtcaccctggaagatacgccgctgattggtgttacccagagctactcctgttcgctggagcaaatctctgatttccgccatgaaatgcgttatcagttctggcacgattttctcggcaacgcgccgaccattccgccggtgctctacggcctgaatgaaacgcgtccgagtcaggataaagacgacgagcaagaggtattctataccaccgcgttagcccaggatcaggcagatggctatgtactgacggggcatccggtgatgctgcagggcggcgaatatgtgatgtttacctatgaatgtctgggaaccggcgtgcaggagtttatcctgacggtatacggaacgtgcatgccaatgctcaacctgacgcgccgtaaaggtcaggatattgagcgatactacccggcagaagatgccaaagcgggagatcgcccaattaatctacgctgtgaactgctgattccgatccgtcgttaa

SEQ ID NO: 18152 - DNA, 5962 bp, Homo sapiens
  SIMILAR (5960)..(4521): 971254mologous to Rattus norvegicus synaptic vesicle protein 2C,accession number AF060174,Smith-Waterman Score=2505.
gtctacattacagataacaagagaagctttacttaaaatacatactttgctgagcataaacaaaaactgtgagaaacatatagtccacttcagagtttcagaagttgttgcaatactggtgtttttaggcttagtaaccagactaagtttggcacgatgtgaggattaaagaaaacctaacatacagccgatatgccccttaacaccaatatcccagttgtctttctgtgataccaggtgaaggccaaattcagacattcctggctccagagcctttagtgcatgaacagatcaggtatattactgaagaaataggtaaaggccattttgacatcaaacagaaaaaaaattggagaatatcatattctatctattttgattggcagagggaatcagaaagtattcccctggactgctttggaaatgaccccagcatttagaaagtctctgctgtgtcctaatctctttgctggaaccttatcagtggtatcttggactctcccttctgtcactacatttcttttcccacctcccctttgatctcttaaggtatcttgaaagacaactaagcagtttttggtgaaaacctgaactctgatttggtgagatttgtctatttgccaatataggtaaaatcactgaaaaactgtttctgaagcctatgtataatacttaaggccatgtttcaagaaaataatggaataaacagtcaggagagctgtagggtaatattgcaattatagtcttctaacctaagcgcgtttatctggcaaggcggggcccttttctggctgggtgatggtaactgtcaaacctgcagtgaacagagatactagtcaggatgctgagatgctggcagggcagacagcatggggactgtgctttctggcctattccatgcgggcttcccaaacaacttcctacactctttttatgcgtgcctatttcctaatttttcagtttataaactaaacctatttagtgcttgtaaaaatgagttgaggccgccagtggctcacgcctgtaatcccagcattttgggaggctgaggtgggccgatcacttgaggtcaggagttcgagaccagcctgaccaacacggtgaaaccccacctctactaaaagatacaaaaattagctgggcgtggtggcgcatgcgtgtggtcccagctacttgggaggctgaggtgggagaatcacttgaacctgggaggcggaggttgcagtgagcagagttcccaccactgcactccagcctgggcaacagagtgaaactccacctaaaaaaaaaaaaaatgagtttagcataagaaggcagataagatgaagctattttcattactgtcttctacaatgctggagagtggagagcagactagtcccaatcctttattttgtgcacggggaaagtgagaactagagatgttcaacgacttacagtctccacagcaagatctgggtccctgtaccgcttagtggtgaaggtcaggctaggacccatctatcgcgtctccaaggtctgtactctggtgtgagatgattcaggcagcaggactgaatgtgagttgggtgccttaaaacccaatacctgggatagaatgtggtacatacagaattcacagtttgaagcagttgtttgtttttccctactgagaagattctgtgataataatgggacttgggagcattctggattgattccaaagagcaacagggaaattttagttagaaaaggtggtaaaaatataggagcaagtggactatttcctaggttttcatttttgtacaaattttcattttccttctactgtaggcgaaatgagatgccagttgcgtgtttaggtgccagtggcctgctacactgatacaactgagagtttctgtttaatatcctggctgtttcttaatctccagctaaatctggagcaagctatacaggccacaccacatgctttggaaatgatttgagctctcttagaaaatcaaggtgatgaacagtctcaaggaggcagggaggagtgcacaaaaggtgggagaggtggtgaccaagaaggtttgtgaccacagactgtccaggagatgagaaaagatccctcttaggccaccaaggatgcttggattaggtaacaagtaggccaagaacggtccttctgcaggggacacggatggcaggtctcatgaagtaaggttttgctggtttatcctatgctgacccaacccagtgttcaaataaaattctgaataactgtgctctgcagcttgggagatgttttatgcatttagaccccagagcagacattagagatattttgaaaagtaaaggtagtctagttagcaaagtgaactatcacagaggactagagacagcgatgcccatgtacatttctatttttcttttgatgggttgatggagatgcactcctggcttttgcagttatttctgcacatgctgcattcaactaaaagacctgctcaggtccccaaatgtctttttaaagaagacaaatcagggagagataggtgggaaaatgggtacatgtggaagaagaaaaacatacagggtactttcttgggttgtttgactgctgtctttgttctccaataaaatgataggaggcagaagtgagagaaagttgtttctttccctgtgcggttggtatctttcaaatgcatcttgtctagccttcagtgatttttcttcttcctgccacctttgcagtttttggttcgggttttcctgatgttctagccctgatcacagacccccagggaaccaccctcttcccactgcccccaacaccagtcttcccccctctgcagacctgaattacttcaaggggaagtcgattaatggcttatgttaatgaaagaagcttttcacttagtctgagctctgcgagggatcattaggaaggggagggggaggcaggggggcctcaggggagttaggacatctctgaaaataatgatcagtggaaacaaaagctttcccttcctggaggccccaagctatggcttgcttgaaaatgcctataataagtaacaagaataaacctctatcgaggcagttaaaaaatgaatattgtttaaatatgggatttattcctggcttctggtcattggctgcaagtctacaaggaaggttcagatttcaaagaagaggtgtaaaaaggacgagcctgggggaaggggagcctgagaggcgagaaggtcatgtagctgacagcgggcccgtgggaatgtcctggctgacctctttcttccaagcccaggcagattccagaggtaaaatgagcagtcaaacaaccacagggagatggtctgtctgtgagaggggccctcaggagtgcaggcgggctgtgattttacagggagccaggagcgcattgagcagtgggccagccctggggaagctagagggacaaaccctctttgctgatgccagctgggaagctgaatgtcaactgcgggccaggtggggtgggggtcctggcgggccagtcccacagcaaagaggtactggaaagaggtaccattttgtatttccaaatggctctgggtgtgaatttcttcctaatttgcaatttacaatttagctatccactggcaatctctagactagagacagtgtgggtaagtggcagaatcaggtaggcagacagtttttaagaagcagctttctttccctgaatctgctgtctggcaagaccaagggcagctgaaggagtgggagtggtaaatggaggcagaagctctctctcggatctctgattttcaaacattctgaaccacatgccacagtcacagatactgttacagttctttttcctcacacttttcagaggtttaattgggctttctgacagaaatcttgcttatgcagcacactcagatttttgctgctaattgcagagcttttatttttcttgtcagcggtcaccttaattgtcttgccccaaagagccccacccagccctgtttggtgccacatggttttctttgaaaggctctgctataacagtgagaattactgggtgtccttttctaagtaaacaggaaatatcactctgttagaaaaaaaaaaaaaaagaatccctcttctcagcacaaatgcaataatgtgccgacttatatttcctgttaatgttaaattaggagcaggatctatttcttacaccagcccagtcttcttagcttctaaactttcaatgagcagaaccccagggaagcctggctgcctagggcattttagaaatgcttccactgatttgcgggaggcagtagcatcacagtttggaaagataacaatgcattcaaacaaaacaaaacaaacaaacaacctgtgcaaaatcacaaaggggcaagatgatatgcttctaaattttaagtcacagcacgtgtttatgttctgatacttgatcacctttctatataggaaaactctgaagccttgagtcaggaaggagaattgacccagggcaggaggaagaaacgcaggaaggatggctttttttcccattacatcagaacctgggttcgtgtgtcaggcaggcacagcccaacgagtcctccacacacgagcacagtagaagccagcaggatggggattgatttggtgatgctgaccagagagccaaatattaagtttcccaggacggctgctgccttgcatagcgcatttaagaagccaaagcctgttgccctccggtctgtggggtacagttccacagtgaccacgtcaagagagttccaggctgagatggtcaatccattgtacagacacagcatgcctatcatcatggattcactggtgccgaaccaaaggaagaaacagctgatccccgaaagcaccatagagccacctagcattgttaagcgcccaattctgtccatcagcagagcagacacaatgttccctggcaatactgccaatgtccccagaaagttgacaaaataaatccagtaggcactatagtcatcatcaaaggtaatctgacatcccgtcttgttgtgaaaaaacgagcagtttttaaattcactgtcaatgaatttatatggctcaaaatctgtgttgtcaaaaacagtgtcaataaatgtgcagttcttgaagtaggtgttcactgaagttacatcctcaaaggtgcaggacttaaaaacagagtctttgaaagttacagatttgaacttgacccctatgaatctgccattgtcgtattccattccagtatgaatctgattttccattgtaaagttaatagtgaaatttgcatatttatctctctccacatttctggttagcaatgcatattcatcggactgcagaggtttaatgacatcagggaaccaaacggataatccatagtacccaaaggacagggtgaaccaaacaattgtaagctttattgtattatccctgactgggtagttgaaacatctcataaaagtcaaccaaattccgtacagctcggtgcggatccgaacaaaacacctcctataccatgttcctgtgtcactctcaatttcaatcagctcatctatttgtttaggagtttttattttgtttaccgtgaagaccttctcaggctgaccccgggctctcatgttggtgtcatgaattaacttcagaatcatccaagcttcatcatgttttccaacctccaacaagaatcgtgggctttcaggcatgaatgtgagggccaccacggaggagacacaggggagtgcacagacgatgacaaacacacgccaactgtgaaactggtaggccgatcccatgctgaagctccacccgtagtgcgggatgatggcccaggccatggcagaggcgtagatgccaccgatcatccagaacatgcagagccagctcaagtgttcgccccgcttttcccgggccaggacttcagcaaagtacgagaacacagtgggtatggctcctccaatcccgaatccagaaagtaagcgac

SEQ ID NO: 18153 - DNA, 1962 bp, Homo sapiens
  SIMILAR (493)..(1089): 781254mologous to Escherichia coli yejH,accession number U00008,Smith-Waterman Score=789.
atgttgcagacgtttttcgatacgttcaggcagttgtgctgcaatttgcggcgtcgaatcgacaagaatgatgaccaaatagcatgcccccatgcccccccacgttgcatgcctgcatgcgtggtgcgtaacggcaaaagcactgccggacatcagcgctatctctgctctccttgccgtaaaacatggcaactacagttcacttacaccgcctctcaacccggtaagcaccagaaaatcattgatatggccatgaatggcgtcggatgtcgcgccaacagcccgcattatgggcgttggcctcaacacggttttacgtcacttaaaaaactcaggccgcagtcggtaacctcgcgcatacaaccgggcagtgatgtgattgtctgcgctgaaatggacgaacagtggggctacgtcggtgctaaatcacgtcagcgctggctgttttacgcgtatgacaggatacggaggacggttgtggcgcacgtcttcggtgaacgcactctggccacactggagcgtcttctgagcccgctgtcggcctttaagggtgaattttcgctgttgattgtcgatgaatgtcaccgtattggtgacgatgaagagagccagtatcagcaaatcctcactcacctgacaaaagtgaatccccacttacgcctgctggggctgactgccacgccttttcgattgggcaaaggctggatctaccagtttcattatcacggcatggtacgcggcgatgagaaagcccttttccgtgactgcatttatgagctgccgctgcgttatatgattaaacacggctatctgacgccgccagaacgactggatatgccagtagtgcaatacgatttcagccgcttgcaggcacagagtaacgggctgttcagcgaacgcgatctcaaccgtgagctgaaaaaacaacaacgtattaccccgcacatcatcagccagattatggagtttgctgcaacgcggcaaagggcccagcgttttcgctatctggtcaacgtcgcggtactgaccaccggatttgacggcccgcacgtcgatctaatcgccatcggggggggggggaagggggcaatgcttgtatgcctgctgatcctgggggcgcatcgctacatcacgcgcgatgccagcgccggaagtgaaaaccatatcgccctgagcgagcaggagttttttacccgcgcggggcaaaatctgttggccttaagctggcacgctaacggtctgtattatggcgtcggcgtcgagattgatctctggctgcacgccggattcgacgtgctggtcaacggctcacgcgcccatctgccgcaggcgcgggcgcgctatcaatcggcgctgctgcccgtctgtttacaggtttcgccggagatcctccgccagcgcctggaaaaccgtggccgtgaaaacgccagtgaaattaacgcccgcctggcgcgcgccgcccgctatactccacaggattgccatacgctcaacaatgacggcagcctgcgccaaaggagaaacaccatgcctgcttgtgagcttcgcccggccacgcagtacgacaccgacgcggtttacgcgctgatttgtgagctaaaacaggcggagtttgaccaccacgcgtttcgcgtgggttttaacgccaatctgcgcgacccaaacatgcgctaccatctggcgctgcttgatggcgaagttgtcggcatgatcggcctgcatttgcagtttcatctgcatcatgtcaactggatcggcgaaattcaggagttggtggtaatgccgcaggcgcgcggtctgaacgtcggcagtaagttactggcgtgggcagaagaagaagcccgccaggccggggccgaaatgaccgaactttcgaccaacgtgaagcgccacgacgcgcaccgtttctatctgcgcgaaggctacgagcagagccacttccgcttcaccaaggcgctgtaa

SEQ ID NO: 18154 - DNA, 715 bp, Homo sapiens
  SIMILAR (41)..(715): 961254mologous to Escherichia coli yejH,accession number U00008,Smith-Waterman Score=1121.
atggcatactattagtatattaatctacctacgcgagaccatgatttttacacttcgcccatatccgcacgaacccgtggatgccacgctcaaccattttcgcccccataaaacccctgccgttatcgcgctgcccaccggcgcaggtaacagcctggcgatagcggaactggcacggctggctcgcggtcgcgtgctggtgctggcacacgttaaagaactgttggcgcaaaaccatgcaaagcatcaggcgctggggctggaagccgatatttttgccgccgggctaaagcgcaaagagagccacggtaaagtggtatttggcagcgtgcagtctgtcgcccgtaatcttgatgcctttcagggcgaattttcgctgttgattgtcgatgaatgtcaccgtattggtgacgatgaagagagccagtatcagcaaatcctcactcacctgacaaaagtgaatccccacttacgcctgctggggctgactgccacgccttttcgattgggcaaaggctggatctaccagtttcattatcacggcatggtacgcggcgatgagaaagcccttttccgtgactgcatttatgagctgccgctgcgttatatgattaaacacggctatctgacgccgccagaacgactggatatgccagtagtgcaatacgatttcagccgcttgcaggcacagagtaacgggctgttcagcgaagcc

SEQ ID NO: 18155 - DNA, 756 bp, Homo sapiens
  SIMILAR (205)..(65): 1001254mologous to Escherichia coli aldehyde dehydrogenase B,accession number L40742,Smith-Waterman Score=257.
atgataagacgcgtaagcgtcgcatcaggcaatgaatacccaatgcgaccagcttcttatatcagaacagccccaacggtttatccgagtagctcaccagcaggcacttggtttgctggtaatgctccagcatcatcttgtgggtttcgcgaccgatacctgattgtttgtagccaccaaacgccgcatgtgccgggtaagcgtgaagaggttaattatgaaactgggatttattggcttaggcattatgggtacaccgattattcgcgcaacgctaaacagcgattgcagcgcaataatctggccccaatattatttacaacaactgtcccactgggaggcaggcaatacaataattcccaacatttgccgcaacgacaatccctggaacggattaggcatcatacccaagccttcacggccttaattccccacggggctgcaggccagggctgcggttccggggaccttcattacctatccctggaagatgttgctgtatccagcaaagcaacaccagacggttccggggttacccggaaggcttccgcaaatttacgggttacaattcaaattggggggttccaattaaggacctgtggctttggaccttcctgccgtggctgccatccggcgctccagatttccagggccttggctgtagccgcgcatcagcaggcggctgacaataatatggaattcgccaattacggtccgtttgagttgcttcagtgctcgccagctcatcgaaagtaa

SEQ ID NO: 18156 - DNA, 799 bp, Homo sapiens
  SIMILAR (214)..(798): 961254mologous to Escherichia coli exu regulon repressor,accession number D13328,Smith-Waterman Score=967.
atggcgcaggcacagccttacgtcacgttccaagcccattctagcgtaaccacaattaccgaaaccactcaacagaaggaagacacttgcaggccaccgttcaaaaccactaaaacaacggtaaacggtttaaccgggatgtccgcatggctggcaagtacgctgtttgcgctggttgtcggtgcactggctgacaccatcggcttcagcccgctgttcgcagttctggcagtgttcgacctgttagagcgcatcgaacagggcgtctatctggtgggtgataaactgcctgcagaacgctttattgccgatgaaaagaacgtcagccgtacggtagttcgtgaagccatcatcatgctggaagttgaaggctatgtcgaagtgcgtaaaggttcaggtattcatgtggtttccaaccagccgcgccatcagcaggcggctgacaataatatggaattcgccaattacggtccgtttgagttgcttcaggctcgccagctcatcgaaagtaatattgccgaattcgcggcaactcaggtaacgaaacaggacatcatgaaactgatggccattcaggaacaggcgcgcggcgaacaatgcttccgtgattccgagtgggatttgcagttccacattcaggtcgctctggcgacgcagaactccgccctggcggctatcgtggaaaaaatgtggacccagcgtagtcataacccgtactggaaaaaactgcacgaacacattgattcccgtaccgtcgataactggtgtgatgaccacgatcaaatcctcaaggcgctga

SEQ ID NO: 18157 - DNA, 498 bp, Homo sapiens; identical to SEQ ID NO: 13814
  SIMILAR (1)..(201): 771254mologous to Escherichia coli K12 probable UDP-N-acetyl- D-mannosaminuronic acid transferase; synthesis of enterobacterial common antigen (ECA),accession number AE000455,Smith-Waterman Score =249.

SEQ ID NO: 18158 - DNA, 418 bp, Homo sapiens
  SIMILAR (412)..(17): 891254mologous to Mus musculus transcriptional repressor SIN3B,accession number AF038848,Smith-Waterman Score=611.
tcttggtttctttttccagagaccgcttggcttcgggcaggaactgtccaaactctgagagcaggtcctcctggccccggaagaggttggccacctcggtgaacacctcctcttcagacatgcctcggaatggccggcccctcgtgttcagctgctccttctggtacgtgtgcaggatctccaggaatgacctgtagatttctgggtggtctaggaagcgggttttaatcttattcacatagctgatggcgttgttgaattccacggaatcggactccaggggcacctggggtttgtcctctttatacggcacctgctgcttgaagtcctctgcaccgtccccgtggttgtgcgaattctcctggcttgtcagaggcgactgtatgtttaacttgccattcttgggaatgtcacgaaa

SEQ ID NO: 18159 - DNA, 4290 bp, Homo sapiens
  SIMILAR (2898)..(1924): 921254mologous to Escherichia coli O157:H7 2-keto-3-deoxy-D- gluconate transport system,accession number AE005622,Smith-Waterman Score=1446.
ttaaccagcttgtatggtggtaggaggctgatgatctaagtaagaggcaatcaccggtgccggtaagcccatcgtttttgccagtaaagcgatgctttgctcgcgctggctgcgggttaacgcatcggcctcactaaaggttgccagtacgccctgaataaaagcgccgtttttttctgcatagggacgagctgccagataaaacgatccagtttgattgagatcggtgccgtctttcagcacccgcacgccgccctgtaataatgcagcagagtagtagggatcccagatagcccaggcgtcaacgttaccttgctggaacgcggcgcgggcatcagcgggcgtcaggtaagtgggttggatatcggtaaacttaagtccggcctgacgcagtgcacgcagtaaaaggttgtgtgaactggaacctttctgaaaggcaactttgtgacctttaagatcggctacggttttgatcgggctgttttctgccaccagaatcacttcggctttgggcttcggtggctcgacgcccacgtacaccaaatcagccccggcagcctgggcaaagattggcggaatatccccggtactgccgagatcaatactgccaacgtttaacgcttccaacatttgcggacccgcggggaactccacccaggagatttttgattccggatagcgtttttccagtaactggtggctttttgccagcaccataccaatactgcctttctgatggcggttcggccgccgtgaggggctttcgttttgtttgggttgtccgtctcctgtcctgccgggggtgtgtcctttctgttgcgggggccgtgtttttgtcgcttggccttgcagaacatttttcagtgcctgcgctttacccgcgccgctgacaattatcagcaagtttttcgccgccatgatgcttttcggccccatcgtcacgtagctgtcaggcactaacgaaaagtcgccgcccaactcgccatgcgccacaatatcaaccatctctcccaccaaatccagtccgcaatcacgcgccagtttctgatcatgctcgcggtagttatcaatagtgagcttctggatattctcttctttgatccccgcaggggtgaaaaacagattacgcagattggtaatcgttacgccttctccctctttgccgcgtaaatggaatttcatctttaaccagggtggtgaggtattaacccgcagggtaccggaaactgatatccatctctgcatcaggccgatatcttctttataacgatgataaaaatccgtcgcctcatggctgggataaaactcgtcatctcgcaactgaaaacgtttttccagccccagtttcaccgccattcgatgctcgccgtgtgggatcatatcgacagtggtcagacctttgtcaccttcacggaacgcaccttcagattctttggcgacggtcggttgtacgctctgatactttcgcgcctgggcagccgcttcctcaacaggaatatcctcaaagccgagcaacagtgtgaggataaacgacagcaccaccgccagcgccatgaccgcgaacacccagacgatgctcattggattcgccggatcgaagaactgcacgctggtaaatagccccggcgctgccattgagtggctggcaagccccgccataccggcaaccgcgccgcaaataaaaccgctgataagactggcgataagcggacgtttcaggcggatcgccacgccatataacgccggttcggaaatccccgccataatggctgatgccgccgcagccagcgccgtctgacgcagttccgggtttttcgttttccacgccactgccagtgatgaaccgcccagcgacaggttagcgccgatctctgacggcattgacatcgcttctttgccggtttcggcactggtctggatgtgtatcgtacctaaaatttcgattttcgctgctctggctttgactttacgtgaccagatagaggtaagaattggcaccagaatcgaagtcacaatgaccgccgtcgctaccagcgaagttgctgccggagccatcggtttaaacgcaggcaccatttctgcaatcagcacaggtgtcgctaccgcggcccctgcggaactggaagcggcaattccggcagtgccatcgccaccgccaatcaatttatcggcgataatcaacggaataccggtcacgataattactgccacacccaacaggatccccagcaaaccagtctgggcaatcacagtcaaatcaatggtattgcccagcgcgaaggcaaagaatggaatcagcgtttgcaccgctttgctgaaaaattctcgcaattcagggtcaaggttccccagggcaaagcccaccaggaacggtaatactgcgccgacgaaaacatgcggttcaaacgaggcaatcccggcagtgcccagaataatcatcgtcatgagcggcccggactccaacgacatcaacacaaatgccccagcttcttcttttgtgccgtactgctgcatgatggaagcgtaaagtccgccattggtcatatccatcgccgccaccagcgccagcgttgaaagtccggcaaagaatccaacttcaacaccatgttccggaataatacgcgaggcaattgccgcaaccacccacgcgacggcaattttagttaccaccagcgtaccggatttacgcagtaccgttcccgtcgcgcttaattttattgacgcccccatgcaaaaaaaccacaccgccagaatgggcaccgtaccggtaatcatcccgttggtgaatgatccaaaatatttccccgccatgatgatctcctgctttggcgatcccatcgcaacggtgacgatttgcgcaccgctggcatgaatgcgttcaaacagcgcctgacgctgctcgggtttaaaataaccatcctgactgccaacgattatctgtttgctgacgggcaggttcagtacgtaaaaagtacccgcaggcgcaggtttcccgcgttgccggtgccgatctctgggaagagctgatggcgcgcgcaggcaaagaaggacgccggtatttcttgtgggcggtgaacctgaagtgctggcgcaaactgaagctaaactggtacgcagctcttctgccaccagcgcgattgcctggccgctgctcatcccttgtgccatcagttcctggatccgctcgacagctttttgctgctgttcatgggtgagtgaaggtaaaccagcagaccgatcgccagcaccatcgcgaacatggttaaggtgttgacgctgtaaccgaaggcgtaaagtacggagaaggttcccatcaacaccaccggcacggcgatagtgggtatcagcgtggcgcggaagttttgcaggaacaatttgcagtggcttcacgaccaataatttatccaccgtcataattgccagaacggtgaaggtgaggttgataactccgacaataatggtctttggtaattgcgacagtgggttaatttccccgacgatttcgcttgcttcgtttggcgccacgaacgcggccggcaattgcatggagatttccgccaacacgtgcgcccgcctccaatgttcatggcttttatcacggcccatgccatagactttcagtttgtcatgaccatagtcgcggatacgctggttattagcaccacgaatcacttccaccacataacccatcccaaaccgctgattcacacgaccaatggtggaaagggcaatctgagcatcggttgaaccgtcgtactgtttcggcggatcgaggcagatatcgcagttcccgcacggctcctgacgcccttcgccaaaatagttcagcaataccagacgacggcaagtttgcgcttcggcaaacgcgcccatcgcattgagtttgtggcgctcgatatcctgcaactgcccctgcggcttctcttccagacaacggcgcagccacgccatatcagccggatcgtaaaacagcatcgcttccgcgggcaggccatcacgcccggcgcgtccggtttcctgataataggattcgatattgcgcggaatatcaaagtggaccacgaagcgaacgtttggtttattgatgcccatgccgaacgccaccgtcgccaccacaatttgcaggtcatcgcgctggaatttttcctgcacatcggcgcgaacattattttccagcccggcatgataggccgccgcgctaattcccttgctttgcaggcgcgcagcggtgtcttctactttcgcgcggctgttgcagtatgaacttcgcatctcgctgcctgcagtcat

SEQ ID NO: 18160 - DNA, 627 bp, Homo sapiens
  SIMILAR (385)..(627): 1001254mologous to Escherichia coli K12 probable UDP-N-acetyl -D-mannosaminuronic acid transferase; synthesis of enterobacterial common antigen (ECA),accession number AE000455,Smith-Waterman Score =413.
tcattccttctcctttcttcgtcgctcgtatttgatttctttcctttcttttgttatctttgggagtgctgcatgctctgcaggtccacctgctttcctcctcgccagctgcaccacctcgtgagcgatgacgtctgcctgaaggtggtggagctctaccagagaccgcttggcttcgggcaggaactgtccaaactctgagagcaggtcctcctggccccggaagaggttggccacctcggtgaacacctcctcttcagacatgcctcggaatggccggcccctcgtgttcagctgctccttcttctgcccgcccaaatagggactttgtgttttgtccccaattttggggaagtagacgtagcttctattgtgggacacaacgtttcccgcgttgccggtgccgatctctgggaagagctgatggcgcgcgcaggcaaagaagggacgccggtatttcttgtgggcggtaaacctgaagtgctggcgcaaactgaagctaaactgcgcaaccagtggaatgtgaatatcgttggcagtcaggatggttattttaaacccgagcagcgtcaggcgctgtttgaacgcattcatgccagcggtgcgcaaatcgtcaccgttgcgatg

SEQ ID NO: 18161 - DNA, 2390 bp, Homo sapiens
  SIMILAR (805)..(1407): 941254mologous to Escherichia coli Ferredoxin I,accession number D90724,Smith-Waterman Score=988.
atggcgatccatcaggttagcccctttcgtgaagagccagtggattgcgttctgtgggttaaaaacagccaacttatgcctaatgattacaacccaaacaacgtggcaccacccgaaaaaaaactgctgcaaaaatccattgaaatagatggttttacccaacccattgtggtcacacatacggataaaaatgccatggaaatcgtggatggttttcaccgccatgaaattggtaaaggctcatcatcattaaaattacgcttaaaaggttatttgccggtgacctgtctggaaggtacgcgtaatcaacgcatcgccgcgactattcgtcataatcgcgctcgtggacgccatcaaatcaccgccatgtcggaaatcgtccgtgaacttagccagttgggatgggacgataataaaattggcaaagagctgggaatggacagcgacgaagtgctgcgcctgaagcaaattaacggcctgcaagagttgtttgccgaccgtcaatattcccgcgcctggacgctaaagctggcgcagcgttcagctgctgccagcaacgtcgattccttcttggcaaacagagacgaatcagtttatgggaagggatcggccaacaccgacagcggaatcgccgtacgccgtgctcctgcgtcagccactggcaaaactcaacatcatccaggaccagtgatgaacatggttgagaatatgctcgatcaggcattcaaaaagcttaatcctcacgagcatcctgttctgcactctgaccagggatggcagtatcgtatgagaagatatcaaaatatccttaaagaacatggctgcggcgtcacgccgattatgtcgatgcgtcgctggcttgcgaagaaccgtccacaggccgatgtgcgggtgatctacaacgtgcgtacgccgcaggatgttattttcgccgatgagtggcgtaactatccggtaacgctggtggcagaaaataacgttaccgaaggctttatcgctggtcgtctcactcgcgaactgctggcaggtgtacctgacttagcttcacgtaccgtgatgacctgcggcccggctccgtatatggattgggtagagcaggaagtgaaagcgctcggcgtgacgcgtttctttaaagagaaattcttcaccccagtagcagaagcggcgaccagcggtctgaaattcaccaaactgcaaccggcacgagaattttacgccccggttggcaccacgctactggaggcgctggaaagcaataacgttccggttgtcgctgcctgccgtgcgggtgtttgcggctgctgtaagacaaaagtggtttccggtgaatatacggtgagcagcacaatgacgctgaccgacgccgaaatcgctgaaggttacgcagtggtcgccctgataaagccaggcgcgcagattggtcgatccccagtcaattgcgatgtagcgagctgtcatgtgatttcctttaaccttcgtgtcgagctggcgatcatgcgccgcctgctctgccgcatcgccgtcctgatgtcgtatcgcatcgaacagcgccttatgttcctggagcgtttgcggcatgttggcctcatcgcccatccagccaaaaaagcgatcaaaaaaacaaggaagcctgggatgaaagtgacatttgagcagttaaaagcagcctttaatcgggtcttaatttcacgcggcgttgacagcgaaacggctgacgcctgtgcagagatgttcgcccgcaccaccgaatccggcgtttattctcacggcgttaatcgtttccctcgtttcattcaacaactggaaaacggcgatatcattcctgatgcccaacccaaacgtataaccagcctcggcgcaattgaacagtgggacgcccagcgttcgatcggtaacctgacagcgaaaaagatgatggatcgcgccattgaactggctgccgatcacggtattggtctgctacggctggcaggcggcggaaaaaggctatattggcatttgctggaccaactccatcgccgtaacgacaacatctctctggatctgggcaacaacgctgaagccgtgatcctgcgcgaagatatgctgccgcgtgaaaacttccgccctggcgaccgcgttcgtggcgtgctctattccgttcgcccggaagcgcgtggcgcgcaactgttcgtcactcgttccaagccggaaatgctgatcgaactgttccgtattgaagtgccagaaatcggcgaagaagtgattgaaattaaagcagcggctcgcgatccgggttctcgtgcgaaaatcgcggtgaaaaccaacgataaacgtatcgatccgcctactcaacatgaagatgaagaggatgaaggcctttatgatgatccatttccacttaatgaatg

SEQ ID NO: 18162 - DNA, 1968 bp, Homo sapiens
  SIMILAR (1135)..(1845): 971254mologous to Escherichia coli L factor,accession number U18997,Smith-Waterman Score=1145.
ctactgcagcagcccgggaaaggggggggatcccacgtgccctgcgcaggggggggtccgccatgatacaattcgagctcggtaccgtttttcacctgtaccgtacagagtaattccacccggagcggcagggacatataccgttccctgatactcaccaggcatcacggcaatatactggcgcttgttggtacgcttgataattgccgcatctaccgccgcctgaatcgtggtatgcgttacaccttgagtgcccgccgggccgacaacaaagtcaggttgcgcaggcagggtaatcggggaaggattccacgctgcagcacctggtgtcagggatgcaaaatagtgttgagcatcgaaattctgcgcttcttttgccgacagaatcgggcgagaagaggtaccaggcgcggtttgatcagaaggacgttgatcgggcggggttgagctacaggcggtcagcgtcacgccaaaagccaatgccagcgccagacgggaaactgaaaatgtgttcacaggttgctccgggcatcgcgccgctggcctatacatgattacgaatcgagctcggtcccgcctgagcaggcttctggaagccttgctgcagcgaagaacctttacgttttccgcctttaccgccacgtactgctgcgcgtgcttcttcacgatcagcttttgattcagcgtgtttgttgcctttcttcggacgcgctgctttcgcgttacgaccacggccacggccgccttcgacttcacgatcgctttcgtcttctgcctggcgagcatgttgagaagtagtgacgtgataatcgctggaatcttcagtcggttccgcgttatcagtccatttgttttcttccgccatacgacgtgcttcttcagcaacgcgacgtgcttcttcttcgagtttacgacgcgcttcttcttcagctttacgcttgagctctgcagcttcctgctcacggcgggctttttcagctttgtctttttccgcagcttcacgtttcgcttgttcagcagcttcacgcttagcttgttctgcggcctcacgttcagctttttgttgcgcctcgcgtttagccgattcttctgcctcacgacgggcttgctcttccgcttcacgctgcgcttgctcttccgctgcaaggcgttcagcctcttcgcgttcgtggcgtgctctattccgttcgcccggaagcgcgtggcgcgcaactgttcgtcactcgttccaagccggaaatgctgatcgaactgttccgtattgaagtgccagaaatcggcgaagaagtgattgaaattaaagcagcggctcgcgatccgggttctcgtgcgaaaatcgcggtgaaaaccaacgataaacgtatcgatccggtaggtgcttgcgtaggtatgcgtggcgcgcgtgttcaggcggtgtctactgaactgggtggcgagcgtatcgatatcgtcctgtgggatgataacccggcgcagttcgtgattaacgcaatggcaccggcagacgttgcttctatcgtggtggatgaagataaacacaccatggatatcgccgttgaagccggtaacctggcgcaggcgattggccgtaacggtcagaacgtgcgtctggcttcgcagctgagcggttgggaactcaacgtgatgaccgttgacgacctgcaggctaagcatcaggcggaagcgcacgcagcgatcgacaccttcaccaaatatctcgacatcgacgaagacttcgcgactgttctggtagaagaaggcttctcgacgctggaagaattggcctatgtgccgatgaaagagctgttggaaatcgaaggccttgatgagccgaccgttgaagcacggggcctgttgtcgggtggggggggggggaggatacctttgaagaatgcctatcctaaggacaggtaagggggcagccaccacatgggtatgtttctttttaccaaaccgccatgggcccat

SEQ ID NO: 18163 - DNA, 272 bp, Homo sapiens
  SIMILAR (110)..(271): 981254mologous to Escherichia coli K12 O2-independent coproporphyrinogen III oxidase,accession number AE000462,Smith- Waterman Score=281.
ttaaactacagcggttgtcgcggcgacaaaagtggctgcgcaaccggctgatgacccgaaacgggcattcgccggtacgccgtagccgccagagacgccatcggaaggagtgagcatgtctgtacagcaaatcgactgggatctggccctgatccagaaatataactattccgggccacgatacacctcgtacccgaccgcgctggagttttcagaagacttcggcgaacaggcgtttttacaagccgtggcgcgctatcctgagcgtccat

SEQ ID NO: 18164 - DNA, 2811 bp, Homo sapiens
  SIMILAR (766)..(1425): 941254mologous to Escherichia coli aspartate-tRNA ligase,accession number X53863,Smith-Waterman Score=1082.
atggcgtggctggatctgcgtttcctgttctggctggcaccgattgtcttctcgttgatcctgtcaccgtttgtttcggtgatttccagccgtgccaccgttggtctgcgcaccaaacgctggaaactgttcctgatcccggaagagtattcgccgccgcaggtgctggttgataccgatcggttccttgagatgaatcgtcaacgctcccttgatgatggctttatgcacgcagtgtttaacccgtcatttaacgctctggcaaccgcaatggcgaccgcgcgtcaccgcgccagtaaggtgctggaaatcgcccgtgaccgccacgttgaacaggcgctgaacgagacgccagagaagctgaatcgcgatcgtcgcctggtgctgctaagcgatccggtgacgatggcccgtctgcatttccgtgtctggaattccccggagagatattcttcatgggcctacatcgttcggtaccggtgtttctctgtgttctacgacggctgtgtggatggagataagaagataaagaaggcaaacaatacacctctgcgacctcagctaaaaggccttggcccttcgaaaactgggcaccacccgggcgggaacggctctggggcacaggattttaccgccaaacccaaggtcacacgtgaaagtccgttgaccgtaattcatcctaaagctccggacgagacggcggtgacgtcaccgattaatcagaccatgggaactctttcagacggcccgcaatgcggaagtgatgaaagctctgtgcgtcatctgtggctggaagtgaagggcgtggatctggggcgatttcccgaacgccgttatggttctgataaaccggatctgcgtaacccgatggaactgactgacgttgctgatctgctgaaatctgttgagtttgctgtatttgcaggtccggcgaacgatccgaaaggtcgcgtagcggctctgcgcgttccgggcggcgcatcgctgacccgtaagcagatcgacgaatacggtaacttcgttaaaatctacggcgcgaaaggtctggcttacatcaaagttaacgaacgcgcgaaaggtctggaaggtatcaacagcccggtagcgaagttccttaatgcagaaatcatcgaagacatcctggatcgtactgccgcgcaagatggcgatatgattttcttcggtgccgacaacaagaaaattgttgccgacgcgatgggtgcactgcgcctgaaagtgggtaaagaccttggtctgaccgacgaaagcaaatgggcaccgctgtgggttatcgacttcccgatgtttgaagacgacggtgaaggcggcctgacggcaatgcaccatccgttcacctcaccgaaagatatgacggctgcagaactgaaagctgcaccggaaaatgcggtggcaacgcttggggatcctctagagtcacctgatgatggactacacaatcgaatctcaactcatgggtgcttttacgtgttatgtgggatctcgaccaatatcggtgttgaatccaccgcccgcaatgcctgggaacttggctttaatctggtgattgccgaagacgcctgtagtgccgccagcgccgagcagcacaataacagtatcaaccatatctacccgcgcatcgcccgtcgtggaagagatcctcaacgcgttatgatttacatcggtctaccgcaatggtcgcatcctaaatgggtgcggttggggatcaccagccttgaagagtatgcccgccactttaactgcgtggagggcaacaccacgctttacgccctgccgaaacccgaggttgtcctgcgctggcgtgagcagaccacagatgacttccgcttctgttttaagtttccggcgaccatttcgcatcaggcagcattacggcattgcgatgatttagtgactgaatttttgacccgcatgtcaccgttggctccgcgcattgggcaatactggctgcaactgcctgccacattcggcccacgggagctgcctgcgctttggcattttctcgattctcttcctggcgaatttaattatggcgtggaagtccgccatccacagtttttcgccaaaggagaagaggaacaaacgcttaatcgcggtttacatcagcgcggcgttaatcgggtgattttagacagccacccggttcatgcagcacgtccacacagaaagctaggcggtacagcggtgtgggagtgggaacccgaaggggcccactgggtgggagacgaaccaggctggtttagctccggcgatttgagcaaagccgaatattgggcacagaaagccgccgacagcggtgatgctgatgcctgcgcgctgctggcgcagatcaaaatcaccaatccggtcagtctggactatccacaagcaaaagttcttgcagagaaagcggcgcaagcgggcagtaaagaaggtgaagtaacgctggcgcatattctggtaaatactcaagcgggtaaaccggattatccaaaggcaatttcgctgttagaaaacgcctcggaagatctggagaacgactctgccgtcgatgcccaaatgctgcttggtttgatttacgccaacggcgtgggcattaaggccgacgatgacaaggcaacctggtatttcaaacgcagctctgcaatttcccgaaccggttattccgagtactgggcgggaatgatgttcttaaacggtgaagaaggttttatcgagaagaacaagcaaaaggcgctgcactggttgaacctgagctgtatggaagggtttgataccgggtgtgaagagtttgaaaaattaaccaacggttaa

SEQ ID NO: 18165 - DNA, 2106 bp, Homo sapiens
  SIMILAR (1006)..(2082): 991254mologous to Escherichia coli aspartate-tRNA ligase,accession number X53863,Smith-Waterman Score=1825.
  misc_feature (1)...(2106): n = a,t,c or g
atggagacctctctcctctgccatctgtcacgtggaagagcagatcggtttttggaagtctttggggcagtgggaaatcaagcttgtctgcaggcagcaggagatactacagttcctggttccggagagaagggccactttctgagagagactcttgctttgttgcccatgctgcagtgcagtgtgcgccctccaagtggagaatcatcttcaggtgcaaacaccggggataaacgggggttggagacaactcgcgcgagggacagtcagggagagaggcgatccacagcaagaaaggaggagatcatcgacacgttcgtgtttgttctggttgtggtgttgcgcccacagcaactgcgcgagagacgcagcagcgcagcagcgatgagagagagcaccagcgacagcggcagatcgttgacaccgcagcccagtttcgtctgccagagtgacagccagaataatcgcagagtaagcatcgttacagtgacctgcattaaccagagtgtacacatgatcatctacagtnagcatatctcgttgtcggtgatacgaggacgagtgcgtgtcgcgtggccttcttgcgtctattacgaccagcgtggtgcaaagggtggagtgtgcatgcagagggcggactatagatgcttgcctacaagacacgccgcagcacccactccgcgtcccaccacatcagcgccacactcaccggcacacgccgaacacctgcccccctcccccccgacgtccccccacacgccgccgcacaccaacgccgccggccaccctcccaccacatcgaaaccgccgtgcgcctatcgggaacaatggctgattcacccggagaacgactctcgcccgtcccccactgtcacgaaaaaagcagatccgcggcacaccccaccgggcacacgcccccaaccaccgcatgccgtaaaccccctcaagacgtcttctgacaccccctcggctttgccacccacaccaacccccatcagccggcctgtatttttcgatccggatcgtgcgacggcgttaaagctggcctctgaactgcgtaatgagttctgcattcaggtcacgggcaccgtacgtgcgcgtgacgaaaaaaatattaaccgcgatatggcgaccggcgaaatcgaagtgctggcgtcctcgctgactatcatcaaccgcgcagatgttctgccgcttgactctaaccacgtcaacaccgaagaagcgcgtctgaaataccgctacctcgacctgcgtcgtccggaaatggctcagcgcctgaaaacccgcgctaaaatcaccagcctggtgcgccgttttatggatgaccacggcttcctcgacatcgaaactccgatgctgaccaaagccacgccggaaggcgcgcgtgactacctggtgccttctcgtgtgcacaaaggtaaattctacgcactgccgcaatccccgcagttgttcaaacagctgctgatgatgtccggttttgaccgttactatcagatcgttaaatgcttccgtgacgaagacctgcgtgctgaccgtcagcctgaatttactcagatcgatgtggaaacttctttcatgaccgcgccgcaagtgcgtgaagtgatggaagcgctggtgcgtcatctgtggctggaagtgaagggtgtggatctgggcgatttcccggtaatgacctttgcggaagcagaacgccgttatggttctgataaaccggatctgcgtaacccgatggaactgactgacgttgctgatctgctgaaatctgttgagtttgctgtatttgcaggtccggcgaacgatccgaaaggtcgcgtagcggctctgcgcgttccgggcggcgcatcgctgacccgtaagcagatcgacgaatacggtaacttcgttaaaatctacggcgcgaaaggtctggcttacatcaaagttaacgaacgcgcgaaaggtctggaaggtatcaacagcccggtagcgaagttccttaatgcagaaatcatcgaagacatcctggatcgtactgccgcgcaagatggcgatatgattttcttcggggccgacaacaagaaaattgttgccgacgcttcttatttagtctcgtggctttaa

SEQ ID NO: 18166 - DNA, 4401 bp, Homo sapiens
  SIMILAR (1625)..(1515): 891254mologous to Escherichia coli phenylacetaldehyde dehydrogenase,accession number X97453,Smith-Waterman Score=171.
atgtgtattcccgtaccgccaatcgccacaggtgatcgacacttcatcgccgttgctcatatccaccagaactctcggcgctcgcccgttgatagcgacgagagttcgacgcgttcagcagtcgcagcgcacccagccacgcgagacttcaacgtacgggctttgtacaccgttaccagcagcgtatcaccaacaaagccgccgcttcccgccacattccggcaaggccgttatagacctgctgagccgtgcgttgggagtattggcgtgataccacagagtagctgcgttctggcgaatggcagtacgggtgcccagtcagcgtttggcgacatcatccgtgccggaccgccatcagcgggcctggtacctgtagcccaggccaccgtcattgagacatttctgcgatatcagacaattaacgaaagggacttttgggcggcaaggaaccggttgttaaaacaaccttatgggtcccggattctgcgattcaccgaggcctacgccatagccgaacgagcagctcagagcgtcttgagaataagcctggccgatgcttttaacgtcgatggcccgcgcccagcggaagattccatattcaggttgctgcgcatgcctggtagcgccgtgcaaaggccggaccggcggcacaatcgccgctgtcagtaccgcccagcgatggcgtttccagctggaagtaaagccaacaaacagcgccagtacaatggcggtcgccagttttaccggaagcgaatatgttggttagcaatggagaaaatacccatcgtgattaaccatagctcacgcaggcgatgggccattttacgtgaaggaacgaatcctggcttcgtcgcgatctgtttgccagtgaccaccactgtagcagtggtgcccgaggccagatgttctcttgctggttgtcgagacgatatacgcgttattgataaggacatctgcaaaggcatgatgccggtcgtcacgtactggaaacagagtgccatctgccggtgcgcagtgagcaaggaccatggcgatgacccttttggcgattgccctgatgcccagtcgccgtgtgcatatggaagtcgcccgcgccagtcgcgtggcgaagaatctattctcatcggtcacgccgggcacccggaagtggagggacaatgggccagtacagtaacccggaagggggaatgtatctggtcaatcgccggacgatgtgtggaaactgacggtcaaaaacgaagagaagcttcctttatgacccagatcacgctgtcggtggatgacacgtctgatgtgacgacgcgctgcgtaagcgcttcccaaaattggcggtccgcgcaagatgatctgcgccgacttagtttcacaccaaccgtccagccagtcggggccaaaatcacgcccgttcctgactgcttcatcccaccaaacggtttaccaccggaccaaacacctcttcacgagttaagcgcaatttacatcgggatttaccaccagcgttggcgcaacataatacccctctccggcggtccattcgacccgcgaatcagctctgcttgctgtgcctgcgcatcgtggaggaatgaacacactttgtcgcagtgcgcacgagaaaccaaagggttatctgtgcaacagcacctgcccggtgacgacattgaaaacgccatcagggataccagcctcgctgggcgttccgccacgcgcaacatcgtccgagcagcagctcatgcgtcagtgactctagaggatccctgcctgattggctgcgcttatcaggcctactgggttactactccgacagcaaaacgggccacttactctcccagccatcaacagctcgacccccgttctctattacgacaaagacgccttcaagaagcaggattagacccggaacagcccgccgtaaacgctggcaggatctggcgactatgccgcgaaactgaaagcctccggcatgaagtgcggctacgcacgcggactggcagggctggatccaactggcaaactttagcgcctggaacctccaccgattttgagaacgacagcgacttccgtcccgccgtgccaggtgctgcctcagattcaggttataccgctcaattcgctggtatatcgcttgctgattacgtgcagctttcccttcaggcgggattcatcagcggccagccatccgtcatccatatcaccacgtcaaaggtgcgttcaccgaatacgtggcaacaaccgtcttccggagcctgtcatacgcgtaaaacagccagcgctgcgcgatttagccccgacgtatccccactgttcgtccatttccgcgcagcgatgacgtcactgcccggctgtatgcgcgaggctcgtggagataccgtggtcgtagcgcagtctgcattctatgtgaagatctgggacaagcgacgacgtggacgcaggtctggtgtttgccgctacttttgggtcgtcgtcttgccgcattccctcgtctactatcctgaccatctgcatgtcgtcttccggacggctggcgctgtcgcgatcaacattgacatagccaccagccctttgtcctgccagtcgctggagacatcagaaagctgtgcagttgctggagtttttccatcaactgtggcacccagcgggaaatttttcgatcaccacgatggcgtcatcgaccacgaatccggtggcgatagtaacgccatcagtgtcaggttattgattgaaaaatcgagaaacaccataccgctaaagttttgtattaaacccgcaggtaaccgcctgcccgacccggagctgcacccggacagcaccctcagatgtggccggataaccgtatcgcccgctgacggagaaaaccgacctcatcccggaagggttatccgcacggatgatgagcgcacccaccggtaccattacgacagtcacaccggctggtgcactacacgcggacacaatatgcagagccgctggtcgaagccgctatctttacgacccgctgggccgcagggtggcaaaacgggtgggcgacgtgaacgggacctgacgggctggatgtcgctgtcacggaaacccaatgacctggtacggctgggacggcgaccgcctgaccacgatacagacgacagaacccgcatccagacgatttatcagccggggagcttcacgccatcatcagggttgaaaccgccaccggtgagctggcgaaaacgcagcgccgagcctggcgcatacccttcagcagtccggcggcgaagacggtggcagtgggtgttcccgccggtgctggtgcagatgctcgaccggctggaaagtgaatcctggctgaccggcccagctccagccacacttcgtaaccctggtccttatattcgcaaagcagtccagcaccgcatccggcacgcagtccgggcggttgctcggcaatggacgatgctgctgcgcttcatcggcaaacgaggcaacattacagaatgtgagccaccacgcccgatggtaccgtcacggttagggcagctaaaaccgcctgcagcgtcagcttatgcaccttttgcccataacgacgggcctggagcacttggagagagtggctcgtgtgccctccatggaccctctctctccgttgggcacatcagtctccagcgctacttgagatcatcggttgtctcattccttcgaccatttcggcctatgctcgtccggtattgtgcaacatctacagttctacccactatatgttccacggcgctaggtggcttcgacgcatatgtgggatgctactgcgacgttaaacttgccgcaggaaccgtcactggtggatgcgagctggactggcaggaaaatagcgggcaattgatcgtgctggcacgggtaacggcgatccgttgctcgatttgccgtggcaaattactcgtcaacaatgaccgtaagcgatggtcgctggagctggcctggcgctactggggaaagggagttttacacgcgtatgcaatgccacctggcgatgtcgcaggacaagacgcgcgccgctgtcactggtacccgggtgcaaacgctgttcactggcggcagtgtgttaccgccatcaacctaaaatttagcgtcgatgggcgcgatcctacctatttcctctttaaagggatttacatgctggtgagattggcccggttcgggattcccgcgggaggacacggcgtgttgaaaggcggtagtgcctggatgccagatatcaggttaacggtgtcgattttgtcctgcctttccgttttgccgatgggcctggcatctggggactcgcggtcccgttacgttgcgaattgccgaaggattaatctggtgacagcgaaaaatattacggctgatttgcaagggcgtatccgtggactgaagaagaacccttgctgttga

SEQ ID NO: 18167 - DNA, 903 bp, Homo sapiens
  SIMILAR (903)..(529): 601254mologous to Pseudomonas aeruginosa succinylarginine dihydrolase,accession number AF011922,Smith-Waterman Score=380.
tcagtctcgttggagcaggggatccacccattttccgcgagaaactgcctgtgtcgcaatgatccctaaggtaccaagttctttcgccagttcagccagcgttacattcgggttatttgccaggggatgatcgtgcgggatcatcgccataagcggttcatggacgatgactgcgtgttcaagcgactccggtaacgctgtgttagggtcgactctacaggatcttgattgtctgatgaaaatgagcagtaaaacctctacaggcttgtagctcaggtggttagagcgcacccctgctcctcctttgccttctgccttgattgtaagtttcctgagtcttgaggatcctggccagttcctcgatccgatcgccgacaagatcatgatcgccgcggtcatcctgtccgaggtgactctagcggatcccaacatattcgctttgcggtaaaactggcgaccgccattgtactggcgctgtttgttggctttcacttccagctggaaacgccacgctgggcggtacttaaaaagtttgccatccagcgtatcggcagatggcgcgatcgttgccgcattggctacccacattggcgaagcggaactgacgctggaaagccagtgcggtgcctggcgtgcaactttttccagtacctgctcatcgctaccactgaatcccaactgacgcagcaccggaataaacggacgctcgtgcggcgggatcacggcctgggggaatcccgcatcggcaagggctttcattttcagtaagccctgcttcgccgccagtcgcgggttagacacctgaaaacggtgacgggtagaggcttcattaccaaacgacaggcccgcgtaatgatgcgtcagccctaccagcccgtcgaaattgacttcccaggcgttcat

SEQ ID NO: 18168 - DNA, 709 bp, Homo sapiens
  SIMILAR (235)..(453): 861254mologous to Escherichia coli K12 putative membrane protein,accession number AE000403,Smith-Waterman Score=311.
tcagcccacatccatgtggctgccccggccttcagggaacgcctcggcaattttgacgccaccaaacaccgtgcggccggaatattcagccgctggcgaatatcgccatcgcctgccagtcaatatgctccgcgcggtaaccatctctattcgtccgttctgcaccaccagctccgcagtgccagcatttttaacaaacgtgtcctttaaacagaagtatcgcgtcccgtcttgaagcacgacaacctgatggcttatgtttattcgtaagggcgccttgaatgggtgcgtcttgcgcaacgtgttccggttcgtattcgtctcgacaaccagcaagagaacatctggcctgcgggcaccactgctacagtggtggtcactggcaaacaagatcgcgacgaaagccaggattcgttcttccgtaaaatggcccatcgcctgcgtgagtttggttaatcacgatgggtattttctccattgctaaccaacatattcgctttgcggtaaaactggcgaccgccattgtactggcgctgtttgttggctttcacttccagctggaaacgccacgctgggcggtactgacagcggcgattgttgccgccggtccggcctttgctgcgggaggtgaaccgtattctggcgctattcgctatcgtggctttttgcgcatcatcggcacatttattggctgtattgccggactggt

SEQ ID NO: 18169 - DNA, 1707 bp, Homo sapiens
  SIMILAR (1)..(420): 941254mologous to Escherichia coli metR,accession number M37630,Smith-Waterman Score=679.
atgatcgaagtaaaacacctgaaaacgctacaagcgttgcggaactgcggctcgctcgcagccgctgcggcgacgttgcatcagacgcaatccgccctgtctcaccagtttagcgatctggaacaacgccttggcttccggctatttgtgcgtaagagccagccgctacgctttacaccgcagggagaaatcctgttgcaactggcaaaccaggtactgccgcaaattagccaggccctgcaagcctgcaatgaaccgcagcagacgcgtctgcgcattgccattgagtgccatagctgtattcagtggctgacacccgcgttagaaaatttccataagaactggccgcagtattcagtcatttttaaatcgggcgtgacatttgacccgcatttcttctttcaacagggagagctggatccggagcgtgcctttgacgattttggaatcaagccgatggcttctgcttctatcgcccaggttcatagcgcgcgattcaactcgaatggtcacgaggtggtgattaaagtcatccgcgcggagactttgccggttattaaagcggatctgaaacttatctaccggctggctcgctgggatgccgcgtttgctgccggatggtcgccgcctgctgcgaacctgagttgcgcaggcagtacgaagatacaccgattgatgaaccgaacttgctgccgcaatctgccaacgccattcagcttcggcgcaaagccgggactgtacctcgtcgaggcgatggttggtgggtatcgggcgacgacggtggtgtttgtttccgataccgtggcgcttagcaaagtgtcaggcatagagcttctggtgtggggcgcgggtaaaaaacagggtgaagcgaacgccggctcagagatcttgtggactgacggtcttggcgtgatgacccgcggtgtgaccgatgacagcggtaccttgcagttacaacatatatcgccagaacgttcatacattctggggacgttagcgatggtgcaattacgggaagacatggccaagcggcaagctgcaggtattatagcaccacgatcgggtcgcaggatgcacaggacacagcataagcctccaatgaccaccgagatgggaccgcgtgccgtactgcgtgaagataccattccgtttcttgaggcactgaaagccagcggtaagcagcgaattttgctcaccaatgcgcatccgcacaacctggcggtaaaacttgagcataccggtctggacgcacaccttgatttattactttccacccacacatttggttatccgaaagaggatcagcggttatggcatgcggtggccgaagctacgggtctgaaagctgaaagaacgctgtttattgatgacagcgaaggagacgccatgaaagagaaacctgctgttgaggttcgactggataaatggctatgggctgcccgtttttataaaacccgcgcgctggcccgtgaaatgattgaaggcggtaaggtgcattacaacgggcagcgcacgaagccgagcaaaatcgtcgagctgaatgccacgctcactctgcgccagggaaatgacgaacgcacggtgattgtaaaggcgattactgaacagcgtcgccccgccagcgaggcagccttgctgtatgaagagactgcggaaagtgtagagaacgcgaaaaaatggcgctggcacgtaaacttaatgccttaa

SEQ ID NO: 18170 - DNA, 2562 bp, Homo sapiens
  SIMILAR (961)..(1533): 931254mologous to Escherichia coli NADH DEHYDROGENASE I CHAIN G (EC 1.6.5.3) (NADH-UBIQUINONE OXIDOREDUCTASE CHAIN 7) (NUO7) (FRAGMENT),accession number D90859,Smith-Waterman Score=917.
ttatccgttctgcttttgcatccactccaccacaaaatcagccagcccctcaacatcattaatatccagtaatgcgacatgtggagaaatcgtgcacgggattgagattgaggagaaagtccagatcccatccatgcccttcatatccccgtggagcagaaggtatttttctggcttctgctctctcaaattctcaactgtgcaatacccacaacggcaggcacacttcacgggtttttcctggcaaaactttgacgggtgcgtttcaacggaaggggagaagccacccttctccatggctgtgtgtgtgcctatggtctgctcaggtcccgggtgtagcaccgcaggtgattcatcgccgtgggtcgttatcgccgtggtcagtgaggtattgtcggcgataatctgacagccaggcagttgaaatgcgatgcgatcgcctgattcaatacccttcgctaacatccagtttgccagacagctcgcggcgggatcgagcgcgctataggtgtacgatgcaccatgattatcgaccacggcaattttgtctggcatcgcacgacggtctgctgccagtaatcggccagcgaagcatcgccccataacccgtgccagactcagcacgtcggcgtgttcatatcccaggcgttcatacattccgagcaccatgtcgttatcttccggcacattgactccgcgatgcccgtcataaccgcccatcaccgttccgaccacgtcaccgtttacctcagcgaccaaaaacaaactgacgtcatggttcatcttacgctcgatgtccatttccggatcgttccacgacgcagcaagtcgcacgctcccaagggtgatgacctttcgagggatatagctgtcgtcgaggcctgacccagaggattccagggcgcacgacaacgctacttcggtcgcccggaagacggcacggttacggcgaactgcgatcgtatcgaaaaccgttacaacggtacggtaaaccactacttcctctgcgaccgtggtcgtttcggttacggttacgtcaacctgaaggatcgtccgcgtcagccagtacagcgtcgtggcgatgatttcattaccaggcaatgcagggccgcggcagatattctgcgtcagtcgaagaaagtgatcggtattggttctccgcgtgccagcgtggaaagcaactttgcgctgcgtgaactggtgggcgaagaaaacttctacaccggtatcgctcacggtgagcaggaacgtctgcaactggcgctgaaagtgctgcgtgaaggcggcatttatactccggctctgcgcgaaatcgaatcttacgatgcggtactggtgctgggcgaagacgttacccagaccggcgcgcgcgtcgcgctggcagtgcgtcaggctgtgaaaggtaaagcgcgcgaaatggcggcagcacagaaagtggctgactggcagattgcggcaatcctcaacatcggtcaacgtgcgaagcatccgctgtttgttaccaacgttgatgacacccgtctgcaagcctggcaaaaagcacaaatcgacgtcatcgtgcaggcactggcagtgcaagaactcctgcaggttgactctagaggtatcccccagacgcacttcatagtcgaacatcggcgaataatgcaggccactgcgcggcagaatatcggacgtcattaccagatccagctctccctgttgcaaggcgggctgttcatcaaatgtcacgcccgatttaaaatccatgtctacctgcggccagttcttatggaaattttctaacgcgggtgtcagccactgaatacagctatggcactcaatggcaatgcgcagacgcgtctgctgcggttcattgcaggcttgcagggcctggctaatttgcggcagtacctggtttgccagttgcaacaggatttctccctgcggtgtaaagcgtaacggctggctcttacgcacaaatagccggaagccaaggcgttgttccacatcgctaaactggtgagacagggcggattgcgtctgatgcaacgtcgccgcaacggctgcgagcgagccgcagttccgcaacgcttgtagcgctttcaggtggtttacttcgatcatgaaaagccttcacttcggcatgaataatttgcgcttgaggaatatacaggaactcgcaattaaggatgtgtaaaccttctggaccggtaaaagcctttcccctttaaatttatggagcgatggctggcgttctcccccccgggccttactttagaaagctcccggggatgaatgaactttggcgcctccctaaattccccaacccctaggagttacctttcattggggggagaaaaaaaggcccctgtttgggagcacacccttggggtcccctcccgtaggcctgcggccgggaagctgaaaaaagcgccagaaaggtattggggcggggaacatccccccgtgaaaaaatggctgggcgggtaggcccggaaatgccggcctcgtccctgggaaaccctctagaagtcccacctgcggcgccggccaagcttggggccttgggccggcggttta

SEQ ID NO: 18171 - DNA, 3126 bp, Homo sapiens
  SIMILAR (2107)..(2814): 871254mologous to Escherichia coli metR,accession number M37630,Smith-Waterman Score=1089.
atggaactccggggtcggcccgcggtgatcgtgttgtgggcgtgtgtgcgggggccgtgggctgtaggtcgaagacgctgtcctagtctgaggaacgggtcgtcatcgggtggagtgatgtgtcggcggctcgcggatgttggtggctgccctttcggcttctcaggcgagacgcgcgttgtattgccggccaatgaaggggtagggagaaccacttcaccggtgcgaatggatgattgcccgttaaccgttgtcactgcgcgcattgctgcgctcactttcggcgcacacctgaccgacggttatgttctcggcgtcattggttacgccattattcagcttacgcccgccatgcaactgacgccgtttatggcgggaatgatcggcggctcggcgctccttgagcatcttattggactgcgcattttgattggcattggtctgggaggcgattattcagtaggtcacaccttgctggctgaattttccccgcgccgccatcgcggtattttgctgggcgcattcagcgtggtgtggaccgtaggctatgtgctggcaagtattgccggacatcactttatttccgaaaacccggaggcctggcgctggctactggcatcggcagctctgcccgcgttgttgattacgttattacgctggggaacgccagaatcaccacgctggctactgcgccaggggcgttttgcagaagctcacgctatcgtgcatcgctattttggtccccatgttttactgggcgatgaagtggtaacggcgacccataaacacatcaaaaccttgttctcttcgcgtactggccggcgcacggcgttaacagcgtcttctagtctgcgtcgtagtaccgagctgattatagaagcgacggaagcattgagcgggtatgcccttggtttgtatggtcggactcaggccgtttgtcagattccgtttggcgtgctttccgaccgcattggtcgcataccattagttgtcggtgggctggcggtgtttgccgccggtagcgttatcgctgcgctttccgactccatctggggaattattctgggccgggcgctagcaaggctctggagcaattgccgccgccgttatggcgctgctttccgatgtcacgcgcgaacgaaaccgcaccaaagcgatggcgtttatcggcttgcgatggtgcttggcccgatcatcactcacaaacttgggctgcacgcgctgttctggatgatcgctattctggcaacgaccggcattgcgttgaccatttgggttgtgcccaacagtagcactcacgtacttaatcgtgagtccggaatggtgaaaggcagtttcagtaaagtgctggcggaaccgcggctgctgaaactcaactttggcattatgtgtctgcatattttgctgatgtcgacgtttgttgccctgcccggacaactggctgatgcagggttcccggcggctgaacactggaaggtctatctggcgacaatgctaatcgcctttggctcggtcgtgcctttcattatctacgctgaagttaagcgcaaaatgaagcaagtcttgtcttctgcaacgcgggagaaacgtccgcgcttcaatggctttcgccgccacagtggtgttcgccaggcagataggttcgcggcaactatcgcagcggtacaatgctttgcaggccgtggaaccaaattcactgataagtgtggtatggacgctggcgcagcgcgggcaacgtacttctggcggcaaatgggcatggcaactgtgtccggcgggcgggctaatgccatactctcgcagacgctcacgggcatcgggggtcatccagtcggtggtccatgccgggtcgagttgcagcacaacctgaacggggtgacgagcacgcaattcacgccctaccgccagcagttcttcacgcgtggagttccccgcccaataactttcttgcgcttttttcagctcgcgacgcaggccaacgcgagggaaaccgaggcgatctggaacaacgccttggcttccggctatttgtgcgtaagagccagccgctacgctttacaccgcagggagaaatcctgttgcaactggcaaaccaggtactgccgcaaattagccaggccctgcaagcctgcaatgaaccgcagcagacgcgtctgcgcattgccattgagtgccatagctgtattcagttggctgacacccgcgttagaaaatttccataagaactggccgcaggtagagatggattttaaatcgggcgtgacatttgacccgcagcccgccttgcaacagggagagctggatctggtaatgacgtccgatattctgccgcgcagtggcctgcattattcgccgatgttcgactatgaagtgcgtctggtgttagcacctgaccatccactggcggcgaaaacgcgaattacaccggaagatctcgccagcgagacgctattaatttatccggtgcagcgtagtcgactggatgtctggcggcattttcttcagccggcaggcgtcagcccgtcactgaaaagcgtcgataacaccttattgttgattcagatggttgccgcgcggatgggtattgccgcgctaccgcattgggtagtagagagttttgagcgccagggtctggtggtgaccaaaaccctgggcgaaggcttgtggagccgactgtacgccgccgtgcgcgatggcgagcagcgtcagccagttacggaagcgtttattcgctcagcgcgcaatcacgcctgcgatcatctgccgtttgtgaagagcgcggagcgacccacttacgatgcacccacacatcgccgggagtttcagcggcgtgttattgccgagaagattttttgccagcaccatcgcgctaagttgaatcggctggaggaacggcaatacctgaccgttaatttccgcgcaatcgcccagcgcgtaaatatcggtattactggtttgcagataactatcgacgcaaacgccgcgattaatcgtcagcccggcgcgtcgtgccagggcggtttccgggcgcagtccggtggcggcaattaccgcatccacttcgatattgcgctggcggtccagcgttgcctgaatgccagaatccgttttttccagcccctgtaa

SEQ ID NO: 18172 - DNA, 1755 bp, Homo sapiens; identical to SEQ ID NO: 4183

SEQ ID NO: 18173 - DNA, 2118 bp, Homo sapiens
  SIMILAR (1779)..(1159): 961254mologous to Escherichia coli putative hydrogenase-2 small subunit,accession number U09177,Smith-Waterman Score=1123.
tcagcccatcatgaatgttgctgtcgatgacaggttgttacaaagggagaagggcatggcgagcgtacagctgcaaaatgtaacgaaagcctggggcgaggtcgtggtatcgaaagatatcaatctcgatatccatgaaggtgaattcgtggtgtttgtcggaccgtctggctgcggtaaatcgactttactgcgcatgattgccgggcttgagacgatcaccagcggcgacctgttcatcggtgagaaacggatgaatgacactccgccagcagtctctgttgtgctgatgtctgcgctctcgttgttgttctcgtctctgctcgtcatggcttcttgcttggtgtctctgtgtctctctgttgcgttcgtctcgtggtggggttgcgtcgcttctcggctcagtcgccgtctgcttttccgtaaacaccgttcacgacgcgccagaaaattgtttcgttctggctgggagtggctttcacggaatgccgccatccacaccgttgcagcacgacggtataagcccctggactccagttcttccgcctggcgggtcaggcacaaaatcacccgcgggtcgttagtgccgacatagaaattgcgcacaggtcccctgaatcctgccgggatctggctgtagtccacattgtcgtaactggctttgaagtacgggtcttcgcgtttttctgtgtacgtgctgacggacggcgataagcgcagggaaagctcatcccatttttcccgcagcttcgacgggctgagcacgttacggcaccagaacggatcgcggctgacgcggctgtacatctcgcagatttgtttgtgagtacgaccatcctgcacacacatcaggcgaatttcgtttgcccaggctgtccagttcggttctttgggacgaaccacctcgccgtcacattcggcggcctgctcgtacagggcgatgatttttttccagagccacttgctttgttgtgtcgtgccctccttgggggccctctcccctccgctcctcgggttatttgcgccctgattccttctctcgcagtgtttgtgcgctctgccacgcggctggcccgtcttccccaactcggattttgcccctccggtatttcccgttccgcttaaccggattgggttttcctcccggtttcggcccagcctttttcccttccccctcagtttttcacgcgtcccgtaattcaccgcgcccgccgggcacacttctacgcagccaggtagaccgcctttatcgagacgttccacacctttctggttgcacagctcgcacttatgcagcgcaccaaacgggttgttgtagtcgtacttcggcacgttgtacggacaggcgaccatgcagtaacggcagccggtgcacacatctttgtcgtaatggacaatgccggttttcggatcttttttcagtgcagagaccgggcacacagagacacagttcggatcgacgcagtgcatacactgtttcttaatgtacgcgtagccgttctcctcctggtctttgttgacccctgtgccgctggtccacacctgaatgatgttattggtatacggcgacagtttgtcgttgttcgaccaggtctgttccccttgcgggttacgttcagggaaattgatatcctgacacttggtgacgcaagcctggcagcctacgcacaaggtcgagtcgtacaacatccccagcgatcccggaattggcgggcggttttcagcagccgcatgactgacagacggcagcgcgcccgtcagcaatgccccgcaggaggccaaccacaccgccgagcaaccatagcggttatcgcaggtgactctagaggatcccctttcttcactgcgctgagcaccgttgtagaagcgatcgaccgtctgcgtgacacctcttcttctcaccagcgtatttccgtggtggaagtgatgggccgttattgtggagatctgacgttggctgcggccattgccggtggctgtgaattcgttgtggttccggaagttgaattcagccgtgaagacctggtaaacgaaatcaaagcgggtatcgcgaaaggtaaaaaacacgcgatcgtggcgattaccgaacatatgtgtgatgttgacgaactggcgcat

SEQ ID NO: 18174 - DNA, 1405 bp, Homo sapiens
  SIMILAR (1010)..(1264): 981254mologous to Escherichia coli K12 putative RNA polymerase beta,accession number AE000324,Smith-Waterman Score=412.
atggccctaaagggcccctgggtgatataccctggaaacccccgggtaaaggcccccgccctaaaggcccgggaaagtgtttcccaaagagttggtaaaggccccggaagaggggtaataaaggccaggggtaaaaaggctctggttgttgcgggggatgcccttccattgatgtccagatctcttgacacggctacctggtctatgtcctttggagtaggtcacacagccgtgaccgcatggcgttttggtcgagtttgccgtacgctgctaattagtgtcaagcacagtgtcacggttcctggagcgcgtggtaagggtttgtatgcgtccagccacgcctgtggtagttccggtaccagcgcggttcatcaatctgtacccactcgatgccgcgtgtcgccagttcggccagacttgctgataaaccggcagaatgtcgttcagcaggctcagtcggtcaattgttcacctttcactttccccagccacagccagcgccagcgcctcgtccacttcgtcagcagctgcgtccaggttcgccagtcggcgcacgtccacgaccaatacggaacagggttcgatatctaccgaaccatctttgttctgatgacgcgccggaacgttaccagcagcagactggtgtttagcgatctggaacaacgcctggcttccggctatttgtgcgtaagagccagccgctacgctttacaccgagggagaaatcctgttgcaactggcaaaccagaatgtcgaactacaaacaattgcgaggattacaaccgcgtcagccgggatccgttcgggtgccgtaagtgttcagcccgtcgaagctgcgggaaaaatgggatgagctttccctgccttatcgccgtccgtcagcacgtacacagaaatacgcgaagacccgtactcaaagccagttacgacaatgtggactacagccagatcccggcaggattaggggaccggcacgcctgccaccgatctggatgatgactactttgacatgttgcaggaggagctttgcagcgttgtggaggcctccggtgccagcctggagaaggggcggcatgaccagctgcttaccgcgcttcgtgcgctgctgttaagccgcaagaatccgtttggcgatatcaaattggacggcacggtgcaaaaggctctcgaaaaccttggtttgggagaagcggctccaagaaatgtagggacaggggcgaatcagatacctgatatgggtagttttatgctttctgcttcagtcctgatatccgggatctctagatcgaccacagcagcacttggctggacttcccagtctgggcccgagcaggaaaatgagaagcatttcagcaagccagacagggcaagccgttttcctggattcagagacttctccagttga

SEQ ID NO: 18175 - DNA, 1431 bp, Homo sapiens
  SIMILAR (1431)..(910): 961254mologous to Escherichia coli K12 transport of D- alanine, D-serine, and glycine,accession number AE000492,Smith- Waterman Score=865.
tcatccacattcgaatgccgtcgaggaacatctgggtgccatcatcaccagaatcaatcccatcaggcgttcaagtgcgttcacccttttctcgcccagcagacgtaaaaatagcgaagactgtagcaggatgacaaaggtgccgccccaggccagcagcagagcaatcaccagatgccccatctgattcgggtactgatgagacaacaacatcagcgtggcgagaatagtcggcccggcgactaacggaattgccaacggcacgataaatggctcttcacctgccggaagcccgctgctatttcctgaagcgctggggaaaatcattttaatggcgatcagaaacagaatgatgccgccagaaatggagacggtttctgctcgtaggctaagaaatgccagaattttctcacccgcaaacaggaacaccagcatcaccaggagagcaataagcaactctcgcaccatgattgcccgccgtcttttcggttcagtatgtttcagtacggacatgaaaataggtaggtttccgagcggatccataatcaggatcaataaaactggcggggaatatgcccctgatgcacggcacggtcgcttttctcgtcgagatattggcggtttgccaactggataaccaccgccctgagactcaagggcgtgaatcagcggtaacagacgtttatcttcacggccttttaaaataaagacttcctgaaaacgttcaggggcgcgctccagcagggcgcttcgctttggtcgctgcacatcgtagcgaactaccggcggctcgtcggagtcagtgaccgcacgtttgattttcttcactaccgatttcggatcttccagcaggccgataacgttattgcgattatcgtcagacttggacatcttcttggtgcggcttccagacaggggtctgacgattttgatcatcgcaaaccagaactccatctcaccgacatttttcacggtggcgagattgagcgtcagcagcagcactatcaccgccagggaggcgacccagtcggagagatcggggaaccagaactgagcataagccgtgatcgccaccacgtctgccataccggttacaacccagcagaaccagtaagtccagccggtgaaatatcctgcccacggcccgagtaaatcggaagcgaagtcactaaaagatttgtattccagattcgaaagcagcaattcccccattgcccgcatcacgaaaaagagcataaaaccaatgatcatataaacgaaaatgatcgacggcccggcaaggctaatcgttttgccagaccccataaacaaccccgtaccaatggcaccgccaatggcaataagctgaatatgtcggtttgtgagattgcgccgtagcgactgttcagccggagcctgatcatcggcaacgacttttacatgatctaccat

SEQ ID NO: 18176 - DNA, 834 bp, Homo sapiens
  SIMILAR (834)..(571): 981254mologous to Escherichia coli isovaleryl-CoA dehydrogenase precursor homolog(PIR:C34252),accession number D10483,Smith-Waterman Score=448.
ttacggcttcgccacaaaaccaatcgcttcgtacaccgcttttagcgtacgggaagcgtgcgcgctggctttttccgcgccatctttcatcacctgttgcaggaaggcttcatcgttgcggaaacggtgatagcgttctggtaattcttcgtacccttgattgctcccctggcgtagctgtatactgcgatctgatccgcttgcggcacatcccgttatacggtaccgtaagcttgcatatttatagcccgaaattgttatcctcgtccgtcgtgcgacagcgcgtgcaaattgcggcgggagagttgcgggtagttcggttgaacgcgaatggtgtcggcccaggcgacgttctcgatccagataacttccgcgccccattctgcgaacatttgcccggcaaacggtccggcgatttcgataccggagaagacaacgcgctatccggccaacggcccgaatttcggcatgggtagatgatccattatttgctcctgaaaaatttatgtagcgcatgactgccggatgcggcgtaaacgctttatccggcctacattcgtgctcccgtaggcgacccagcgtcaggatctgcatttcgtcagatcccccggagacgcggtctacacgcagatcacgccagaagcggctgatgcggtggttgcccgcaatcccgacaccgcccagcacctgcattgcgctatccacaacttcaaatgccgcattggcgcagaagtatttgcacatcgctgcatcgccagaggtgatggtgccgttgtctgctttccacgctgcttcatacagcatgtatttcatggagtttaatttgatcgccat

SEQ ID NO: 18177 - DNA, 1452 bp, Homo sapiens
  SIMILAR (397)..(774): 991254mologous to Escherichia coli orfX,accession number M62747,Smith-Waterman Score=626.
atgctatcggaaccagccctgcgggaactggcaaccgcaatagcgggggttcgcaaaggtgaaaacgacattgctgtcgaaaatatcattggcgcaaacatttttaatattgtcatcgtgttgggtttacccgcgctgataacgccaggagagattgatccactggcgtacagtcgtgactacagcgtgatgttgctgcaagcaggtaaagaagtcctggcgattgaacgtgaatgcctggcggagcttgatcaatacatcaatcagaatttcacgcttgcctgtgaaaagatgttctggtgtaaagggaaagttgtcgtcatggggatgggaaaatcggggccatattgggcgaaaaatggccgcgcaacgtttgccagcaccgaatcgccaaccatgaaaacagagactccatccgtaaaatttgttgctatcaccgctgacgaagcggggcaacgtatcgataactttttgcgtacccaattgaaaggcgtaccaaaaagtatgatttaccgtattttgcgtaaaggcgaagtgcgggtgaacaaaaaacgtattaagcctgaatataaactcgaagcgggtgatgaggtgcgtattccaccggttcgcgttgctgagcgggaagaagaggcggtttcgccacatctgcaaaaggtggcggcgctggcggacgtcatcttatatgaagatgatcacatcctggtgctgaataaaccttccggtacggcggtacatggcggcagtggtttaagcttcggcgttattgaagggagtaaagaggcagagagaggcaaagtcaccaaaggagggtggcagcttacagatgggagcagttttcccaggacaagccactggggcatctcagtcaagcccgcactgcaggatgcacagaagctgcgtaaagcgacgctggatacgctggccttgtatctggcttgtggtatcgatcctgagaaaagcaccatttttgttcagtcccacgtgccggaacatgcacagttaggctgggcactgaactgctatacctacttcggcgaactgagtcgcatgacgcagtttaaagataaatctgcgcgttatgccgagaacatcaacgctggtctgtttgactatccggtgctgatggcagcggacatcctgctgtatcaaactaatctggtaccgatgccaaaatttgccgcattgtgggggcaactgattgtttttatgggttcttttatcgctgtcactaatcccccggtgtatgattttgctgattttcttaacgataatctggcaaaaatcgttggcgtcgcgttggcgtggttagcgttcgccattctgcgtccaggatcggatgctcgtaaaagccgccgccatattcgcgcgctgcgccgggattttgtcgatcagctaagccgccatccaacactgagtgaaagcgaatttgaatcgctcacttatcatcac

SEQ ID NO: 18178 - DNA, 551 bp, Homo sapiens
  SIMILAR (201)..(425): 901254mologous to Escherichia coli tryptophanyl-tRNA synthetase,accession number V00371,Smith-Waterman Score=342.
acagagaatcatacaattccatactcgcgaggaatctggatattcctatttcatactcaataaacgggacctgttcacctcagatgaatgtgaaatctggatcttcaaattacctgcgtatggaattctatgatacttgggtgaagacgggcgcatacatcatcctggaaagtgtgctggctcccgggataaatgagggcaacttagtgaagcatgtagtctgctcggtaacgggccagagcatcccagaactggaaaaacagttcgaaggcaagatgtatggtcatctgaaaggtgaagtggctgatgccgtttccggtatgctgactgaattgcaggaacgctatcaccgtttccgcaacgatgaagccttcctgcaacaggtgatgaaagatggcgcggaaaaagccagcgcgcacgcttccctggacgccagcagcaccggaaccgcagtcactcgcctgaagatacctctgtatcgcacagagcacttgctacacgaggctcttgcgcacgctctaacgcaagcttttaacgaacgcttgctttga

SEQ ID NO: 18179 - DNA, 3132 bp, Homo sapiens; identical to SEQ ID NO: 10737
  SIMILAR (2022)..(1378): 961254mologous to Escherichia coli caiA,accession number X73904,Smith-Waterman Score=1093.

SEQ ID NO: 18180 - DNA, 624 bp, Homo sapiens
  SIMILAR (423)..(172): 1001254mologous to Escherichia coli K12 putative enzyme,accession number AE000202,Smith-Waterman Score=428.
atgaatcacttcgatggcgcaaaacaaaatgtcgtgggtgccgacgctcaccacctggctgatacggcagtcaaacgaaaccagagcctcttccagttgcgggcatccggtcacccccgtctgccagcgggcggcggcaaagcggtgttccatgggcgttttgccgccaaaaagcccgcaggcttcttcaaaggacagacgtggcaggcgcgcataaagcttgctgctatcgccatagccgatattaatcagcagattgctcttcagcgtgctgcccgtaaaaaaggcgtcgtccacgtgttgacggtcaaagcccgacatcgggccggtatccagtcccagcgcccggcaggcgacgatcagataggccgcctgcatggaactgttgcgaaacgctgtttcttcggcaagttgtgggctggaggcagtagcgcacagcgactggcaaacaacagcgatagcattacgtatcgtgtgcgcaaaggcgattcgctttcaagcattgctaaacgccacggcgtgaacatcaaagatgtgatgcgctggaacagcgacactgcgaatctgcaaccaggcgataagctgacgttgtttgtgaaaaacaacaacatgccagattcctga

SEQ ID NO: 18181 - DNA, 1623 bp, Homo sapiens
  SIMILAR (1248)..(4): 971254mologous to Escherichia coli Respiratory nitrate reductase 2 a chain (EC 1.7.99.4),accession number D90787,Smith- Waterman Score=2142.
tcattttttcgcctcctgtacctgatcgcgaccttcatcatccagccagttaacgttcttcatcttgcggatcatgatgaactcatcgcggttcgatccgacggtgccgtagtagttaaagccccaggccagctgcgcgtaaccgccaatcatatgcgttggtttcgggcaaacgcgggtaaccgagttatgaatgccgccgcgcatgccagttacttccgaaccaggaatattcataatgcgttcctgggcgtgatacatcatggtcatgcccggcggtacacgttggctgaccaccgcgcgggcagtcagcgcgccgttggcgttgaatacttccacccagtcgttatcgacaatggtcagttctcgggcatctgtttcgctgatccagacaatcggtccaccgcgagagagcgtcagcattagcaggttttcactgtaggttgagtgaatgccccatttctggtgcggcgtcaggaagttaagctgcatgtttctcgggaagcccgtcttggacggtatactggcgcatctcatgacgctacgggtgtcgataggcgggcgataagccaccaggctttcaccaaaagcacgcatccacggatgatcctgatagagctgctggcgtcccgacagcgtgcgccacggaattaactcatgaacgttggtgtatcccgcgttataggagacgtgatcgctttccagaccggaccaggtggggctggagataattttacgcggctgcgcctgaatatcgcgaaagcgaatcttctcgtcctctttgtgcagcgccagatgggtatgttcgcgcccggtgatctcgcccagcgcctgccacgctttgactgcaacatgaccgttggtttccggtgccagtgccagaatcacttctgaagcgtcaatggcggtgtcaatcagcggacgcccctgtgccgggccatcacgcttggtgtaattgagtttgccgaggaaatcgatttcatcctgggtattccacgaaatccctttaccgccattgccaagtttgtccatcaatggcccgagcgaggtaaagcgttcatacgtagcagggtagtcgcgctccaccgccacaatattcggcgcggttttgcctggaatcagatcgcattcgcctttgcgccagtcgagcacttcacacggctgtgagagctctgccggagagtcatgcagtaggggttgtaataccacgtcggtttctttgccaagatgacccacgcacacttgcgaaatgcatgcatgacggtcgggtttggcgggcagcccggaagggggagccagttgcctggcggtccgtgctctgggaaggggtcctggtggtacgctggtgtactcgacctgtaccccgacgcagtagagtttgtaccacttggcgatctcttccctggtgcaaacaaagcgctgaccgaagaaggctttttgcatgttttcccacaaatttacgactgcgaaggcttcttcgttgctcgtctgcgcctctggcagcgtgacaaagaactgtggttgttcccggtgggcattgaagccctgatcggtaaagtccgattttctcggttggggattaaacttgccgagacgcacaacaaaggttatcgctggcagcat

SEQ ID NO: 18182 - DNA, 1551 bp, Homo sapiens
  SIMILAR (910)..(1401): 981254mologous to Escherichia coli K12 putative glucarate dehydratase,accession number AE000362,Smith-Waterman Score=888.
atgcataatggcgttctgggcgttaatatctgccactggcaactgcataatggcaaacagtttcgctgctgccgggtttttctcggcccaggctttgttggcaacgatatgcatggtgctgaccgggaagccataattcgcaccattcggcagtttggtatcggcgtttttatcgcccggcagtgcggagaacggcacctgcaaccagacgacatctttgcccggcttcagttcgttactcacccagtacggcgtccaggtgtaataaaacaccggtttgccctctttgtagcgactgatggtgtcggccatcatcgctgcgtagttcccctgattatgcgtcacggtgttggtcagttcatacgcggcaagctggtggttgatcgcaccttcgcagacccagacaggttggggaatcttcggatcttcagtgtgccaggtggcgaattggacggtcggggaacatatcgccaggtaccgttccggcgtacaatccttcgttattttttcccgcgtttcattttcacaggcccaccacggaggtccgaaagaggtccggacatcggatcactcagctggtaccggctgctggaagatccgaaatcggtagtgaagaaaatcaaacgtgcggtcactgactccgacgagccgccggtagttcgctacgatgtgcagaacaaagcgggcgtttccaacctgttggatatcctttcagcggtaacgggccagagcatcccagaactggaaaaacagttcgaaggcaagatgtatggtcatctgaaaggtgaagtggctgatgccgtttccggtatgctgactgaattgcaggaacgctatcaccgtttccgcaacgatgaagccttcctgcaacaggtgatgaaagatggcgcggaaaaagccagcgcgcacgcttcccgtctaccgactgcaaccaatatgatcgccaccgactggcggcaaatgggccatacgctctccctgcaatccgttgatatcccgctggcggatccgcatttctggacaatgcaaggttcggtacgtgtggcgcaaatgtgccatgaatttggcctgacctggggttcacactctaacaaccacttcgatatttccctggcgatgtttacccatgttgccgccgctgcaccgggtaaaattactgctattgatacgcactggatttggcaggaaggcaatcagcgcctgaccaaagaaccgtttgagatcaaaggcgggctggtacaggtgccagaaaaaccggggctgggtgtagaaatcgatatggatcaagtgatgaaagcccatgagctgtatcagaaacacgggcttggcgcgcgtgacgatgcgatgggaatgcagtatctgattcctggctggacgttcgataacaagcgcccgtgcatgtccagcgtccggtccaacttctttttgtgcgtatacgtgtcacacgcggaaactctcctcacggacacccgtttaacaacagacgctaaaataaagccggtccaccagtctcccttggaacgggacagaaaagtacagcaaaatgcgtga

SEQ ID NO: 18183 - DNA, 2760 bp, Homo sapiens
  SIMILAR (1873)..(2745): 981254mologous to Escherichia coli aminopeptidase A,accession number X86443,Smith-Waterman Score=1461.
  misc_feature (1)...(2760): n = a,t,c or g
atgacgcagtttaaagataaatctgcgcgttatgccgagaacatcaacgctggtctgtttgactatccggtgctgatggcagcggacatcctgctgtatcaaactaatctggtaccggtgggtgaagaccagaaacagcacctcgaactgagccgcgatattgcccagcgtttcaacgcgctgtatggcgagatctttaaggtgccggagccgtttattccgaaatctggcgcgcgcgtaatgtcgctgctggagccgaccaagaagatgtccaagtctgacgataatcgcaataacgttatcggcctgctggaagatccgaaatcggtagtgaagaaaatcaaacgtgcggtcactgactccgacgagccgccggtagttcgctacgatgtgcagaacaaagcgggcgtttccaacctgttggatatcctttcagcggtaacgggccagagcatcccagaactggaaaaacagttcgaaggcaagatgtatggtcatctgaaaggtgaagtggctgatgccgtttccggtatgctgactgaattgcaggaacgctatcaccgtttccgcaacgatgaagccttcctgcaacaggtgatgaaagatggcgcggaaaaagccagcgcgcacgcttcccgtacgctaaaagcggtgtacgaagcgattggttttgtggcgaagccaacgacaaaagccacgcacacaagagacgagaaacagaacaaaaaggcgacacaagaaagaaaaaaaacaacacagcaagagaagcaaaagagaaaaacaagaagtaaaaacgacaatgagccggtgtcacggcaacttgaccccattgatccagaagtaattctctttccacgcctattttccctaggttgccaatattgtcgtggaaaaattcctggtgaattgcctccatctgtcgtagaagtggtgcagactaagcttcacagtttaagtgtgcggtttgctgcatacacatggcgccggacttgtctcagatccagggacaacgctgatacgatgccgagcgtgcagttgaactggaattccgggcccaaacggcggccgggggcagaagggcggcgtttggcggtaattggaggcggcctctttccggcatatccgtgcgtcatcgatcgtgaactcagcgtggcgactgcggatcagngagccgctttcaaacctttttggcggcaaaacgcccatggaacaccgctttgccgccgcccgctggcagacgggggtgaccggatgcccgcaactggaagcctggaccaccatagcgcctttcatgcattacgtcctggtgttacgctgtttaactcgacctgtaccttaaaccaggaagaaaacgaagccgtttgcctgtggctgaaagagacttaccccgacgcagtagagtttttaccacttggcgatctcttccctggtgcaaacaaagcgctgaccgaagaaggctttttgcatgttttcccacaaatttacgactgcgaaggcttcttcgttgctcgtctgcgtaaaactcaggcgattcccgccttacccgcccccaaatacaaagtcggtaattttccgttcagcccggtgaaagatcgcgaagctggacaaattcgtcaggcggctacaggtgttggcttaaactgggatgaaaacctgcgcctctggcagcgtgacaaagaactgtggttgttcccggtgggcattgaagccctgatcggtaaagtccgattttctcggttggggattaaacttgccgagacgcacaacaaaggttatcgctggcagcatgaagcggttattgctcttgcctcacccgataatatgaatgcattcgagctgacaccgcaggaagcggaggagtggaggcagaagttggagtttagtgtaaaaagcggtagcccggagaaacagcggagtgcctgcatcgtcgtgggcgtcttcgaaccacgtcgcctttctccgattgcagaacagctcgataaaatcagcgatgggtacatcagcgccctgctacgtcggggcgaactggaaggaaaaccggggcagacattgttgttgcaccatgttccgaatgtactttccgagcgaattctccttattggttgcggcaaagaacgtgagctggatgagcgtcagtacaagcaggttattcagaaaaccattaatacgctgaatgatactggctcaatggaagcggtctgctttctgactgagctgcacgttaaaggccgtaacaactactggaaagtgcgtcaggctgtcgagacggcaaaagagacgctctacagtttcgatcagctgaaaacgaacaagagcgaaccgcgtcgtccgctgcgtaagatggtgttcaacgtgccgacccgccgtgaactgaccagcggtgagcgcgcgatccagcacggtctggcgattgccgccgggattaaagcagcaaaagatctcggcaatatgccgccgaatatctgtaacgccgcttacctcgcttcacaagcgcgccagctggctgacagctacagcaagaatgtcatcacccgcgttatcggcgaacagcagatgaaagagctggggatgcattcctatctggcggtcggtcagggttcgcaaaacgaatcgctgatgtcggtgattgagtacaaaggcaacgcgtcggaagatgcacgcccaatcgtgctggtgggtaaaggtttaaccttcgactccgggggtatctcgaacaagccttcagaaaacatggatgagatgaaatccatcacagtttga

SEQ ID NO: 18184 - DNA, 690 bp, Homo sapiens
  SIMILAR (350)..(688): 991254mologous to Escherichia coli ruvB protein,accession number M21298,Smith-Waterman Score=558.
ccggaatgtcagcgcagcagttcgttaatgccgttgagcgtgaagaagtgggggcactggtgaaactgccgggtattggcaaaaaaaccgccgaacgcttgattgttgaaatgaaagaccgatttaaaggtttgcatggcgatctctttacgccagccgccgacctggtactcacgtctcctgccagcccggggaccgacgatgctgaacaagaagcggttgccgcgctggtggcgctgggctataaaccacaagaagcaagccgcatggtgagcaaaatcgctcgccctgacgccagcagtgaaactttaattcgcgaagccctacgcgccgcgttatgaggtaaaggatgattgaagcagaccgtctgatttctgccggtaccactttgccggaagatgtagcagatcgcgccattcgccccaaattactggaagagtatgttggtcagccgcaggttcgttcacagatggagattttcatcaaagcagcgaaactgcgcggcgatgccctcgatcatttgttgatttttggtcctccggggttgggtaaaactacgcttgccaacattgtcgccaatgaaatgggcggtaatttacgcacgacttctggtccggtgctggaaaaggccggcgatttggctgcgatgctcactaaccttgaaccgcatgacgtgctgtttattgatga

SEQ ID NO: 18185 - DNA, 528 bp, Homo sapiens
  SIMILAR (49)..(495): 551254mologous to Escherichia coli Heterocyst maturation protein (devA) homolog,accession number D90747,Smith-Waterman Score =357.
atggcgcggcgctgccggtggctatcgaacctttacaggtcattgttattgcgctggtggcgatggctatcgcgctgctgtctacgctttacccttcatggcgcgctgccgccactcaacccgctgaggctttacgttatgaataagatcctgttgcaatgcgacaacctgtgcaaacgctatcaggaaggcagtgtgcaaaccgatgtgctgcacaatgtcagtttcagcgtcggcgaagtgcggaaaagagcaccaccagcgatgccagaatacagccagtgcggcggccaaacagcgaaagaagacgtagtaaaaagaaggtcaccaacgttcctgagtgcgggtttcatcttctacctgcaagttgagaaagagctggccagcggtgaactgattgacttaacgcctgggctatttcaacgacggatgctctactggcaccgctttgctcctgaaagccgcatgatgcgtaaagtcactgatgcgttactcgattatggtcacaaagtccttcgtcaggattaa

SEQ ID NO: 18186 - DNA, 1417 bp, Homo sapiens
  SIMILAR (373)..(1416): 861254mologous to Escherichia coli purH (EC 2.1.2.3),accession number J05126,Smith-Waterman Score=1468.
atggggctcgtggagggagcgccgacctccagcagggttctgtggctgcttaccctgattgaaggacaaggagaagatgtcggtgaaaccgtacttgcagataccgtaggggggattcgccacctgccgcacgagcgggtggcggcatttaaagccacgttacaagagacgcggcaagccacattactgctgcacgtcattgatgcggcggatgtgcgtgtacaagaaaacatcgaagcggtgaatacggttcttgaagagatcgacgctcacgagatcccaaccctgctggtgatgaacaagatcgatatgctggaagatttcgaaccgcgtattgatcgggacgaagagaacaaaccgaaccgtgtctggctttccgcacagaccggagcggggataccacagctttttcaggctttgacggagcggctttccggcgaggtggcgcaacatacattgcgtctgccaccgcaagaagggcgtctgagaagtcgtttttatcagcttcaggcaatacaaaaagagtggatggaggaagaccgcaacgtcatggaggttgttaacctgtatccgttcgcccagaccgtggcccgtgaaggttgctcgctggaagatgcggttgagaacatcgatatcagcggcccggcgatggtgcgctccgccgccaagaaccataaagatgtcgcaatcgtggtgaagagcagcgactatgacgccattattaaagagatggatgacaacgaaggatcgctgacgcttgcaacccgtttcgacctcgccatcaaagccttcgaacacactgccgcctacgacagcatgattgccaactacttcggcagcatggttccggcttaccacggtgaaagcaaagaagccgccggtcgcttcccacgcacgctgaacctgaacttcattaagaagctggatatgcgttacggcgagaacagccaccagcaggctgccttctatatagaagagaatgtgaaagaagcctccgttgctaccgcaacccaggttcagggtaaagccctctcttataacaacatcgccgataccgatgcggcgctggagtgcgtgaaagagttcgccgagccggcatgtgtgattgtgaagcacgccaacccttgcggcgtggctatcggcaattccattcttgatgcttacgatcgcgcgtacaaaaccgacccaacctccgcattcggcggcatcattgcctttaaccgcgagctggatgcggaaaccgcacaggccatcatttctcgtcagtttgtcgaagtgattattgcgccgtccgccagcgaagaagccctgaaaatcaccgccgccaaacagaacgtacgcgttctgacctgcggtcagtggggcgagcgtgttccgggcctcgatttcaaacgcgtgaacggcggtctgctggttc

SEQ ID NO: 18187 - DNA, 702 bp, Homo sapiens
  SIMILAR (385)..(690): 981254mologous to Escherichia coli No definition line found,accession number U00006,Smith-Waterman Score=503.
atggctatttttgggtttatttttcgttatgggtatggtggatatggcctggtcaagggttcgtccgaaccaaagggggcgattttccatggccttaccaagtggtggatgggtggcctggtaacgagctgggttcccggaaactttaagccccgattccgaaaacgccggaagtacaaatattgcgccgtcgggttcgagccgatcgccgatcagcgcccccccaaccagtcgttgattgacgagtacagcaagttaaaaactcgcctgcgcgaagcggcactggcgtaataccgtcctttctacagcctcctttcggaggctgtttttttatccattcgaactctttatactggttactccctacccaatcgtattatcaaaatgaaaaaaattatcgcattgatgttgtttttgacattctttgcccacgccaacgactccgagcctggcagccagtatttaaaggcagcagaggccggggaccgacgcgcacaatattttcttgccgacagctggtttagctccggcgatttgagcaaagccgaatattgggcacagaaagccgccgacagcggtgatgctgatgcctgcgcgctgctggcgcagatcaaaatcaccaatccggtcagtctggactatccacaagcaaaagttcttgcagagaaagcggcgcaagcggagaaagagcagccgtggtag

SEQ ID NO: 18188 - DNA, 2187 bp, Homo sapiens
  SIMILAR (687)..(4): 991254mologous to Escherichia coli ATH1 protein,accession number D90769,Smith-Waterman Score=1180.
tcaacgcagtgaaacggcgccagaagttcgaatcgcaatacgctgcgcgtcaagagtgacctgtaattcgcagccctgccagaacagagggaaagacaactgttgccactgctcaggtaacgccggattgagatgcaattcaccgtcacgcacgctcaccccggcaaaaccctgaatcgcccccagccagatagcgccagttgcggcagcatggataccatcatcacaactatgcggatcagcaccaagatcgatttcagtcccctcgcgccagaactgataactttgggtcagcaggccacagcgtgcggcaacaatgccgtggattgctttacttaatgacgagtcgtgaatagtgcgcggttcataaaattgcagattggcaagacacgatgccgctgagaactgctccggcagcatgtaattgagcatcaccacatcagcttgtttgaggatctgcatctcgttcacttctgcgcgtgaataatccagcagtatggtttgcttccccgccgccgctttgtatttcgccagattaatcgccggcttagccataaacgaatcatcctgcggcaaaacgccgtcgggctgaatttctggcatccatagctctttgaggaacatttcggcgcgatggataaacgcatcgtcgctacagccgaactggcgggcaatattcagcgcctgtggatgcgcatcgtccacggcgacgcttaaacccactttttccattaccggccagtcgatgagatcatcgccgacataagccacattttccggggcaatcgccagtttttccagcagatcgcagtttagcctttcgcccggtaatgatagcgacttcaatatcagaggtgagcgcacacgaatgccataaccgtcacgaacattgaacgctttcagctcttcgccattattgcccatataaatcaggccatgtgttgtgcgctgttggtcagcagcatttctctttcgtatgctgcagaagttccgagcggcacagtactggcagagaagcaggagctggtgcgccacattaaagatgagcctgcgtcgctggatcccgctaaagccgtgggcctgccagagattcaggtcattcgcgatctgtttgaaggtcgtatctggacttttaccctgcgcgataacgcaaaatgggcggatggcacaccggtaacggcgcaagattttgtctacagctggcaacgtctggtggacccaaaaacattgtcgccatttgcatggtttgccgcgctggcgggaatcaacaacgcacaggcgattattgatggtaaagctacgcctgaccagcttggcgtcaccgcagttgatgcccatactttgaaaattcagcttgataaaccgttgccgtgtttgtgatttaccggaccccaccatcagttcggaaacagtgctgatccccggaatcagaggaatagtcccttcggtagcagctttcagcagcgcctcggtcagacccgggctaattgcgaactgtgcacccgcttcagtgacttctgccagctgctgtggattcagcaccgtaccggcacccacaatcgcttcaggcacttctttggcgatagcacggatagcgtcaactgcacactcggtacgcagagtcacttccagaacgcgcaccccaccagcaaccaacgcttttgccatcggcaccgcgtgttccagtttttttaccacgataaccggtacaaccgggccggtggtcaggattgattctgcacttgttttccagtttttcatcagagttttctctcgcctgattacaaatttgtcgtcggacagtttttcacgcaaggcgctgaataattcacgtcctgttcccacgcgtgacgcgctcaggtcaggaatgtgcggttcgcgagcagccagttccgcttcgtctaccagcagcgtcagttcgcctgtctgtccattcacacgaatgatgtccccgtcgcgcacttttgccagcagcccgccatcgtaggcttctggtgttacgtggatagctgacggcactttaccggcgtccagatcggcaatcagatcgtcgacatcttccagaccaatatgcaggcgaatcaaggtcccgctaaaatcgatctcgccttgtgggcgaatggcggcgatatgttctggttgatttgccaggatcaacgattcatacccgccccacgagtaggccat

SEQ ID NO: 18189 - DNA, 3039 bp, Homo sapiens
  SIMILAR (1)..(798): 901254mologous to Escherichia coli K12 putative transport protein,accession number AE000362,Smith-Waterman Score=1237.
atgagttctttaagtcaggctgcgagcagtgtggaaaaacgcacaaatgctcgttactggatagtggtgatgttgtttatcgtcacatccttcaactacggcgaccgcgctacgctctctatcgccggttcggaaatggccaaagatatcggccttgatcccgtgggaatgggctatgtgttctctgctttctcatgggcttatgttatcgggcagatccctggtggctggttgctggaccgttttggttcaaaacgcgtctacttctggtcgatctttatctggtcgatgtttaccttgctgcaaggcttcgtcgatatctttagtggattcggcattatcgttgccctgtttacgctgcgcttcctggtcgggcttgctgaagcgccatctttccccggcaacagtcgcattgttgcggcctggtttccggcgcaggaaaggggaacggcggtgtcgatttttaactccgctcaatacttcgcaacggtgatcttcgcgccgattatgggctggctgacgcatgaagtgggctggtcacacgtcttcttctttatgggcggtctggggattgtcatcagctttatctggttgaaagtcatccacgagccaaatcaacatccgggggtaaataagaaagagctggagtacatcgccgcgggtggtgcgctgatcaatatggatcagcaaaacaccaaagttaaagttgctcatcgaggcgatggaaagtcgctcgagtcgcccatgtcagtacccgttcaacatcctatgtatatcgatggacagtttgttacctggcgtggagacgcatggattgatgtggtaaaccctgctacagaggctgtcatttcccgcatacccgatggtcaggccgaggatgcccgtaaggcaatcgatgcagcagaacgtgcacaaccagaatgggaagcgttgcctgctattgaacgcgccagttggttgcgcaaaatctccgccgggatccgcgaacgcgccagtgaaatcagtgcgctgattgttgaagaagggggcaagatccagcagctggctgaagtcgaagtggcttttactgccgactatatcgattacatggcggagccaaacaacctggcgggcattgcgctggttaattcaacaaagcgttccggtgttatacgtcccgtcatcacgccactggaaaacagtaactgcatgcggttttccacaccggcactgctggcggcgctgtttgtttgcctgaaggcggcgaacgtgacgtccatacgtactgaaccgacctacacgctttatgcgacgttcgataacattggcggcctgaaagcgcgctctccggtcagtattggtggcgttgttgtgggtcgggtggcggatattacgctggacccgaaaacctatctgccgcgcgtaacgctggaaattgaacaacgttataaccacattccagataccagttcgctgagcattcgtacttccggcctgctgggggaacaatatctggcattaaacgtcggttttgaagacccggaactggggactgctatcctgaaggatggcgatacaattcaggacactaagtctgcgatggtgctggaagatctcattggtcagttcctttacggtagtaaaggcgatgacaataagaatagtggcgatgcgccagctgctgcgccagcaaaagcagagaacattcgtctgctgatcctcgatgtcgatggcgtactgtcagatggcctgatttatatgggcaataatggcgaagagctgaaagcgttcaatgttcgtgacggttatggcattcgttgtgcgctcacctctgatattgaagtcgctatcattaccgggcgaaaggctaaactggtagaagatcgttgtgccacattggggatcactcacttgtatcaggggcagtcaaacaaactgatcgcctttagcgatctgctggaaaaactggcgattgccccggaaaatgtggcttatgtcggcgatgatctcatcgactggccggtaatggaaaaagtgggtttaagcgtcgccgtggacgatgcgcatccactgttgggtaccgagatcgatgcgtatatcgaaaatgctgactatcagtataataaaaagcgtctgcgtgaaatcgaccgtcgcgtgcgctatctcactaaatgcctggaaaatctcaaaatcgtcgattactcccctcagcaggaaggcaaagtcttttttggcgcgtgggtggagattgaaaacgacgatggcgtgactcaccgtttccgtattgtcggctacgatgaaatttttggccgtaaagattacatctctatcgattccccgatggcccgcgcattgctgaaaaaagaagtcggcgatctggcggtggtgaatacccctgccggggaagcgagctggtatgttaatgctatcgagtacgtgaaacctcgcctgaatcaaacggttcgtctgctgcttgagcatgagatgggacaggtttggatcagcggcgaaatttctaatttcacgcaaccagcttccggtcactggtactttacactcaaagacgacaccgcccaggtacgctgcgcgatgttccgcaacagcaaccgccgggtgaccttccgcccacagcatgggcaacaagttttagttcgcgccaatattacgctctacgagccgcgcggcgactaccagataatcgttgagagtatgcagccggccggtgaagggctgctgcaacagaagtacgaacagctcaaagcgaagttgcaggctgaaggtttgttcgatcagcaatacaaaaaaccacttccctcccctgcgcattgcgttggtgtgatcacctcaaaaaccggtgctgcgctacatgatattttgcatgtgttaaaacgtcgcgatccttctctgccggtgatcatctaccctgccgccgttcagggcgatgacgcgccggggcaaattgttcgcgccattgaactggcgaatcagcgcaatgagtgcgacgtattgagaccatgcgtctggtgccgccgcgtacggtgccgaaggcgctgtcggtga

SEQ ID NO: 18190 - DNA, 945 bp, Homo sapiens
  SIMILAR (469)..(888): 1001254mologous to Escherichia coli ORF_o191,accession number U18997,Smith-Waterman Score=721.
atggaatacatgaaaacccattatggagagcccattggcgtacgccatgccgctgaccatgtcggcattcaccggactcatttctctaagctattcaccgagcatgttgggatgaatccatctgactatttgcggaagcaacgaatggaacaggcattgcacttgctctgcagcacttctcgtcctatcgtcgaaattggcctgagcctcagctttgcggactccgcctccttcactcgcgctttcggtcaatattacggtgtatcgccgaagcaagctcgtctggctggcagagaaaaaaacagcgatctgctggaaaaactggcgattgccccggaaaatgtggcttatgtcggcgatgatctcatcgactggccggtaatggaaaaagtgggtttaagcgtcgccgtggccgatgcgcatccactgttgatcccgcgcgccgattacgtgacgcgcattgttggcgccagacgttgggttatcattgtgctatcactggcggttctggtgatgatcggcattaatatggccgaaaaagacgataccgcccaggtggtcgtcaacaacaatgatcccacctataaaagcgagcatacggacacgctcgtctataacccagaaggggcactaagctatcgattgattgctcaacacgttgaatattattccgatcaggccgtttcgtggtttacgcagccggtacttaccacgtttgataaggataaaatcccgacatggtccgtaaaagcagataaagccaagctgaccaatgaccggatgctctatttatatggacacgttgaagtcaacgcacttgtgccagactctcaacttcgcagaatcacgacggataacgcgcagatcaatctggtgacgcaggatgttgacctgcaggcatgccagttgacacaatcaggctcggaccggcgatctctagagtag

SEQ ID NO: 18191 - DNA, 2127 bp, Homo sapiens
  SIMILAR (1309)..(2058): 981254mologous to Escherichia coli EmrK,accession number D78168,Smith-Waterman Score=1221.
atggtgatccccaaggcactgcagattcgccctgcggcattctacgcgacatgctgcagtgacagctcgcggttatcgacggcgagcgacatgagtatcgggagtgaatcagcagccggatacctcgcgtgtagtttacgccgtcagggcattaaccttggtgaacccgcgctggtacaactgggtaacgtcgctgaattgtatattacctttttcgcgctgctgaaactgggcgttgcgccggtgctggcgttgttcagccatcagcgtagtgaactgaacgcctatgccagccagattgaacccgcattgctgattgccgatcgccaacatgcgctgtttagcggggatgatttcctcaatactttcgtcacagaacattcctccattcgcgtggtgcaactgctcaacgacagcggtgagcataacttgcaggatgcgattaaccatccggctgaggattttactgccacgccatcacctgctgatgaagtggcctatttccagctttccggtggcaccaccggcacaccgaaactgatcccgcgcactcataacgactactactacagcgtgcgtcgtagcgtcgagatttgtcagttcacacaacagacacgctacctgtgcgcgatcccggcggctcataactacgccatgagttcgccaggatcgctgggcgtctttcttgcgaaggaacggtgtctggcggctatccatagacctccacacacacaaaaaaccacaacacaaaggcacgctaccagttacctgccaatgaataagacaactgagtacattgacgcaatgcccatcgccgcaagcgagaaagcggcattgccgaagactgatatccgcgccgttcatcaggcgctggatgccgaacaccgcacctgggcgcgggaggatgattccccgcaaggctcggtaaaggcgcgtctggaacaagcctggccagattcacttgctgatggacagttaattaaagacgacgaagggcgcgatcagctgaaggcgatgccagaagcaaaacgctcctcgatgtttcccgacccgtggcgtaccaacccggtaggccgtttctgggatcgcctgcgtggacgcgatgtcacgccgcgctatctggctcgtttgaccaaagaagagcaggagagcgagcaaaagtggcgtaccgtcggtaccatccgccgttacattctgttgatcctgacgctcgcgcaaactgtcgtcgcgacctggtatatgaagaccattcttccttatcagggttgggcgctgattaatcctatggatatggttgcttctgcgttgtcgccgaagtcgcttcaggcacgtattcagtatcaacaatctttagaagattataaccgtcgagtgccgttagcgaagcagggggttatttcaaaagaaacgctggagcataccaaagatacgttaataagtagcaaagcggcattgaatgccgctatccaggcttataaagcgaataaagctttagtaatgaacacaccattaaaccgtcagccacaagtcgttgaagcggcggatgcaactaaagaagcctggttggcgcttaaacgtacggatattaagagtccggttaccggctatattgcccagagaagtgttcaggtcggcgaaacagtgagccccggacaatcgttaatggctgtcgtaccggcacgtcaaatgtgggttaatgccaactttaaagaaacacaactcacggatgtacggattggtcaatcggtcaatattatcagcgatctttatggtgaaaatgttgtgtttcatggtcgggtgacagggatcaatatgggaaccggcaatgcgttctccttattacctgcacaaaatgcgacagggaactggatcaaaatcgttcagcgtgtaccggttgaagtttctcttgatccaaaagaactcatggaacaccccttgcgtattggtttatcgatgacagcaactattgatacgaagaacgaagacattgccgagatgcctgagctggcttcaaccgtgacctccatgccggcttataccagtaaggctttagttatctttatacaggcgataagtgttcccattgggcgcgagcggcatcgtcggtttcatcggcaatcaccataa

SEQ ID NO: 18192 - DNA, 2798 bp, Homo sapiens
  SIMILAR (870)..(1433): 1001254mologous to Escherichia coli BILE ACID-INDUCIBLE OPERON PROTEIN F,accession number D90868,Smith-Waterman Score=983.
tgaacaccggtaacaccacctacaaagcggtacagcgttctgccgacctgatctccatcgggccgatgctgcagggtatgcgcaagccggttaacgacctgtcccgtggcgcactggttgacgatatcgtctacaccatcgcgctgactgcgattcagtctgcacagcagcagtaatctcgtcatcatccgcagctttgcgctgcggatatctgaaccggaaataatcactatttccggttttttattctcttaatttgcattaatcctttctgattatcttgcttaactgcgctgcatcaatgaattgcgccatcccactttgcatacttaccactttgttttgtgcaagggaatatttgcgctatgtccgcaatcactgaatccaaaccaacaagaagatgggcaatgcccgatacgttggtgattatcttttttgttgctattttaaccagccttgccacctgggtagttccggtggggatgtttgacagtcaggaagtgcagtatcaggttgatggtcaaacaaaaacacgcaaagtcgtagatccacactcatttcgcattctgactaacgaagcaggcgaacctgagtatcaccgcgtacagctgttcacgacgggcgatgaacgcccgggcctgatgaacttcccgtttgaaggattaacctcaggatcgaaatacgggacagccgttggcatcatcatgtttatgctggtgattggcggcgcgtttggcattgtgatgcgtacaggaaccattgataacggtatcctggcgcttattcgccatacccgcgggaatgaaattctctttattcctgcgctgtttattctgttttcacttggcggcgcggtatttggtattgctatgtcaactccacttcaaggaataaaagttctcgatttcaccggtgtgcaatctggcccatcttgtactcaaatgctggcctggtttggcgctgacgttattaaaattgaacgtcccggcgttggtgacgtaacgcgtcaccagctgcgagatattcctgatatcgatgcgctttacttcaccatgcttaacagtaacaaacgttctattgagttaaataccaaaacagcggaaggcaaagaggtaatggaaaagctgatccgcgaagctgatatcttagtcgagaactttcatccaggggccattgatcacatgggcttcacctgggagcatattcaagaaatcaatccacgtctgatttttggttcgatcaaagggtttgatgagtgttcgccttatgtgaatgtaaaagcctatgaaaacgttgctcaggcagcgggtggcgcggcatccactacgggtttttgggatggtccgccgctggtaagcgctgcagcgttgggtgacagcaacaccggaatgcatttgctgatcggtttacttgctgctttgctgcatcgcgagctcaatatgacggtcgcggagatcgtcgaaagggaagagtgggcgggatttcgcgccagagaaacggcggcgctggaagcggtaactgcgccatccaccgttatcgctacaggcggcggcattattctgacggaatttaatcgtcacttcatgcaaaataacgggatcgtggtttatttgtgtgcgccagtatcagtcctggaagatttccgccaacggacaatggaagtgctacggctggcgtttttatcctccggcattctcgaattttttacctcgctgtcaattgctctggtggcggtctactttggtttttcctatctcggcgagctggattttggtcactacgataccggtgtgacgctggctgcgggttttctggccctgatccttgcgccagagtttttccagccattacgcgatctcggtacgttttatcatgctaaagcccaggctgttggcgcagctgacagtctgaaaacgtttatggaaaccccgctcgcccatccgcaacgtggtgaggcggaattagcatcgaccgatccggtgaccattgaggccgaggagctgtttatcacgtcgccggaaggtaaaacgctggccggaccgctgaactttactttgccagcaggccaacgtgcggtgttggttggtcgcagcggttcagggagccgctactgcccgtatatcaaccatcgaaatgtccgtctgggcccaattgtaacagatgtgccgtgggaaaattcgggcgacaaatcattgccggaagccactgcgcaggtcatctcgagcgggtcaggggcgacaaaagttgaagacggtttgggcgacctcaacaagccggtgagtaatcagaacttagttactggaatagatacgccggtctataacgcgccgagtgcgggaagtgcgccatttggggtactggcggacaatatgcgctacccgattttgcataaactgaaagacaggttaaatcaaacctggtatcagatccgtattggcgatcgactggcctatatcagcgcactggatgcccaacccgataatggcctgtcggtgctaacctatcaccatattctgcgcgacgaagaaaacacccgttttcgccatacttcgacgaccacatcggtacgcgctttcaataaccagatggcctggctgcgtgacaggggatacgcgacactgagcatggtgcagctggaaggctacgtgaagaataagatcaatctccctgcgcgagcggtggtgattacctttgatgatggcctcaagtcggtgagccgctatgcgtatcctgtgttgaaacaatatggcatgaaggcgacggcgtttattgttaccacgcgcatcaaacgtgtttag

SEQ ID NO: 18193 - DNA, 1194 bp, Homo sapiens
  SIMILAR (1)..(462): 1001254mologous to Escherichia coli 60 kD protein,accession number L10328,Smith-Waterman Score=800.
atgtacccgctgaccaaagcgcagtacacctccatggcgaagatgcgtatgttgcagccgaagattcaggcaatgcgtgagcgtctgggcgatgacaaacagcgtatcagccaggaaatgatggcgctgtacaaagctgagaaggttaacccgctgggcggctgcttcccgctgctgatccagatgccaatcttcctggcgttgtactacatgctgatgggttccgttgaactgcgtcaggcaccgtttgcactgtggatccacgacctgtcggcacaggacccgtactacatcctgccgatcctgatgggcgtaacgatgttcttcattcagaagatgtcgccgaccacagtgaccgacccgatgcagcagaagatcatgacctttatgccggtcatcttcaccgtgttcttcctgtggttcccgtcaggtctggtgctgtactatatcgtcagcaacctgccgcgagaagaaaaaatcctgattcgggcggataagcaccgcgcatccgccacacaaagcaacaggaacatcatgagcgataatgacactatcgtagcccaggccacgcctccgggacgtggcggcgttggcatcctgcgcatctccggcttcaaagcccgtgaagttgccgaaaccgtgctgggtaaactgcctaagccgcgctacgccgattatcttccgtttaaagacgccgacggcagcgtgctcgatcaggggattgcgctatggttccctggcccgaactcgttcaccggcgaagatgtgctggaactgcaagccggacctgcgcgcatttttgtggcggaactctctgaagcattcaacggcatttcccagcgcctgatcccaggtgcggttctggcgattgactgtgcagctatctatagcttcgcgccgaacgccgtggtctggggctttatgtggggcaccatcggtcagctgattgcggttggcatcctggtcgcctgcggctcctcgatcctgattattcctggctttatcccgatgttcttctctaacgccaccatcggcgtgttcgctaaccacttcggcggctggcgtgcggcgctgaagatttgtctggtgatggggatgatcgaaatctttggttgcgtctgggcggtgaaactcaccggtatgagtgcctggatgggcatgcgcggactggtcgattctggcaccgaccgatga

SEQ ID NO: 18194 - DNA, 1125 bp, Homo sapiens
  SIMILAR (334)..(1047): 1001254mologous to Escherichia coli similar to,accession number D90869,Smith-Waterman Score=1181.
atgccggtcgtcttcaccgtgttcttcctgtggttcccgtcaggtctggtgctgtactatatcgtcagcaacctgccgcgctacgccgagtatcttacggttaaagacgccgacggcagcgtgctcgatcaggggattgcgctatggttcccctggcccgaactcgttcaccggcgaagatgtgctggaactgcaaggtcatggcgggccggtgatcctcgacctgctgcttatacgcattctgaccgtttgcggcctgcggattgctcggcctgcttgcagccctcggtcgctctagagatcccctttgtgccccgcgtccttttgaattatttctcccagcctaacctggcgcagctgggtaaaggaatggtgatcccgagtttacctacttcggaagcggtcttcctggcagcaggcgtgttaggggcgacgattatgccgcatgtgatttatttgcactcctcgctcactcagcatttacatggcggttcgcgtcaacaacgttattccgccaccaaatgggatgtggctatcgccatgactattgccggttttgtcaatctggcgatgatggctacagctgcggcggcgttccacttttccggtcatactggtgttgccgatcttgatgaggcttatctgacgctgcaaccgctgttaagccacgctgcggcaacggtctttggattaagcctggttgctgcggggctgtcttcaacggtggtggggacactggcggggcaggtggtgatgcagggcttcattcgctttcatatcccgctgtgggtgcgtcgtacagtcaccatgttgccgtcatttattgtcattctgatgggattagatccgacacggattctggttatgagtcaggtactgttaagttttggtatcgctctggcgctggttccactgctgattttcaccagtgacagcaagttgatgggcgatctggtgaacagcaaacgcgtaaaacagacaggctgggtgattgtggtgctggtcgtggcgctgaatatctggttgttggtggggacggcgctgggatcgtactgcatgaccgtcgattggcactatggggatgcgggtaccgacccaattctatccggcctgctgttccggtaa

SEQ ID NO: 18195 - DNA, 1014 bp, Homo sapiens
  SIMILAR (577)..(900): 731254mologous to Escherichia coli 50 kD protein,accession number L10328,Smith-Waterman Score=336.
atggggggcagacatacctttccccggcgctatcacgatcgagcattccaacgatggaagcattcggaccttgaccagaccaaccggaggatcagggaatacggaggcgatggacagggacggaaagaccggggggatgagagcaatgacctttggaccacctatcagcggattcgagaaaacctgattaagggcggactcagtgggcgtaatgctaaaggcggacgaactcatactcgtgccgtgcgtaaacgccttattgagccttttgtgggtggcggctcggtgttccttaactcagacaagcacgaacgcttccttctggctgacgtcagcgctgacctgattaacctgtatcagatgctggcggtggtccccgattcggtgatctatgaggcaatgaaggcattcaggcatcttaatgatgccgaaaactatacgttaattcgtgaagcattcaacgcgcagcggctggatgcggtcgagcgtgcagcagcattcctttacctcaatcggcactgcttcaacggcctgattcgttacaacctggacgaagctttcacagggatcctctattctgaacaggcggcccgttcggcacttaactcgctgcaaggcgcattctccgcacgggttaatcatctggtagaagccctcacccacttgcgcatttacgtcgaagcggcaattgatttccccgatgaagagatcgatttcctctccgacggaaaaattgaagcccagctcaatgacgttattgccgatcttgatgcattatcggctggcgatatcagccgtaagaaaaagctgctgcagaagcagaaagaaggtaagaaacgcatgaagccagatcgctatccttcggctccacgtagaacttccggcattgccggctacgagatcggttacgcgcttgcgtgcgaagcaggacgcgactgctttcgcgttacgaccacggccacggccgccttcgacttcacgatcgctttcgtcttctgcctggcgagcatgtga

SEQ ID NO: 18196 - DNA, 1848 bp, Homo sapiens
  SIMILAR (763)..(1368): 991254mologous to Escherichia coli 50 kD protein,accession number L10328,Smith-Waterman Score=1004.
atgtttgacagtcaggaagtgcagtatcaggttgatggtcaaacaaaaacacgcaaagtcgtagatccacactcatttcgcattctgactaacgaagcaggcgaacctgagtatcaccgcgtacagctgttcacgacgggcgatgaacgcccgggcctgatgaacttcccgtttgaaggattaacctcaggatcgaaatacgggacagccgttggcatcatcatgtttatgctggtgattggcggcgcgtttggcattgtgatgcgtacaggaaccattgataacggtatcctggcgcttattcgccatacccgcgggaatgaaattctctttattcctgcgctgtttattctgttttcacttggcggcgcggtatttggtatgggagaagaggccgtcgcctttgccattatcatcgcaccgttagaatgtgtccgtgtcgatgagtcccaatgctatggtggcccgttggcttacccgaatttggtgatgtcaggcattattgcaccggcgtaccgcatcatggcggccagcgggcttgttacgtcgcaatacgtaatacggcgcaggcgaaagcaagaaaactgggagcgccaccacgcgtttgcgtccatcatttttcgcccgatacaaagcatcatcaacgcgtttaaacagttcatcgatgctttcatttcctcggtgatgcgccacaccaatgctgacggtaaagcgtgggcggataagcaccgcgcatccgccacacaaagcaacaggaacatcatgagcgataatgacactatcgtagcccaggccacgcctccgggacgtggcggcgttggcatcctgcgcatctccggcttcaaagcccgtgaagttgccgaaaccgtgctgggtaaactgcctaagccgccgtacgccgattatcttccgtttaaagacgccgacggcagcgtgctcgatcaggggattgcgctatggttccctggcccgaactcgttcaccggcgaagatgtgctggaactgcaaggtcatggcggtccggtgatcctcgacctgctgttaaaacgcattctgaccattcccggcctgcggattgctcgccctggtgagttttccgaacgcgcgtttcttaacgataaacttgacttagcccaggccgaggcgattgcaaatcttatcgacgccagttcggaacaggcggcccgttcggcacttaactcgctgcaaggcgcattctccgcacgggttaatcatctggtagaagccctcacccacttgcgcatttacgtcgaagcggcaattgatttccccgatgaagagatcgatttcctctccgacggaaaaattgaagcccagctcaatgacgttattgccgatcttgatgcaaattacctgccaatgaataagacaactgagtacattgacgcaatgcccatcgccgcaagcgagaaagctgcattgccgaagactgatatccgcgccgttcatcaggcgctggatgccgaacaccgcacctgggcgcgggaggatgattccccgcaaggctcggtaaaggcgcgtctggaacaagcctggccagattcacttgctgatggacagttaattaaagacgacgaagggcgcgatcagctgaaggcgatgccagaagcaaaacgctcctcgatgtttcccgacccgtggcgtaccaacccggtaggccgtttctgggatcgcctgcgtggacgcgatgtcacgccgcgctatctggctcgtttgaccaaagaagagcaggagagcgagcaaaagtggcgtaccgtcggtaccatccgccgttacattctgttgatcctgacgtcgcgcaaactgtcgtcgcgacctggtatatga

SEQ ID NO: 18197 - DNA, 903 bp, Homo sapiens
  SIMILAR (1)..(408): 991254mologous to Escherichia coli Flagellar biosynthetic protein FliP,accession number D90834,Smith-Waterman Score=674.
atgtcaccggtgatcgacaaaatgtatgtagatgcgtaccagccattcagcgaagagaaaatatcaatgcaggaggcgctggaaaaaggggcgcagccgctgcgtgagtttatgctgcgtcagacccgtgaggcagatttagggttgtttgccagactggcgaataccggcccgttgcagggacctgaagccgtgccgatgcgcattttgctcccggcctacgtgaccagcgagttgaaaaccgcatttcagataggcttcacgattttcatcccttttttgattatcgacctggtgatagccagcgtgttgatggcattggggatgatgatggttcccccagccaccattgctctgccctttaaactgatgctgtttgtactggtggatggctggcaattgctggtcgcgttggtcacgggccttatcatcagtattttgcaggccgccacgcagattaacgaaatgacgctgtcgtttattccgaaaatcatcgccgtatttatcgccattattattgccggaccgtggatgctcaatctgttgctggattacgtccgcaccttgttcactaacctgccgtatatcatcggccgtactatgttgcaggtgacaagcgaacaatggctatcctggttaaacctgtacttctggccgttactgcgcgtgctggcgctgatctccaccgcgccgattctgagcgaacgcagcgtaccaaaacgggtggcggcttttgtagatattgggctggataaagccgcgtttcttcatgcatccgacatcatgccgcacaccgaatgtgtggcgggtgaagaacaaaagcaattcacggtgcgcgacatctcggaactggttcgtcaggggcaagatctgatggtgcaggtcctctgcaacgctaagtag

SEQ ID NO: 18198 - DNA, 1980 bp, Homo sapiens; identical to SEQ ID NO: 16087
  SIMILAR (1360)..(1920): 941254mologous to Escherichia coli CG site No. 872,accession number U00039,Smith-Waterman Score=854.

SEQ ID NO: 18199 - DNA, 630 bp, Homo sapiens
  SIMILAR (40)..(573): 971254mologous to Escherichia coli 2,3-dihydro-2,3- dihydroxybenzoate dehydrogenase,accession number M24148,Smith- Waterman Score=867.
atgacaactctaagctacaggcattattgtcgccatggtgtagatgatgaaagtaaaggtatcggctacgccacggcgctggcgtttgttgaggcgggagcgaaagttacaggttttgatcaagcgttcactcaggagcaatatccctttgcgaccgaagtgatggatgttgccgacgctgcgcaggtcgcgcaagtgtgtcagcgactgttagctgaaacggagcgactggacgcgctggtcaatgcggcgggaattttacgcatgggcgcgaccgatcagctcagtaaagaggactggcagcagacttttgcggttaacgtcggcggtgcgtttaacctgttccagcaaaccatgaaccagtttcgccgtcagcggggcggggcgattgtcactgtggcgtccgacgccgcgcacacgccgcgtattggcatgagtgcttatggcgcatcgaaagcggcgctgaaaagcctggcgttgagcgtcgggctggaactggcgggtagcggcgtgcgctgtaatgtggtttcgcctggctccaccgacaccgatatgcaacgcacgctgtggatcattgtgcctcagtattactccaaatctgtttcaggcttgctaaatgcattttcagag

SEQ ID NO: 18200 - DNA, 2493 bp, Homo sapiens
  SIMILAR (403)..(1233): 951254mologous to Escherichia coli similar to,accession number D90881,Smith-Waterman Score=1342.
atgctgaatgagttcgatcaatacctgcatgagcgctacctgagcgggaaagccagaaaagatcggtggtactggaataacagtatccaacggggccgaagtacggcggtcagagaaaactggcagtggaaacccgcggtggcgtactgccgctatgccgatgattttgtcctcatcgtcaaaggcaccaaagcacaggtggaagccatcagggaggagtgtcggggtgtgctcgaaggcagtctgaaactcaggctgaacatggataagactaaaatcccccatgttaatgacggctttatctttctggggcacaggctcattcgcaaacgcagtcgttatggcgagatgcgagtggtctcaacgatcccgcaggagaaagccagaaacttcgccgcatcgctgacagcactgttatggaaggtggcggaaatccgcgcaccggaagtggttgaagaacagcgttcatctgacggcaccattaaatgggcgatcgccgttggcgatcagcgcgtcgaaacggtgtatatcccggaagacgaccgtgccacgctctgcgtctcttcgcaggtggggtgtgcgctggagtgtaaattctgttccaccgcccagcagggctttaaccgcaacctgcgggtgtcggaaattatcggccaggtgtggcgtgcggcgaaaatcgtcggcgcagcaaaagtcaccggtcagcgtccgatcactaacgtagtgatgatgggcatgggcgagccgctgctcaacctgaacaacgtcgttccggcgatggaaatcatgcttgatgatttcggttttggcctgtctaaacgtcgcgtcacgctttccacttccggtgtagttccggcgctggataaactgggcgatatgatcgacgttgcactggcaatttccctgcacgcgccgaacgacgaaattcgtgacgaaattgtgccgatcaacaaaaagtacaatatcgaaacgttccttgctgcggtgcgccgttatctggagaaatccaacgccaatcagggccgagtcactattgaatacgtgatgcttgaccacgttaacgacggcactgaacacgcgcaccaactggcggaactgctgaaagatacgccgtgtaagatcaacctgatcccgtggaacccgttcccgggtgcgccgtatggacgcagctcgaacagccgtatcgaccgtttctcaaaaatggctggacatgatacaatcgtgctcggtaccgaatacctgaaaatgggcattatggatgaagaacgtcggacctcgctgaacttgcgtagctgtatcgctcaggcgcgcaaccgcgtggcgttcatcaataccggtttcctcgaccgtaccggcgatgaaatgcattcggtgatggaagctggcccgatgctgcgtaaaaatcagatgaaatcgacgccttggatcaaagcctacgagcgtaataacgtgctttccggtctgttctgtgggctgcgcggtaaagcgcaaattggtaaaggcatgtgggcaatgccggacctgatggcagacatgtacagccagaagggcgaccaactgcgtgccggggcaaacacagcctgggttccgtcaccaaccgctgctacgctccatgcgctgcactaccaccaaaccaacgtacagagcgtacaagccaacattgcccagaccgagttcaatgctgaatttgaaccgctgctggacgatctgctgactattccggttgctgaaaacgctaactggtcggcgcaagagatccaacaagagctggataacaacgtgcaggggattctggggtacgtggtgcgctgggtggagcaggccataggttgttcaaaagtgccggatatacacaatgtggcgttgatggcagcacgcgcaacgctgagtatctccagccacgctgaatgggctgatgctaattactatctcccgaaagaatccgcataccaggaagggcgctgggaaacactgccctttcagcgggccatcatgaatgcgatgggcagcgactacatccgtgaggtgaatgtggtgaagtctgcccgtgtcggttattccaaaatgctgctgggtgtttatgcctactttatagagcataagcagcgcaacacccttattccagctggcttcgtggctgttttcaacagtgatgagtcatcgtggcatctcgttgaagatcatcggggtaaaacggtttatgacgtagcgtcaggggacgcgttatttatttctgaactcggtccgttaccggaaaatgttacctggttatcgccggaaggggagtttcagaagtggaacggtacagcctgggtgaaagatgcagaagcagaaaaactgttccggattcgggaggcggaagaaacaaaaaacagcctgatgcaggtagccagtgagcatattgcgccactccaggatgctgtagatctggaaatcgcaacggaggaagaaacctcattgctggaagcctggaaaaaatatcgggtgccatga

SEQ ID NO: 18201 - DNA, 807 bp, Homo sapiens
  SIMILAR (807)..(220): 991254mologous to Escherichia coli Transposon TN2501 resolvase,accession number D90775,Smith-Waterman Score=974.
tggaaattgcaacggaggaagaaatctcgtttctggaagcatggaaaaagtatcgggtattgctgaaccgtgttgatacctcaactgcacaggatattgaatggccagcactgccgtagggtaaaacatataacttctataattagatgtatctttccatttacggcaaggaagggggcttggaagacgtaaagcatctcacaccgagattattttttatatgtcaggtgtctgaagttttgctttggctcttaaaatggtttgccgcgaggttttgaattcccgggcaatggcacttatacttacacctgacttaattcgttcgaataccgcctgtttctgttcttcatttaacacaggtggtcgaccaaaacgtttccctgcgccgcgggctcttactatcccggaatgagtgcgttcaagtaaaaggtctcgttcaaattcagcgactgctgaaattacttgcatcatcatttttcctgttggactggtcaggtcaatgccacccaatgctaagcaatgcactctgatacctgtttcggtcagttgttccactgttttcctgatatccattgcattacaaccaaggcgatccagttttgtcacaatcaattgatcaccacatttcaggcgagcaagcaaccggttaaaaccaggacgctcactggttgctgctgagccgctaatgtgttcttcgattatttgctgaggtttgattttaaaacctgcactttcgatttcccggcgttgattttcggtggtctgatccagcgttgatatccgacagtaagcaaaaattcgagacat

SEQ ID NO: 18202 - DNA, 1572 bp, Homo sapiens
  SIMILAR (286)..(1110): 861254mologous to Escherichia coli K12 putative oxidoreductase,accession number AE000165,Smith-Waterman Score=1162.
atgaccgatttgcaggaaagtttgcagcaagaaaaccaccagcttagcgagcagctcctttcgaatctgggcatcggtgacattatctatcaaagccaggcaatggaagacctgctccagcaggtagatattgtggcgaagagcgacagtacggtgttgatttgtggtgaaaccggaactggcaaagaggtgatcgccagagcgatccatcaacttagcccgcgacgcgacaagccgctggtcaaaatcaactgcgctgccatccccgccagtcttctggaaagaagtttcaatcacctgcacgattttttcactgatgaacaactttctcgcgcggtgtggatctacggcaaacgcgccattgctgcggcgcaaaccaaacttccgccagcgtttggactgccaggggcaaagcatattttgtttcgcggtcattgcagcgaaagcgatgtacaacaactggcggctgagtccggtgacgaccgcagcgtggtgattggcgtcggtggcggtgcactgctcgacaccgcgaaagccctcgcccgccgtctcggtctgccgtttgttgccgttccgacgatcgccgccacctgcgccgcctggacaccgctctccgtctggtataatgatgccggacaggcgctgcattatgagattttcgacgacgccaattttatggtgctggtggaaccggagattatcctcaatgcaccgcaacaatatctgctggcggggatcggtgacacgctggcgaaatggtatgaagcggtggtgctggctccgcaaccagaaacgttgccgctaaccgtgcgactggggatcaataatgcgcaagccattcgcgacgtcttgttaaacagtagcgaacaggcgctgagcgatcagcaaaatcaacagttaacgcaatcattttgcgatgtggtggatgctattattgctggtggtgggatggctggagataccatcgagttagtgatggatgttgccgacgctgcgcaggtcgcgcaagtgtgtcagcgactgttagctgaaacggagcgactggacgcgctggtcaatgcggcgggaattttacgcatgggcgcgaccgatcagctcagtaaagaggactggcagcagacttttgcggttaacgtcggcggtgcgtttaacctgttccagcaaaccatgaaccagtttcgccgtcagcggggcggggcgattgtcactgtggcgtccgacgccgcgcacacgccgcgtattggcatgagtgcttatggcgcatcgaaagcggcgctgaaaagcctggcgttgagcgtcgggctggaactggcgggtagcggcgtgcgctgtaatgtggtttcgcctggctccaccgacaccgatatgcaacgcacgctgtgggtgagcgatgacgccgaagaacagcgtattcgcggctttggcgagcagtttaaactcggcattccgctggggaaaatcgcccgtccacaagagatcgccaacacgattttgttcctcgcctctgacctcgccagccatattaccctacaggatattgtggtcgatggcggctcaacgctgggggcataa

SEQ ID NO: 18203 - DNA, 1560 bp, Homo sapiens
  SIMILAR (814)..(1143): 901254mologous to Escherichia coli K12 L- ribulokinase,accession number AE000116,Smith-Waterman Score=553.
ttagagcgtgtagtcctggcctgtggaggaagtggagacagctccgtggccaaggagcagcaccagctgggccagagccatgtcagccaaagtgggcagcccagagatgacatctgccatttgtgccctcaggaataggtggcgttgtgtaggcagtgctcctggtttctgctggagaataactggtccattttgaccttctccaaccccacagtttttacctctcttggactggtgcaggggagcatgcttcacctgccaatggtaataagtgacaatcgcctcgccccgctgacggcgaaactggttcatggtttgctggaacaggttaaacgcaccgccgacgttaaccgcaaaagtctgctgccagtcctctttactgagctgatcggtcgcgcccatgcgtaaaattcccgccgcattgaccagcgcgtccagtcgctccgtttcagctttagtgccaagcggatctttcaccacctgcaccatcagatcttgcccctgacgaaccagttccgagatgtcgcgcaccgtgaattgcttttgttcttcacccgccacacattcggtgtgcggcatgatgtcggatgcatgtaatttcagcagtcgctgaatttgaacgagaccttttacttgaacgcactcattccgggatagtaagagcccgcggcgcagggaaacgttttggtcgaccaccgtaagcacagcggcattttctttcttgttctttaatctgtgcccaagactggcgcttagctgctcctcaagaatgtgttgaatgttgactgccgtttttttggatggagtgaaacgatggcgattgcaattggcctcgattttggcagtgattctgtgcgagctttggcggtggactgcgctaccggtgaagagatcgccaccagcgtagagtggtatccccgttggcagaaagggcaattttgtgatgccccgaataaccagttccgtcatcatccgcgtgacgtgcttgcagagcttagcgtcgaacagcgcgcagctgtggtcgggattggcgttgacagtaccggctcgacgcccgcaccgattgatgccgacggaaacgtgctggcgctgcgcccggagtttgccgaaaacccgaacgcgatgttcgtattgtggaaagacatataaaggtctaactccggtgaagcggaaaaatggtttgataagtggttcaaaaatccaattccgccgaaaaacctgaacatgaatttcgaaggttgatctttcgggcagatcaaatccagcattttcagcgtcacgccattggtccagccaaagccatcctgtaatggatattaggccaccgccgccccccgttccggtggtgctgacatcatatttttccaccagctttttctcccggtcataggtgtggtattcaatagtgactcggccctgattggcgttggatttctccagataacggcgcaccgcagcaaggaacgtttcgatattgtactttttgttgatcggcacaatttcgtcacgaatttcgtcgttcggcgcgtgcagggaaattgccagtgcaacgtcgatcat

SEQ ID NO: 18204 - DNA, 1301 bp, Homo sapiens
  SIMILAR (569)..(3): 981254mologous to Escherichia coli transposase,accession number X60200,Smith-Waterman Score=996.
cctggctcttcctgtttctccagacaactgatagtcacggatggatatttaccttcattacagatatgaacttccgcattcttttcaaatcgtgatgccacggctttccaggtctcatccagctgaatagccagttgttgcacacctttacgtccatcgacaggatgtcccagtgcccgacagacaggaatacgctgagtctgccactcttcaccttgcaacaacttctcgcgaggatctccccagcgatcactgttttcaagccagatgtcccggcggcgcagtgcatcctgaaggcgttccagcaaacatagtgaataacctgcacgctgtatccgtccctccgcatcgtatacgaggcgtttccagcgaccggtgataatatgttcaggcgcatcatcaaggatgcgctttttcgaaccattcagttctgccagataatgaatcgcagccagtacatgttcacctgccggtgccgcacggaaatgcaggtcccgcaacaccgccggaagaaaacgtttaagccgaccgtactgctcaaccatttcgtcatggaaattattgttctgactgccggacgtattgatgccgcgttccaggatgaggtcgctgccagcgaaggtttcctcaaacaacctgtcggtaaagattacaaattcggtggcccgtctgttaaagatgaaaaactgtttggcgtagggaccggcatgggccatcataactaactctctgtctaaacctctatccagcatctcctgagcaatacgcagggcttcttcgtgtttgccctgcattgcgccttcttcacgtaatctgtcagcaatggtcatcagtttctccttttcttgtggtgcgcgttccgctatctcaccaataaatgcacgaaaacgctgggcatcccctgtttgtaatacgtaattaaacagggcttttagctgtctgtcattagtgttccctgtaactagcagcgaaacaatttggtcgactaatcccaacagatcgcgctgacgaatatgtttctgaattaactccaacagcgccattttgcggtgttgcataatctcgtcatccggcaccacggtaatatccaccaacggaaaagccgatgaatatattttgcgggctatagcaggctcgacaaattggggatcgattcgacttgcgagaaactgtagatccagctcttcttcgtctggtgtttccgtcatcaaggcccatcgttgctggctggcaacgatggtttgtgccgcgccagccttgcgcagctcatagctatctttgcctggcttatcaacatacat

SEQ ID NO: 18205 - DNA, 1746 bp, Homo sapiens
  SIMILAR (982)..(1740): 961254mologous to Escherichia coli glycolate oxidase subunit,accession number L43490,Smith-Waterman Score=1214.
atgaatggtcagcgtgctttgcggcggcagaacgtacaattgcgccagaccatcttctccacgcgcggcttctgccgatggaatgttgataatcttgttgcctttgcccttcgacagctgcggcagatcacttaccgggaacatcaacatacggcctgcctgagtgattgccagcagcatatcggaagcatcttcaatcaccaccggcggcataacatgggcattttccgcgtaatcgggttaatcccgtccttaaaagcgaagaagattgacgccatcatgtcatcgctttccattacggaaaaacgtcagcaagaaatagccttcaccgacaaactgtacgctgccgattctcgtttggtggtggcgaaaaattctgacattcagccgacagtcgagtcgctgaaaggcaaacgggtaggcgtattgcagggcaccacccaggagacgttcggtaatgaacattgggcaccaaaaggcattgaaatcgtctcgtatcaggggcaggacaacatttattctgacctgactgccggacgtattgatgccgcgttccaggatgaggtcgctgccagcgaaggtttcctcaaacaacctgtcggtaaagattacaaattcggtggcccgtctgttaaagatgaaaaactgtttggcgtagggaccggcatgggcctgcgtaaagaagataacgaactgcgcgaagcactgaacaaagcctttgccgaaatgcgcgctgacggtacttacgagaaattagcgaaaaagtacttcgattttgatgtttatggtgttattttacagggtgcgctcgtcacgctggagctggctatcagctctgtagtgctcgctgtaatcatcggtttaattggcgctggcggtaagctctcgcaaaatcggctttcggggctgattttcgaagggtacaccacgctgattcgtggcgtgccggacttagtgttgatgctgctgattttctacggtttgcagattgcgctaaacacgcaaatggaacaggtgacagcgattctggctgtctgccatcgcctgcgtgtaccggtggtgacccgtggtgcaggcaccgggctttctggtggcgcgctgccgctggaaaaaggtgtgttgttggtgatggcgcgctttaaagagatcctcgacattaaccccgttggtcgccgcgcgcgcgtgcagccaggcgtgcgtaacctggcgatctcccaggccgttgcaccgcataatctctactacgcaccggacccttcctcacaaatcgcctgttccattggcggcaatgtggctgaaaatgccggcggcgtccactgcctgaaatatggtctgaccgtacataacctgctgaaaattgaagtgcaaacgctggacggcgaggcactgacgcttggatcggacgcgctggattcacctggttttgacctgctggcgctgttcaccggatcggaaggtatgctcggcgtgaccaccgaagtgacggtaaaactgctgccgaagccgcccgtggcgcgggttctgttagccagctttgactcggtagaaaaagccggacttgcggttggtgacatcatcgccaatggcattatccccggcgggctggagatgatggataacctgtcgatccgcgcggcggaagattttattcatgccggttatcccgtcgacgccgaagcgattttgttatgcgagctggacggcgtggagtctgacagtacagcgaagacctgcgagcgaggttaa

SEQ ID NO: 18206 - DNA, 1200 bp, Homo sapiens
  SIMILAR (658)..(1020): 961254mologous to Escherichia coli HISTIDINE-BINDING PERIPLASMIC PROTEIN PRECURSOR (HBP),accession number D90862,Smith- Waterman Score=580.
atggccccccgtgcggcaaaaggtgccttctccctgcaggtccagtttttccggaaagtggtaagggccgtagttattcgagcagttggtgataagcgctggcagaccatagggctgctcggcgcatacggcgtggttttccggctgccggtggatcttccgttgcgcaggccgattttatgtaaagacttcattatcgacccttaccagatctatctggcgcgctattaccaggccgatgcctgcttattaatgctttcagtactggatgacgaccaatatcgccagcttgccgccgtcgctcacagtctggagatgggggtgctgaccgaagtcagtaatgaagaggaacaggagcgcgccattgcattgggagcaaaggtcgttggcatcaacaaccgcgatctgcgtgatttgtcgattgatctcaaccgtacccgcgagttgcgccgaaactggggcacaaccgaatccggcatcaatacttacgctcaggtgcgcgagttaagccacttcgctaacggttttctgattggttcggcgttgatggcccatgacgatttgcacgccgccgtgcgccgggtgttgctgggtgagaataaagtatgtggcctgacgcgtgggcaagatgtaaagcagcttatgacgcgggcgcgatttacgcgcgagactgcgtttgctgcgattccgcaaaacatccgcatcggtaccgacccgacctatgcgccatttgaatcaaaaaattcacaaggcgaactggttggcttcgatatcgatctggcaaaggaattatgcaaacgcatcaatacgcaatgtacgtttgtcgaaaatccgctggatgcgttaatcccgtccttaaaagcgaagaagattgacgccatcatgtcatcgctttccattacggaaaaacgtcagcaagaaatagccttcaccgacaaactgtacgctgccgattctcgtttggtggtggcgaaaaattctgacattcagccgacagtcgagtcgctgaaaggcaaacgggggcaggacaacatttattctgacctgactgccggacgtattgatgccgcgttccaggatgaggtcgctgccagcgaaggtttcctcaaacaacctgtcggtaaagattacaaattcggtggcccgtctgttaaagatgaaaaactgtttggcgtagggacccgggttgggctcccttaa

SEQ ID NO: 18207 - DNA, 1213 bp, Homo sapiens
gcaggtagatttctccgcctctggcacggaagttctccgacatatccgccattcccatttcaatagtttgcgtggcggcgtaatcacgcacttcctggctgattttcatcgagcagaatttcggcccacacatggagcaaaaatgggcgactttacctgactcttgcggcagggtttcatcgtgataagcgcgggcggtaaacgggtcgagggccagattaaactggtcttcccagcgaaattcgaagcgggctttcgacatggcgttatcgcgaatttgcgcctctatccgttcccggaagagaagattggggaaatggccactgcgccgctcagtacgagtggcgattgccgcacttaatatgcgctcatcggcatacagcgacagacggcgacgcgcgcgggtcaccgcggtataaaccagctctcgcgttactaccggcgtgcgttggctcggcaaaatcaacgccgcatggtcgaactccgatccctgcgatttatgtaccgtcatcgcccacgtagtttcgtgctctggcaagcgactcggttgcacagacttaatattgccgtccggcatcgcaaaccagacgcgcgtcccctgcccggtctctttgacacggaccatcacgcgggagaaaacatcgccgccggtaaaggtaaacagtgtttttggaatattgccgtagtcggcgtaggggtgatcaaagcgcaaatcacgggcgatttgtcggtcgagaatgccaatgccctgagtgcgttgttccatattcggcgtagcaagcagcatctctaccagctccgacacgtcggcgcgcatctcgcgcaccagtttcagcgtttgcagacgttgctctttgagaatatcgcggcgaacaccaccaatcagattcagaccgtaggttttacgcgacccgatcagcaattccgccatcgtcatcgacttttcccgcacgcggaaaaattgcataaagccggtatcaaaaccaacgaaatggcaggagaggccaaggttaagcaaatgactgtgtagccgttcgacttccagcagaatcgagcgaatagtatgtgctcgttgcggcacctcaatccccagtgcattttcaaccgaattggtataggccacactgtgggcaaaaccgcaaatcccacacacgcggtccgataagaaggtcacttcgttgtagcccatccgcgtttctgacagtttctccat

SEQ ID NO: 18208 - DNA, 572 bp, Homo sapiens
  SIMILAR (523)..(116): 941254mologous to Homo sapiens Cyt19,accession number AF226730,Smith-Waterman Score=686.
  misc_feature (1)...(572): n = a,t,c or g
atagaaaaaaaatctgcttaactagtgatttgctgtgaatctttaatcaatgcctcttaaaaataattcatttannnnnnnnnnnnnnnnnnnnnnnnnnnnnnnnnnnnnnnnnaatgtagccatgaataaaagtcacattagatgcctggaagccatatttttccatgtgatagtcaagatacttttcagccacttccacgtggcctttggtcatgtctattccagtcacgtgtcctttttcgccagccagctggctaagtacatagcaatctctgccacttccactacccagatccaaaatccagcagttttgtagatgctcagggatcaccagaccacagccataatatcttagggctacttcttcgtgtacatttcgcaaggcttcccgaatgtgcttggggaccggcctggctgtggtgacacagccgttggtctggaggtctgccgatctcttcagcacctgcccgtagtaggtctgcacgtccttctgtatctaagcgtcacgaagtgcagccatgtctcctcggcctgcgactcagggcgcgcactctctgcccacgcgtccg

SEQ ID NO: 18209 - DNA, 659 bp, Homo sapiens
  SIMILAR (1)..(573): 951254mologous to Escherichia coli methyl-accepting chemotaxis protein II,accession number M13463,Smith-Waterman Score= 848.
gccgatagttcgaagaaaattgccgacattatcagcgttatcgacggtattgccttccagactaatatcctcgcgctgaatgccgcggttgaagccgcgcgtgcgggtgaacagggccgtggttttgccgtggtggcgggtgaagtgcgtaatcttgccagtcgcagcgcccaggcggcaaaagagatcaaagccctcattgaagactccgtctcacgcgttgataccggttcggtgctggtcgaaagcgccggggaaacaatgaacaatatcgtcaatgctgtcactcgcgtgactgacattatgggcgagattgcatcggcatcggatgaacagagccgtggcatcgatcaagtcgcattggcggtttcggaaatggatcgcgtcacgcaacagaacgcatcgctggtgcaggaatcagctgccgccgccgctgcgctggaagaacaggcgagtcgtttaacgcaagcagtttccgcgttccgtctggcagccagcccactcaccaataaaccgcaaacaccatcccgtcctgccaatagccaccggcgctttaatgcccggatgcggatcgtagccttcaatctcaaagtcttcgaaacggtagtcgaagatggattcgggtttacgtttgataatcaacttcggcagcggacgcg

SEQ ID NO: 18210 - DNA, 1843 bp, Homo sapiens
  SIMILAR (697)..(1311): 981254mologous to Escherichia coli O157:H7 cell division protein,accession number AE005278,Smith-Waterman Score=1060.
  misc_feature (1)...(1843): n = a,t,c or g
atggagcagctcaccgcgacagtgaagcaaaacgccgataacgcccgccaggcctcgcaactggcgcaaagtgcctccgacaccgcccagcacggcggcaaagtggtggatggcgtantgaaaacgatgcatgagatcgccgatagttcgaagaaaattgccgacattatcagcgttatcgacggtattgccttccaaactaatatcctcgcgctgaatgccgcggttgaaaccgcgcgtgcgggtgaacagggccgtggttttgccgtggtggcgggtgaagtgcgtaatcttgccagtcgcagcgcccaagcggcaaaagagatcaaagccctcattgaagactccgtctcacgcgttgataccggttcggtgctggtcgaaagcgccggggaaacaatgaacaatatcgtcaatgctgtcactcgcgtgactgacattatgggcgaaaattgctttgcatcggatgaacagagccgtggaatcgatcaaattgcattggcggtttcggaaatggatcgcgtcacgcaacagaacacattatattatggctgtggtctggtgatccctgagcatctagaaaactgctggattttggatctgggtagtggaagtggcagagattgctatgtacttagccagctggttggtgaaaaaggacacgtgactggaatagacatgaccaaaggccagaggtccttagcgctacgcatcattggcgttttggcgctcatccttacctcctgtggtctggcggcaatcaacgctgacgatatctggtattttgcctccggtggcgtcattggcagcttactaagcactacgctacaaccactgctacacagtagcgggggaactattgcgctgctctgcgtttgggcagcgggcctgacgttgttcaccggttggtcatgggtgaccattgctgaaaaactcggcggctggattttaaacattctcaccttcgccagtaatcgtacccgtcgcgatgatacctgggtcgatgaagatgagtatgaagacgacgaagagtatgaagatgaaaatcacggcaaacagcatgaatcacgccgtgcccgtattcttcgcggcgcgctagcgcgtcgtaaacggttggcggaaaaattcattaatccgatggggcggcaaacagacgctgcgttgttctccggtaagcggatggatgatgacgaagagattacctacactgcacgcggtgtggctgccgacccggacgacgtcctattttcgggcaatcgtgcaacgcagccagaatatgacgaatacgatccattattaaacggatccccccgcgatattctcaaagagcaacgtctgcaaacgctgaaactggtgcgcgagatgcgcgccgacgtgtcggagctggtagagatgctgcttgctacgccgaatatggaacaacgcactcagggcattggcattctcgaccgacaaatcgcccgtgatttgcgctttgatcacccctacgccgactacggcaatattccaaaaacactgtttacctttaccggcggcgatgttttctcccgcgtgatggtccgtgtcaaagagacgtttgattcgctggcaatgctggaatttgccctcgacaacatgccggataccccactgctgaccgaaggctttagctataaacctcacgcattcgcgctgggctttgttgaagcgccacgcggtgaatacgtgcactggagcatgctcggtgataaccaaaaattgttccgctggcgctttccggccatcacctacccccaactggccggtgttgcgttacatgctgagcggcaataccgtttatgacccaaccgttgaatatcggtag

SEQ ID NO: 18211 - DNA, 2154 bp, Homo sapiens; identical to SEQ ID NO: 17800
  SIMILAR (472)..(1410): 981254mologous to Escherichia coli tyrosyl-tRNA synthetase (tyrS),accession number J01719,Smith-Waterman Score=1605.

SEQ ID NO: 18212 - DNA, 1127 bp, Homo sapiens; identical to SEQ ID NO: 17801
  SIMILAR (189)..(1127): 951254mologous to Escherichia coli sn-glycerol-3-phosphate acyltransferase,accession number K00127,Smith-Waterman Score=1573.

SEQ ID NO: 18213 - DNA, 2471 bp, Homo sapiens; identical to SEQ ID NO: 17803
  SIMILAR (2007)..(2462): 1001254mologous to Escherichia coli sn-glycerol-3-phosphate acyltransferase,accession number K00127,Smith-Waterman Score=795.
  misc_feature (1)...(2471): n = a,t,c or g

SEQ ID NO: 18214 - DNA, 1460 bp, Homo sapiens; identical to SEQ ID NO: 17804
  SIMILAR (238)..(510): 921254mologous to Escherichia coli sn-glycerol-3-phosphate acyltransferase,accession number K00127,Smith-Waterman Score=449.

SEQ ID NO: 18215 - DNA, 234 bp, Homo sapiens
  SIMILAR (86)..(226): 911254mologous to Escherichia coli AmpG1-signal transducer,accession number X82158,Smith-Waterman Score=216.
atggcctgctacatctaccagctgccctcctgggtgctggacgacctgtgccgcaacatggacgcgctcagcgagtgggactggatggagttcgccgcgttcagccatattgctgatcctgggttttgcttccgggctaccgctcgccctgacatccggtaccttacaggcctggatgacggtcgagaatatcgatctcaaaaccattggtttcttctctctgataaattttag

SEQ ID NO: 18216 - DNA, 1491 bp, Homo sapiens
  SIMILAR (1251)..(496): 961254mologous to Escherichia coli ATH1 protein,accession number D90769,Smith-Waterman Score=1263.
cgccccttccagcggctgctcattcatcatctccaggtaaccctgtaacacggtcaatggcgtacgtaactcatggctcacgttggcaaaaaagttacgccgcgccccttccagttgatgcatttgcgtgacatcacgcgccaccatcagcaactgtttgtgggtataaggcatgacgcgaatttccagatgccgcccggtgttgagcaccagattgagcgggcgagaaaaatcacgcgttttcagatattgcgtaaactccgggtaacgcagtaggttaaggatgttctgcccgttatcttccggccagcgcaaaccaagaatttgttgcgccagaccgttacaccagaaaataccgccctcttccgtggtcagcaccaccgcgtcgggaagcgactccgcgccgctacgaaagcgtttaatcagattgcccagttcacggcggcgttttttatttcgcaactgcatctggtgtaagccctttactagcggttccagcgagatacgacgtttctgccaccattgacgccagttttctgttgatgctgcaagaagttggtcgtaactctgctgcgcgcacatttcaagctggcgaagcgacgcgctgccccactcgtctaaagcagcttgcctgtcatcccgccagtcgatccacaccagtttttgcaacgtcattgtctcgcctgcatgaagctgcgcactggtatgttgcagtaaacggcgctctttggcggtatagcattgctgcacatcaccgctcaccttacagcaacagctgatggccacatcactgcgtccatcctgggtggtgtagctcccctgcatcagatgctgaccaaacacccgcacctgggtttcgtcgagatgttggcgaccgtgattggtttgcgtggcgtcaatgcctgttgaaatcagcactgacgcgtcggcgtccagtggcgtaatagtgatttccagcgcaatgagcggcagttggtctgccgaaacaaagcgacggctggcgatggtgtaacctgagccgttgctggtacgccagacaacattgcggcgtaattcgccactggcaaagtcaagctcacgctgccaggcttcgtgggataacgagaaaacctcaccatttatggcaatctccatccccacgacatcaggcaggttcacaagttcgtctgattcaccttttcccgcccgatgatacagccccgccagatacatccctcgcgtctggcggcgtggtaatcttctttcatgggcataagtgtatgttgcattgctgacgatgccgaccgggcagctatccagacacaccaggcaacccgttttcttctcttctgctgccgttaaattaccgccaaagcgcatgtccagtttcttgccattactgtcaacaatcacttcatcgaaggaatacgcttttgccgccccttgccagttggccgaaatatccagtttgctgcctgtgacatgagtcgtttctttattatccatcgtcat

SEQ ID NO: 18217 - DNA, 1977 bp, Homo sapiens
  SIMILAR (1)..(537): 991254mologous to Escherichia coli aldehyde dehydrogenase,accession number M38433,Smith-Waterman Score=906.
atgagcgcagcacgcggcgtatttgaacgcggcgactggtcactctcttctccggctaaacgtaaagcggtactgaataaactcgccgatttaatggaagcccacgccgaagagctggcactgctggaaactctcgacaccggcaaaccgattcgtcacagtctgcgtgatgatattcccggcgcggcgcgcgccattcgctggtacgccgaagcgatcgacaaagtgtatggcgaagtggcgaccaccagtagccatgagctggcgatgatcgtgcgtgaaccggtcggcgtgattgccgccatcgtgccgtggaacttcccgctgttgctgacttgctggaaactcggcccggcgctggcggcgggaaacagcgtgattctaaaaccgtctgaaaaatcaccgctcagtgcgattcgtctcgcggggctggcgaaagaagcaggcttgccggatggtgtgttgaacgtggtgacgggttttggtcatgaagccgggcaggcgctgtcgcgtcataacgatatcgacgctcttgccgcggcattgatatcaatatcgcggcatatagatccagatctatcgggtaaatcacgcacagtgcgtgaagccgaattcttcgaacttttcggcgagaaagtaaacgcagaaaacatcgtcgcccgttatgccaaactgcatctctatgatgcatttgccattcaggaatcacgccgtgttgatgctggtaatgaaatcgctccgttactgaaggtggaagggatgaaggtcggtctgatgacctgttatgacttacgctttccagagctggcgctggcacaggcattacagggagctgaaatcctggtacttcctgccgcctgggttcgcgggccgctcaaagagcatcactggtcaacgttgcttgccgctcgtgcgctggataccacctgttatatggtggcggcgggggagtgcgggaacaaaaatatcggtcaaagccggattatagatccctttggcgtcaccattgcggcagcgtcagaaatgcctgcactcattatggcggaagtgacgcccgaacgtgtgcgtcagaggatccccagttttaacgccgtggcagagttgataaacgccgggcatcaggagattgctttccttaccggctcgatggattcccccaccagcattgaacgtcttgccgggtataaagacgcgctggcgcagcatggtattgcgctcaatgaaaaacttatcgctaacggtaaatggacgcctgccagcggggccgaaggggtagaaatgttgctcgaacgtggggctaaatttagcgcgttagttgccagtaacgacgatatggcgataggtgcgatgaaagcgttacacgagcgcggcgtagcggtgccagagcaggtgtcagttatcggattcgatgatatcgctattgccccctacaccgttccggcgctctccagcgtaaaaattccggcgcggggcacgtatccggcttactctgcccgcgtattccgcgaaaaaggggtacccatcaacaaagcaccgggcgatgatgaaatcctgaaaaacaccgtcgattttgtctctttcagctattacgcctcgcgctgcgcctcggcggagatgaacgccaacaacagcagtgcggcgaacgtggtgaaatcgctgcgtaatccgtatctacaggtgagcgactggggctggggaattgatccactcggtctgcgtatcaccatgaatatgatgtacgatcgttatcagaagccgctgtttctggtggaaaacggcctgggcgcaaaagatgaatttgctgccaatggcgagattaacgacgactatcgcatcagctacttacgcgaacatatccgcgcaatgggcgaagcgattgcagacggcattccgctgatgggctacaccacatggggctgtattgatttagtttccgcctctacgggtgaaatgagcaaacgctacttgttgaaatga

SEQ ID NO: 18218 - DNA, 1947 bp, Homo sapiens
  SIMILAR (1390)..(1923): 971254mologous to Escherichia coli gab protein,accession number U68243,Smith-Waterman Score=880.
cagtcagtccgtgttaaacgcggccaagtcccaagctggcatgcctgcgggtggactctaaagaatttgcactgggccgcgttcattattaacccgcgtttttaaagcgtggatgagatcgatgccatcatggcgcgcacagtcacccgataatggtgcttaatcaccgcctgcgcaaaaccagcagccatagcgtctgggtgcgatcataaacagaccagttttaacgccgtggcagagttgataaacgccgggcatcaggagattgctttccttaccggctcgatggattcccccaccagcattgaacgtcttgccgggtataaagacgcgctggcgcagcatggtattgcgctcaatgaaaagcttatcgctaacggtaaatggacgcctgccagcggggccgaaggggtagaaatgttgctcgaacgtggggctaaatttagcgcgttagttgccagtaacgacgatatggcgataggtgcgatgaaagcgttacacgagcccggcgaaacggtgccagagcaggtgtcagttatcggattcgatgatatcgctattgccccatacaccgttccggcgttctccagcgtaaaaattccggtgactaagatgattcaggaaattattggacggctgatttttatgctcgatggcggggatttctctccgaaagaaaaccttcagcggaaaactgatccggcgcgactcactcattggttctttgcgataacattgtcatcacatgtcatcggcactagtgtcgatgagtccactctagaggatccccattctgtggctggaaacgtcatttgcactcaacatccgcgaacagtcgattatgaaccacatatctacaccgataacaacggtgaattaatgacgctgatgcaacgggaaatagcagacgacaaccgccatttgcgcagcatggaagcctttatcaatcacgtacagggcaagcccgtgatgatagccgacgccgagcagggaaacagggacgcgtgtggaattatgaccaggccagtaacgttatcagaaccccatttcagccagcataccctgaacaagtatgcatcgctgatggcgcaggggaacggctatcttgggcttcgcgccagccatgaagaagattacacgcgccagacgcgagggatgtatctggcggggctgtatcatcgggcgggaaaaggtgaaatcaacgaactggtgaacctgcctgatgtcgtggggatggagattgccataaatgataaagcaggaatatggagcgcatttgagggtgtatctgcaactaaaaacgttctggcctttagtcgtggggattctgtgaacattaatcactctcctcatgatggactagttataataaataaaggaaacgaagaagttgaaggatcgcttctgatgaatgcactgaccgccgtacaaaataacgctgtcgattcaggccaggactatagcggattcaccctcaccccgtcggcgcaatccccgcgtctgctggaactcaccttcaccgaacagacgaccaaacagtttcttgagcaggttgccgagtggcccgtgcaagcgctggagtacaaatcgtttctgcgttttcgggtagccaaaattcttgacgatctatgtgcgaaccagctgcaaccattgctgttgaagacgttgctaaaccgcgctgaaggtgcgttgttgatcaatgcggtgggtgtcgatgatgtgaagcaagcggatgagatggtgaagctggcgacggcggtggcgcatctgattggccgttccaatttcgatgcgatgagcggtcagtattacgcgcgttttgtagtgaaaaatgtcgataactcagacagctatctgcgccagccgcaccgcgtgatggagctacacaacgacggcacgtatgtcgaagagataaccgattacggggtccttccccacgctggctaa

SEQ ID NO: 18219 - DNA, 735 bp, Homo sapiens; identical to SEQ ID NO: 13687
  SIMILAR (79)..(594): 831254mologous to Escherichia coli glutamate synthase large subunit (EC 2.6.1.53),accession number M18747,Smith-Waterman Score= 664.

SEQ ID NO: 18220 - DNA, 1213 bp, Homo sapiens
  SIMILAR (1129)..(443): 971254mologous to Escherichia coli Altronate dehydratase,accession number D13328,Smith-Waterman Score=1173.
tggtcgagtcggcctgcgcggaagatgtaacggggctaaaccatgcaccgaagctgcggcagcgacgcttatgcgttgttgggtaggggagcgttctgtaagcctgtgaaggtgtgctgtgaggtatgctggaggtatcagaagtgcgaatgctgacataagtaacgataaagcgggtgaaaagcccgctcgccggaagaccaagggttccgcccaagagttcatatcgacggcggtgtttggcacctcgatgtcggctcatcacatcctggggctgaagtaggtcccaagggtatggctgttcgccatttaaagtggtacgcgagctgggtttagaacgtcgtgagacagttcggtccctatctgccgtgggcgctggagaactgaggggggctgctcctagtacgagaggacacggagtgtgcgcatcactgtgttcggtaaatccgatggtaccactgccacgaccagtactgaacagcaccatatggcagcccgcacccgccagggcgctggtcgctacggcatcgttacccggcgcacttaacaagttcagccctggcgttttcagacgctcgccgtaacgcagcacgtcaaccacgacgctggaacccgctttctgggtacagccaagtgatttgtcttccagcgtggtgataccgcccgctttgttccccggcgatgggttttcatagatcggctgatcatgggcaataaagtactgtttgaagtcgttgaccatggtgaccagtttttcaaacgttgcttcgtcgcggcaatggtccatcagcaactgctctgcgccaaacatctccggcacttcggtcagtacggtagtaccgccgttagtaatcacgtagtcagagaaacgccccagcatcgggttagcagtaataccagaaagaccgtcagaaccaccgcactccagaccaaacttcagttcgctgagtttgcctggctcgcgtttatcgttgcgcatcacgttatacagctgatgcaaatgctcgattccggcttcgatctcatcatcctgctgttggcagatcatgaaatgaacgcgttcaggatcgatatcgcccagcgtttcacggaatgcggcaacctggttgttttcacagcccagaccaatgcacggaccgagtcgatatttcgcgccgcggtgcccgctcgggcgctccagtgtggggcgacgggccgccccggcggctagcat

SEQ ID NO: 18221 - DNA, 1239 bp, Homo sapiens; identical to SEQ ID NO: 13692
  SIMILAR (1)..(681): 981254mologous to Escherichia coli DniR,accession number U70214,Smith-Waterman Score=1162.

SEQ ID NO: 18222 - DNA, 2910 bp, Homo sapiens
  SIMILAR (43)..(1311): 991254mologous to Homo sapiens DLL3 protein precursor,accession number AF241373,Smith-Waterman Score=2405.
atgttcggccgggcccaccccagcacccctcctttgcctgtcctcgcagggcccgcctggagcctgctggcgcgcgtggctggcaggcggcgcttggcagccggaggcccgtgggcccgggacattcagcgcgcaggcgcctgggagctgcgcttctcgtaccgcgcgcgctgcgagccgcctgccgtcgggaccgcgtgcacgcgcctctgccgtccgcgcagcgccccctcgcggtgcggtccgggactgcgcccctgcgcaccgctcgaggacgaatgtgaggcgccgctggtgtgccgagcaggctgcagccctgagcatggcttctgtgaacagcccggtgaatgccgatgcctagagggctggactggacccctctgcacggtccctgtctccaccagcagctgcctcagccccaggggcccgtcctctgctaccaccggatgccttgtccctgggcctgggccctgtgacgggaacccgtgtgccaatggaggcagctgtagtgagacacccaggtcctttgaatgcacctgcccgcgtgggttctacgggctgcggtgtgaggtgagcggggtgacatgtgcagatggaccctgcttcaacggcggcttgtgtgtcgggggtgcagaccctgactctgcctacatctgccactgcccacccggtttccaaggctccaactgtgagaagagggtggaccggtgcagcctgcagccatgccgcaatggcggactctgcctggacctgggccacgccctgcgctgccgctgccgcgccggcttcgcgggtcctcgctgcgagcacgacctggacgactgcgcgggccgcgcctgcgctaacggcggcacgtgtgtggagggcggcggcgcgcaccgctgctcctgcgcgctgggcttcggcggccgcgactgccgcgagcgcgcggacccgtgcgccgcgcgcccctgtgctcacggcggccgctgctacgcccacttctccggcctcgtctgcgcttgcgctcccggctacatgggagcgcggtgtgagttcccagtgcaccccgacggcgcaagcgccttgcccgcggccccgccgggcctcaggcccggggaccctcagcgctaccttttgcctccggctctgggactgctcgtggccgcgggcgtggccggcgctgcgctcttgctggtccacgtgcgccgccgtggccactcccaggatgctgggtctcgcttgctggctgggaccccggagccgtcagtccacgcactcccggatgcactcaacaacctaaggacgcaggagggttccggggatggtccgaggctggagtgcatgatgcccaaacggtttgacataccggaacagcgcatgggaaaaaccggtcgggcccatcgcaaaaagagtcgaactggggacctcacccttaccaagggtgcgctctaccaactgagccatatcagcacgctaaatttgatgcctggcagttccctactctcgcatggggagaccccacactaccatcggcgctacggcgtttcacttctgagttcggcatggggagcagcccccctcagttctccagcgcccacggcagatagggaccgaactgtctcacgacgttctaaacccagctcgcgtaccactttaaatggcgaacagccatacccttgggacctacttcagccccaggatgtgatgagccgacatcgaggtgccaaacaccgccgtcgatatgaactcttgggcggattagccaaccttcgtgctcctccgttactctttaggaggagaccgccccagtcaaactacccaccagacactgtccgcaacccggattacgggtcaacgttagaacatcaaacattaaagggtggtatttcaagtggttctgtagccaggtggctgaaggtctatgaagagcgcggagaagctggtttacgcgcgctcaagattggcaccaaaagaaacattgcaatatcagttgatccagaaaaagcggcatcagcattggagctgtcaaaagaccgacgcattgaggatcttgaaaggcaagttcgatttcttgaaacgcggcttatgtatctaaaaaagctgaaagccttagctcatcccacgaaaaaggctgcggagataccgcgcagtacgttttattatcatctaaaggctctcagcaagcctgacaagtatgcggacgttaaaaagcgtattagtgagatttatcacgagaatagaggccgatacggataccgtagggtaacgctgtctcttcatcgagaagggaaacagattaaccataaagctgttcagcgcctgatgggaaccctctcacttaaagcagcgattaaggtcaagcgataccgctcttacagaggagaggtagggcaaaccgcccctaatgttctccaaagagatttcaaggctacgcggccaaacgagaagtgggttaccgatgttactgaatttgcagtcaatgggcgcaagctgtatttgtctccagtaatagatctcttcaacaacgaagttatttcttacagcctttcggaaagaccagtgatgaacatggttgagaatatgctcgatcaggcattcaaaaagcttaatcctcacgagcatcctgttctgcactctgaccagggatggcagtatcgtatgagaagatatcaaaatatccttaaagaacatggtattaaacaaagcatgtccagaaaaggcaattgtctggataatgctgtggtggagtgtttctttggaaccttaaagtcggagtgtttttatcttgatgagttcagtaatataagcgaactgaaggatgctgttacggaatatattgaatactacaacagcagaagaattagcctgaaattaaaaggtctgactccaattgaatatcggaatcagacctatatgcctcgtgtttaa

SEQ ID NO: 18223 - DNA, 813 bp, Homo sapiens
  SIMILAR (371)..(237): 551254mologous to Homo sapiens Human mammastatin amino acid sequence,accession number Y23756,Smith-Waterman Score=102.
atggctggggatgtgaccaagactatcctagcatctatggctgtggactgggtgtcttctccactgacccttgaaggttgtgttccacttccaccagatgaagagctaaataataaaagctcatgtttccacataaaaaggcatcaaagtccaatttctggctctgctataaactgtgtaacctggagagcagcccccctcagttctccagcgcccacggcagatagggaccgaactgtctcacgacgttctaaacccagctcgcgtaccactttaaatggcgaacagccatacccttgggacctacttcagccccaggatgtgatgagccgacatcgaggtgccaaacaccgccgtcgatatgaactcttgggcggattagccaaccttcgtgctcctccgttactctttaggaggagaccgccccagtcaaactacccaccagacactgtccgcaacccggattacgggtcaacgttagaacatcaaacattaaagggtggtatttcaaggtcggctccatgcagactggcgtccacacttcaaagcctcccacctatcctacacatcaaggctcaatgttcagtgtcaagctatagtaaaggttcacggggtctttccgtcttgccgcgggtacactgcatcttcacagcgagttcaatttcactgagtctcgggtggagacagcctggccatcattacgccattcgtgcaggtcggaacttacccgacaaggaatttcgctaccttaggaccgttatagttacggccgccgtttaccggggcttcgatcaagagcttcgcttgcgctaa

SEQ ID NO: 18224 - DNA, 1296 bp, Homo sapiens
  SIMILAR (480)..(4): 981254mologous to Escherichia coli dedD protein (gtg start codon),accession number M68935,Smith-Waterman Score=805.
ttaattcggcgtatagcccattaccacgccacttaagccagaaagttgcttcaactcacccagcgaacctttcagcttatctttcgaggcatccggcccaaccagaatacgggtaattttaccctgcactggcgtggatggcgacgtataaacccgataaccggcaccgcgcagcttaccgacaatctcattcactttatcggcatttttcagcgcacccagttgcacaacataggctttacccgtcggtgcagctttttcttccacgaccggcttcggttctggcttcggcgcaggtggtgcttcaaccttcggtttaggcggctccaccggtttcggcttcggtggggcgaccggtgcaggttccggttcaaactcggtgttattggctgcaatagtggccggatcgagcgacggtgctgcggcatcacctgcccgcacctcttccgctgcgccttccggcggctgcgatcggaacgccgtattgttgacttcaaacgcaacaaagacggtatcccggcagttgttgaacgtcttgagtacgatccgaaccgttccgcgaacatcgcgctggttctgtacaaagacggtgaacgccgttacatcctggcccctaaaggcctgaaagctggcgaccagattcagtctggcgttgatgctgcaatcaaaccaggtaacacccggttgagttacggtcagcatcgcgaggcttggcgctgacgggccgggtgatatcttcaaccggagctccgggcggttgtagccttcaacgattttacgatactcttcaaagccttctgtacgtgaagcgacgaacgctttgtcgtacagattttcttcaataatgacatggcccatcgcattcaacagcgcgatgttcgagccgtttttcagtgcaatgtgcatgtcagcaatgcgcgcggtttcaattttgcgcggatcgcagacgataattttcgccccgttacgtttagcgttaattacgtgattcgccacgattgggtgggaatccgccgggttgtacccgaaaacgaacactaaatcggtattatcaatttcgttaatagcattgctcattgcgccattaccgaccgattggtgcagaccgaagttataacgcccggtgtcacctacttcctcgttgacgacgatcttacgaatattcttcgcccaaaagatatcatcccgattgattaggttgtgatgccagtaacggaaaaacatgatgatgaacgaggcaaacataaccacgccgacaaacgggtgcagaattcgcgccagctgcggtgtgcccat

SEQ ID NO: 18225 - DNA, 291 bp, Homo sapiens
  SIMILAR (79)..(291): 981254mologous to Escherichia coli ribosomal protein L2 (rplB) (aa 1-273),accession number X02613,Smith-Waterman Score=370.
ttatcctcctccagagaagcagcgtgctccaagagtctggtgcagtgataccagcagaagctgcaggtagcgtgtcagcgccgccacgtagttaaagtggttaaccctgagctgcacaagggcaaaccttttgctccgttgctggaaaaaaacagcaaatccggtggtcgtaacaacaatggccgtatcaccactcgtcatatcggtggtggccacaagcaggcttaccgtattgttgacttcaaacgcaacaaagacggtatcccggcagttgatgaacgtcttgagtac

SEQ ID NO: 18226 - DNA, 1110 bp, Homo sapiens
  SIMILAR (183)..(698): 921254mologous to Escherichia coli GABA PERMEASE (4-AMINO BUTYRATE TRANSPORT CARRIER) (GAMA-AMINOBUTYRATE PERMEASE),accession number D90890,Smith-Waterman Score=810.
aggtcggataaggcgtttacgccgcatccgacaatctgtacgtgaacaggaagaaatctatgttggccgggtaaggcggagccgctctccggcaaaaagaatcaataacaattatacgcgtgacccggcgcgggaaatgtcggggcgctctcccaagtgacacactttcgagaggattcaggatggggcaatcatcgcaaccacatgagttaggcggcgggctgaagtcacgccacgtcaccatgttgtctattgccggtgttatcggcgcaagtctgtttgtcggttccagcgtcgccatcgccgaagcgggcccggcggtattactggcctatctgttcgccgggctactggtggttatgattatgcggatgttggcggaaatggcggttgccacgcccgataccggttcgttttccacctatgccgataaagccattggtcgctgggcgggctataccatcggctggttgtactggtggttttgggtactggttatcccgctggaagccaacatcgccgccatgatcctgcactcatgggttccaggcattcccatctggttattttccctcgtcattaccctcgccttaactggcagtaacttattaagcgttaaaaactacggcgaatttgagttctggctgttgacccgcaaaacggcgctggggatgtttatcgaagccgttggtatcaacattcgggcggcaaaaaatgccggggtaaacacgcgaatcatcgtcatgctcacttatgtgttccgttcgttgatcggccctgatggcgagcagtaccaagctgccgcgcagcgagttccgcgccatgcttcacttctgtgaaaacccaggcaaaattcagtcccgtgctgaactgctgaagaaaatgaccggccgtgagctgaaaccgcacgaccgtactgtagacgtgacgatccgccgtattcgtaaacatttcgaatctacgccggatacgccggaaatcatcgccaccattcacggtgaagttcattcaattgagaaaataacaagaaacacaacctcacctgtccttgggctctgtgttgacactccctgtaacatccaatggctttctattaaatgtgagacagag

SEQ ID NO: 18227 - DNA, 582 bp, Homo sapiens
  SIMILAR (121)..(537): 441254mologous to Escherichia coli O157:H7 protein phosphatase 1 modulates phosphoproteins, signals protein misfolding,accession number AE005406,Smith-Waterman Score=312.
atgcactggagcctcggttcccttccctatctcccggccaccctccccttcctgaacctgtggaagacccggggaatttctcggaccctcccattgttggcaacttcattcatcactagagtctacacagagagaattaaggccggcgctgactggcgcaatattttcgtcgtcggcgatctgcatgggtgctacacgctgctgatgaatgaactcgaaaaggtttcgttcgaccctgcgtgtgatttgctgatttcggttggagaccttgttgaccgcggcgcggaaaacgtcgagtgcctggagctgattactatgccttggttccgggctgtgcgaggtaaccatgagcagatgatgattgatgggctatcggagtatggaaacgttaaccactggctggaaaacggcggcgtgtggttcttcagtcttgattatgaaaaagaggtgctggctaaggctctggttcataaatcggccagcctgccattcgtcatcgagctgaataaggccctgtgtaaccaggtggtcagcaaccaccagcgggttcgtcccgatacatcccccattgagacccagtga

SEQ ID NO: 18228 - DNA, 563 bp, Homo sapiens
  SIMILAR (235)..(561): 991254mologous to Escherichia coli SapB protein,accession number X97282,Smith-Waterman Score=569.
gaaattcgacagcgtattgcgtaaggcgctctcttcgcagcagctggcggcgcgtattgaagcctatgacgaagcgcacagtattctggcgcaggaattgcccattttgccgctggcgtcgtcattgcgtttgcaggcctatcggtacgatatcaaaggtctggtacttagcccgtttggtaacgcctcctttgctggggtgtatcgcgagaaacaggatgaggtgaaaaaaccatgattatcttcaccttacgccgcattttgttattgattgtcaccttgttcctgctgaccttcgttggcttcagcttgagctatttcacccctcatgcgccgttacaaggcgcgtcactgtggaatgcctgggtgttctggtttaacggcctgatccactgggattttggtgtttccagcattaacggtcaaccgattgccgaacagttaaaagaggtcttcccggcgacgatggaactgtgcatcctcgccttcggttttgcgctgattgttggcatccccgtggggatgattgccgggattacgcgccctaagtggcaggataactt

SEQ ID NO: 18229 - DNA, 1219 bp, Homo sapiens
  SIMILAR (160)..(693): 961254mologous to Escherichia coli INAA PROTEIN,accession number D90855,Smith-Waterman Score=903.
atgaaaccgatatctttatctgcgatagcagggagtttttccaccactttgctaaagcctcggttcatatttagcccgtggtcagcatcgccaatttcgcgatccagtccggtaagatactcgctctcggtgctgaaaatatcgccacaacgagtgatcgtcgagcgcaacggcaaaaagctgtatgtaaagcgcatgacgcatcatctgtttcattccgtacgttatccgttcggccgaccaacgattgtccgtgaggttgcggtaattaaagaactggaacgggccggtgtcatcgtgccgaagatcgtttttggtgaagcggtgaaaattgagggtgaatggcgagcgttgctggtgactgaagatatggcggggttcatcagcattgctgactggtatgcccagcatgcagtatcgccttattctgacgaagtacggcaagccatgttgaaagcagtggcgctggcgtttaagaaaatgcatagcattaatcgtcagcatggctgttgttatgttcgccatatctatgtgaaaacagaaggtaatgcagaagctggttttcttgacctggagaaaagtcgtcgccgcttgcgtcgcgataaagcgattaatcatgacttccgccagctggaaaaatatctggagccaatccccaaagcggactgggagcagaccaacctcgcccactggtgcgatccgaaattcgacagcgtattgcgtaaggcgctctcttcgcagcagctggcggcgcgtattgaagcctatgacgaagcgcagagtattctggcgcaggaattgcccattttgccgctggcgtcgtcattgcgtttgcaggcctatcggtacgatatcaaaggtctggtacttagcccgtttggtaacgcctcctttgctggggtgtatcgcgagaaacaggatgagagtaatttatttgatggcagcgcagagaaaacgtcaggtctggttgtgattggcgatggcaataccgttaatatgaatggtggacttgaactgattggagagaaaaacgcgcttgcagatgggtcgcaggttacttccttgcgcacaggatatagttataccagcgttattgtcgttagtggtgagtcgtcggtatatctgaatggagatacgacaatcagcggagaattccctctggggtttgccggggttattcgggtacaggataaagctttgctggaaattggcagtgcgc

SEQ ID NO: 18230 - DNA, 1570 bp, Homo sapiens
  SIMILAR (726)..(172): 891254mologous to Drosophila melanogaster Sog,accession number U18774,Smith-Waterman Score=815.
ttaaagaacgtggactccaacgtcaaagggcgaaaaaccgtctatcaggggcgatggcccactacgtgacccatcacccaaatcaagttttttggggtcgaggtgccgtaaagcactaattcggaaccttaaagggaccccccgtttagaacttaacggggaaaccggcaactccagcaatttcctcgtcactggcgctccaatcgcctcgatgggcttctcctccagatacagctgcagatcctgggcgggcacaccgttgagcgtcacctcgtagtgcagattgcactcgttgtcaatggacatccaggccatgccgacggcatgtggattctgtgcatccgtgtgctcctgtcgcttcagcagaatgggttccgccgagtcccgagcatcggccactggacggggcactaggcggccacggatcaggctcgtctcatgctcggtggccacattaacgcccagttcgccggcatacagcgactcgaggaccttgggacccaacttctccacactaccaatggcctggttgaagttgaagctcggcgtcagatcctccagcttggccttccgcttttcctgctcctcaatcaaactgatgtttgggctatcccgggtgttcacgtgctccgtttcgatgttgtaggcagagatccatcggggttttaatagacccacggcaaaacgctggtcttttgtggaaggtttttgcgactttccggccagagccaactcggcctgctgtttgttgccccagaggaggacagagtggagacgatcgtcgcgcaggatgcgcttgtaatcacgtggaactcgtcgccagacaccgcagatcttgcccgtggcattctgatagacactgagagtgcccgccaaggtggtctccagttgatgctcctccaggattacacccgcatcatcaacgaattgaatggcacgcggacgaccgattcgcgatgaggtgtagaaggagtagtatagattcttcttgtggaacaggaaacgggcggtggccaccacattctgcggattgtaggtggtgtacatggacttcatttcctcacccttgaggaaataggaggtgcggcccgttagcaacgcagcgtaatgtttcatgttgcgctcttcctcttccattggggccgggaaatccaaggtagaatccgattcgcaaccggaaccgagcctgcgagagtattggcgcacaaagcccggataggcagcagcagtcacccgcttggacttccggaaaactacacaggccgatgcatcagcggaaccacaggtgcttgggtcatcactacccgtcagcttgccgcctcgcgtgcggctcgcaatcatgccttctacctcaatagctgccgcggagatctccgcagcgataccgtcgacgttgctcggctgcttcacaaacaggcgaaagtctatggagcgcaattcccactcatacggcacaggcagcagcttgggcaaggtggccttctgcaggtgaggcaggggctcagcccaaggacctgacacctggatgctctctgaggacaccactttcagcagctggaacagggctctc

SEQ ID NO: 18231 - DNA, 1575 bp, Homo sapiens
  SIMILAR (738)..(37): 861254mologous to Escherichia coli PEP carboxylase (AA 1- 883),accession number X05903,Smith-Waterman Score=1016.
tcagactgtgttggagatagatgtagccaaaatatctttttcttcggcttcccgctgaccagcgtgctggtatttcgctttgatgttggtgtcgcgccgccagaaatcttgttgcaggatggctggccaagaggtgggctgagtgggtgggacacccatcagatgggaatcgttggcaatcgccagcaccactttgatgtcttcttcttgcaggttgcgtaactctttacctaacggccacagtgctttgtctaccaggcgttggtcatagtattccgccagccacaggtctgctttggcgaagaccatctccagcatgccgagacgcgtcgagaagaatggccaatcgcggcacatagcctccagctcgctctgtttgccgtcttcgaccactttttgcagcgccgtacctgcacccagccaggcggggagcatcagacggttttgcgtccaggcgaagatccacggaatggcgcgtagtgactcgacgccgccggttgggcgacgtttcgccggacgtgaacccaacggcagtttgcccagttcttgttccggcgtagcggagcggaagtaaggcacaaaatctttgttttcacgtacgtagccgcggtagacatcgcaggagatgactgacagttcatccataatgcgacgccagctctctttcggctccggcggtggcagcaggttggcttccagaatcgccccggtataaagcgacaggctgctgacggggatcctgtgcgttggtggatccagccagtcatcaagccttccgccgccgggaagaatttgcagatgaccataaaacagcacaatgacgcccagcccaagccagaacgcaggtgtggagattccggtaatggccattattcgcaccagatgatccagccagcgatttcgccagactgcagagagtatgcccagcgggatgccaatcaggagtgccagcagcagggcaccaaaagccagctccagcgtcgccgggaaaaatatacgcaactcttccagcaccggacgcccggtacgaatggatgttcccaggtcaccatgaaacaggtcgctgacgtagcggtaaaactgtacatacagtggctggtccagtcccagttgctggcgaatattttccacgatagcatcgcctggaaccatacctgcgcgaccactggcatttttttgattacgcagtttatcggccagctgatacgccagtttgtgcgcctgttcagcaaccggctgcggcaggcgggcttgttccagcagcatagaaaccgcttcggtttccgggcggcgataggccgcggtgatcgcggcgcgggaaaccgactggggcaatatttgctcggcaaagtcgaggaatggctggtgtggttcctctgccggagtcggtgcttcatcgctctcattggccgcgccagaaagcagcgcaggtagctccggcagagtatcgctgttttccagttgttcgagataagaaaaaatcgcctgcttaattaaccagtgtggtgtgcgatcgatacgtgtcgcggcagacttaatacgctcacgcgtcgcgtcgtccagcttaacccccat

SEQ ID NO: 18232 - DNA, 2229 bp, Homo sapiens
  SIMILAR (931)..(1464): 1001254mologous to Escherichia coli 4-alpha-l- fucosyltransferase,accession number M87049,Smith-Waterman Score= 911.
atggacaaggaattaccgtggctggcggataacgcccaactggaactgaaatataaaaaaggcaaaacgccgctcagtcatcgtcgcatgggggaagtttttatggtatttagctacacgttgcaggctgggatggagcaacaaaataaagctggttccctgcgtttctattatcggtttaagggttatcaccgcatcaataaactggtgctggctttcaaaggttgcttctacgtgtttgagcggatgtgcctgttttattgcttgttgcaatacggcggcccagatattttaccaaaattatctgcttccctgactgttcctgaactacagccacatctcattgccgcccttctccccaaccaaaagcctccttcgcatcttcctctcatatccccccaccttagcccacaagatattgatggggtaaccatagcaagttcctgtcctgttaacttccgtgccgccgaagcggacacgttattgattctgggtgatagcctgagcgccgggtatcgaatgtctgccagcgcggcctggcctgccttgttgaatgataattggcagagtaaaacgtcgcatcagccgcgttgggtgctggttgaactgggcggcaatgacggtttgcgtggttttcagccacagcaaaccgagcaaacgctgcgccagattttgcaggatgtcaaagccgccaacgctgaaccattgttaatgcaaatacgtctgcctgcaaactatggtcgccgttataatgaagcctttagcgccatttaccccaaactcgccaaagagtttgatgttccgctgctgcccttttttatggaagaggtctacctcaagccacaatggatgcaggatgacggtattcatcccaaccgcgacgcccagccgtttattgccgactggatggcgaagcagttgcagcctttagcgttgctttctgcgggctgcttctacgcggtttactatgtcacctacaaaacccgcctacgcaaacgcgttgctgatgtaccgcgccgtccgctgtttaccatgaaccgcgtggagaccaatcttacgtgggtgatcctgatgggtatcgcgctggtaagcgtcggcatcttcttcatgcacaacggctttttgctgttccggcttaactcctacagtcagatcttttccagtgaagtctccggcgtggcgttaaaacgcttcttttactttttcatcccggcgatgctggtggtctactttctgcgccaggacagcaaagcgtggctgtttttcctcgtcagcacggtcgcctttggcttgctgacttatatgattgtcggcggcactcgcgccaatatcatcatcgcattcgctatcttcctgtttattggcattattcgcggctggatttcgttgtggatgctggcggcggcgggcgtgctggggattgttggcatgttctggctggcactaaaacgctatggaatgaataacgatactaccacgataacggggcggcagatagaccggctcttccgggtacattcgcgtttcgcatttggcgaacgcgtgcaggccgatcatccagatactacgaacctggagaatgacagccgccgttaccagcaagttgatcagcgtcagcggcaggcagattttccagccgaaggacattacctggtcataacgcggacgcgagatggtcacaatcccgatgtactcacccacgaagaacagaccgaacttcataccggaatattcaatgtggtaaccatccgccagttcctgctcggttaccggctggtcaaacgggagaccgtgacataccgcaacggacctgcaggcatgcaagctgataccgcccaagagttcatatcgacggcggtgtttggcacctcgatgtcggctcatcacatcctggggctgaaaacggagagaaccatgcacaaatttactaaagccctggcagccattggtctggcagccgttatgtcacaatccgctatggcggagaacctgaagctcggttttctggtgaagcaaccggaagagccgtggttccagaccgaatggaagtttgccgataaagccgggaaggatttagggtttgaggttattaagattgccgtgccggatggcgaaaaaacattgaacgcgatcgacagcctggctgccagtggcgcaaaaggtttcgttatttgtactccggaccccaaacttggctctgcgatcccggctcatcccctgatgctgtga

SEQ ID NO: 18233 - DNA, 861 bp, Homo sapiens
  SIMILAR (810)..(340): 771254mologous to Escherichia coli Tail fiber protein GP37,accession number D90774,Smith-Waterman Score=560.
tcagtccaccgagatggtggtgcgcaaaaccagcccggtgcttaaccgtctgctggggatttttttgccgtttatcaccaccaactgtgcagtgctcggcgtggcgttgctgaatatcaatctcgggcacaatttcttgcattcggcgctgtacggcttttccgccgctgtcggtttttcgctggtgatggtgctcttcgccgccatccgcgaacgccttgctgtggctgatgtcccgggaccttttcgcgggaatgccattgcgttaattaccgcaggtcttatgtctctggcctttatgggcttcagtggtttggagaacttgtaatgaatgctttctggattgccgttgccgccttgagcctgctgggcctggcgtttggcgccattctgggttatgcctcccgccgctttgcggtggaagacgatccggtcgttgagaaaattgactaaatctgcaggatcgttaacccgcacataacgcataccacgcttatcagcaaagtctgttttactgaccgcgttaatgttgttcaggaagcatcccttatcgggtatatcagcgccgttctggtctttctgcagacgtttctctgcattgtcataggctgattttactgcctttggcgttgccgccagcgtttcaaacgtactgttggtcgcactgctgagctgcactatcccctttttcgtcgaacttgcatcctcaagcgccacggcggatgcaatatcctctgcccgtttagctgctgtctcggcgcgcgttgccgcggattccgccgtacttttgctctgagctgccgccgtcgaacggggtcctttgggaaactggtttttgcggtaaccctttcctatccacat

SEQ ID NO: 18234 - DNA, 1434 bp, Homo sapiens
  SIMILAR (637)..(1356): 851254mologous to Escherichia coli ATP-dependent helicase HrpA homolog,accession number D90780,Smith-Waterman Score=1008.
  misc_feature (1)...(1434): n = a,t,c or g
atgactgaacaggcaacaacaaccgatgaactggctttcacaaggccgtatggcgagcaggagaagcaaattcttactgccgaagcggtagaatttctgactgagctggtgacgcattttacgccacaacgcaataaacttctggcagcgcgcattcagcagcagcaagatattgataacggaacgttgcctgattttatttcggaaacagcttccattcgcgatgctgatgggaaaattcgcgggattcctgcggacttagaagaccgacgcgtagagataactggcccggtagagcgcaagatggtgatcaacgcgctcaacgccaatgtgaaagtctttatggccgatttcgaagattcctggcaccagacggaaacngccgatgatgccgatgacgccgccgaactggctgacgatgcggcagccgtttttgaggattctgcgcttgtttccgacgctttcgcgttcgtttcggatgtcttcgctgcggaagcagacctcgctgctgcgctggcctgttcagtggcttcgccagccttcgttgtggctgttgaagcagacgatgcggcgctttctgccgattttccggcggcggtggcactggctgaggcctgcccggcacttgttgacgctgcactggcagacgacgcagccgctgtttttgagcctgccgcagccgaggcgctctgtcccgctgccgtttcagaagacctggcgttcgtctcgacgttaatccgccttcggtccagctatagtgccactcagaaaaaacaggacattctcgaagcgattcgtgatcaccaggtggtgatcgtcgccggggaaacgggttctggtaaaacgactcagttaccgaaaatctgtatggagctggggcgcgggattaaaggactgatcggccatacccagccgcgtcgtctggcggcaagaacagtggcgaaccgtattgcggaagagctgaaaacggagccgggcggttgcatcggttacaaagtgcgtttcagcgatcacgtaagtgataacacgatggtcaagctgatgaccgacggtatcctgctggcggagatccagcaagaccgcctgctgatgcagtacgacactatcattattgacgaagcgcacgaacgcagcctgaatatcgattttttgctcggctatttgaaagagttgctgccgcggcgtcctgacctaaaaatcattatcacttccgcgactatcgacccggaacgcttttcgcgccactttaataatgcgccgattattgaagtctccggtcggacctatccggtggaagtgcgctatcgcccgattgttgaagaagccgatgacaccgagcgcgatcagttgcaggcgtttgtgcttgtatatgtgttatgtattctaatatatgtcaataatgttaacgcttactggtcagaagtaaatatttga

SEQ ID NO: 18235 - DNA, 2400 bp, Homo sapiens
  SIMILAR (943)..(1902): 971254mologous to Escherichia coli 4-alpha-l- fucosyltransferase,accession number M87049,Smith-Waterman Score= 1637.
atgccgacaggaatgccaatgattgaaatacattgtgcgatgcccgttgcaatgtgcatcagggcatacccacagcctaagaaattcagccacctgggctttaaacatcatcatgcaagcggcctctgcggctacctggatgcagcttgcatcatggtcagacgcgtcacggccaatgccttcagcggtaacttcgattgcctggatgataccctgcgggtcaacaacgaaggtcgcacggtcagccagaccttcatcttcacgcatgttgtcgaagttacgggtcagggcgccagtcgggtcgccgatcatcgcatatttgattttagcgatggtttcagagctgctgtgccatgctttgtgggtgaagtgagtatcggtagatactgcgtatacgtctacgcccagtttctgcagttcttcgtagtggtcagcaacgtcacccagttcggtcgggcatacgaaaaggaacttcctgctccagtaaaagcgattgaaaaacagggcattacaatcatcaaaacattcgatgcccccggaggaatgaaaggttatctcggaaagtatcaggatatgggcgtcaccatctacctgactccagatggtaagcacgctatctctggttacatgtacaacgagaaaggtgaaaacctgagtaacacacttatcgaaaaagaaatttacgcaccagccggacgcgaaatgtggcaacggatggaacaatcccactggctcctcgacggtaaaaaagatgcgccggtcattgtctacgtcttcgccgatccgttctgcccatattgtaaacagttctggcagcaggcgcgcccgtgggattctggcaaagtgcattcttatgtctttggttatctggtgatcgccaaagcgtcactgcggttttatattctggcggaagtcagccagttcactttattgatggcgggcatgactgtactgattcacgtactgggatcggatatccctcaccataaccgaaccgttttgcggtttttcaatgacgcgctggccgcgacgagcgagcacgcgcgcgagtttatggttgttggcaaggacgacggcttaagtgatagctgtccggcgctttctgtgcaatttttccctgggaaaaaatcgctggcggaagcggtcatcgcgaaagcaaaagctaaccgtcagcagcgttttttcttccacggtcagttcaatcccacactgtggctggctctgctgagtggtggcattaagcccagccagtttttctggcatatctggggggcagacctgtatgagctttccagtggcttgagatataagcttttttacccactacgtcgcctggcgcaaaagcgagtcggctgtgtatttgccacccgcggcgatttgagcttttttgccaaaacgcacccaaaggtgcggggcgaactgctgttcttcccgacgcggatggacccttcgctcaatacgatggcgaacgatcggcaacgtgaagggaaaatgaccattctggtggggaactccggcgaccgcagcaatgagcatattgctgccttgcgcgccgttcatcagcaatttggcgatacggtaaaagtggtggtgccgatgggatatccgcctaataacgaagcgtacattgaggaagttcgtcaggcggtgctggagttattcagcgaagaaaatctacaaattctgagcgaaaaactggaatttgacgcctatctggcgctacttcgtcagtgcgatcttggttactttatttttgcccgccagcagggcattggtacgctgtgcttactgattcaggcgggcattccttgtgtgcttaaccgggaaaatccgttctggcaggatatgacggaacaacatttgccggtgctgtttactaccgacgatctcaacgaggatattggaggtcgcatgagtctgctgcaattcagtggcctgtttgttgtctggctgctctgcacgctgtttattgccacgctgacctggtttgagtttcgccgtgtgcgctttaacttcaatgtcttcttttcattgctgtttttgctcacctttttcttcggcttcccgctgaccagcgtgctggtatttcgctttgatgttggtgtcgcgccgccagaaatcttgttgcaggcgttgctttctgcgggctgcttctacgcggtttactatgtcacctacaaaacccgcctacgcaaacgcgttgctgatgtaccgcgccgtccgctgtttaccatgaaccgcgtggagaccaatcttacgtgggtgatcctgatgggtatcgcgctggtaagcgtcggcatcttcttcatgcacaacggctttttgctgttccggcttaactcctacagtcagatcttttccagtgaagtctccggcgtggcgttaaaacgcttcttttaa

SEQ ID NO: 18236 - DNA, 912 bp, Homo sapiens
  SIMILAR (187)..(678): 911254mologous to Drosophila melanogaster Sog,accession number U18774,Smith-Waterman Score=774.
atgccggaagcagacagcccgttcagggcgcttcagcggtgttgcgggtgtcggggctggcttaactatgcggcatcagagcagattgtactgagagtgcaccatatgcgggtgaatacccgcacagatgcgtcgtaccttatcgcccagcatcatcttattctctatttgtattccctccatctttcagatacggatgtagccttggatgtgcccgtgcccaatgaagaggaagagcgcaacatgaaacattacgctgcgttgctaacgggccgcacctcctatttcctcaagggtgaggaaatgaagtccatgtacaccacctacaatccgcagaatgtggtggccaccgcccgtttcctgttccacaagaagaatctatactactccttctacacctcatcgcgaatcggtcgtccgcgtgccattcaattcgttgatgatgcgggtgtaatcctggaggagcatcaactggagaccaccttggcgggcactctcagtgtctatcagaatgccacgggcaagatctgcggtgtctggcgacgagttccacgtgattacaagcgcatcctgcgcgacgatcgtctccatgttgtcctcctctggggcaacaaacagcaggccgaatgggagttaaaagaacaaggatgtaaagtgacctgtaaggccaatcgactgagagataggcccagatatagggtcaaccttcgtgggaactatcagacggttcacagagatctattaagagtgaaggggataatcttagtctggtttggagttggatatgcgtcatatatcgatcagttcagacttacaccgggactcggcggactgactcttgagtcatatgagacaacagagttccgcgatcgattcgagatattctggcacatggatgtagaatatgtttga

SEQ ID NO: 18237 - DNA, 2592 bp, Homo sapiens
  SIMILAR (328)..(675): 1001254mologous to Homo sapiens DNA repair protein RAD52 beta isoform,accession number AF125950,Smith-Waterman Score=619.
atggctgaggaagcctcagaatcacggtatgaggcaaaaggcacttcttacatggcggcagcaagagaaaatcaggaagaagcaaaagcggaaccccctgataaacccatcagatctcgtttgaactttgagggtctgctgacacatggattttcttctgcctctgccaaatctgagacagcaataccaatcccttttcttcttcctcttcctcagcctactcaaaacaaaaatgatgaggatgaagatcttcgtgatggtccacttctacttaatgaatatgtccagggtcatgctgcctatatagtaaggtcaaccagaatcaagatgtctgggactgaggaagcaattcttggaggacgtgacagccatcctgctgctggcggcggctcagtgttatgctttggacagtgccagtacacagcagaagagtaccaggccatccagaaggccctgaggcagaggctgggcccagaatacataagtagccgcatggctggcggaggccagaaggtgtgctacattgagggtcatcgggtaattaatctggccaatgagatgtttggttacaatggctgggcacactccatcacgcagcagaatgtggattttgttgacctcaacaatggcaagttctacgtgggagtctgtgcatttgtgagggtccagctgaaggtgaggggatggagtagacctgctgcccggaaggatcagtgggtggtaggagaaggtgagcaggatggttcatatcatgaagatgttggttatggtgttagtgagggcctcaagtccaaggctttatctttggagaaggcaaggaaggaggcggtgacagacgggctgaagcgagccctcaggagttttgggaatgcacttggaaactgtattctggacaaagactacctgagatcactaaataagcttccacgccaggtatatcagacatggatgagtggagtgaagataatgcggcaaactcttgtgtgtcatgggttgagtatttggaggatgcaaggagaaaaaaatggggtctgtggtggggcagccctggagtcacactgccttgccatgagtggcttctggagtgttcctcctgcctcatctgctctccgaggtccctgccatgtcgctccccagggcagcattcccatcctgtgcctgagggattcttgtcctcatggagccccacaagctcccgaagcagcgtttggcacagcgcagggtcggaacgtggacactaatttccgcccacgctccccgcgtcctggcgggatcaccacagacacgacgtccattgctggggtcctcggcgatgcccgtgtgcgcagccccgcgagtctcagggggcggggcgcggtgacgtcgcgggcgcctgggccgtgctgtggcggcggcggcggcggtagtggcggcggcggcggtgcctgggcggcagcagcagcagtagcggcagccctgaggacgttttacaccgaagaagagggagatcttcggtttagacaacttcgttccggcagccaccatttgggtcgcattacgcttagctccttcaaggaatatttttctggagatggaatcatcatttgttttgctgaatctcgttgtgggcagtgctcaccagggcggtctcgcccctgcacctgtggcaagagccagtggcttgactgggggctgcaggatctgttcttcaggatggctcactcgcgtggccagcaaggaggtgctgctcccagcccagagaatactgatggtctgggccaggcaatgaagtgtctggcagcctatggtgtgcttcacgtggaacacaggctgaaatgggaaggatctgggtcctgcagggtgcgtgtggcgattcagaggcccttctacaagtggcgggcgccggtcgctaactcagcatcgcgtttttttagcggtctgctgaagcttctgggtttccttacggaagaagttcgtgccgccgccgtagaaggctttgttaaattaaagatccttcgccttgatacggatgtagccttggatgtgcccgtgcccaatgaagaggaagagcgcaacatgaaacattacgctgcgttgctaacgggccgcacctcctatttcctcaagggtgaggaaatgaagtccatgtacaccacctacaatccgcagaatgtggtggccaccgcccgtttcctgttccacaagaagaatctatactactccttctacacctcatcgcgaatcggtcgtccgcgtgccattcaattcgttgatgatgcgggtgtaatcctggaggagcatcaactggagaccaccttggcgggcactctcagtgtctatcagaatgccacgggcaagatctgcggtgtctggcgacgagttccacgtgattacaagcgcatcctgcgcgacgatcgtctccatgttgtcctcctctggggcaacaaacagcaggccgagttggctctggccggaaagacaagctgtgaccgtctccgggagctgcatgtgtcagaggttttcaccgtcatcaccgaaacgcgcgaggcagctgcggtaaagctcatcagcgtggtcgtgaagcgattcacagatgtctgcctgttcatccgc

SEQ ID NO: 18238 - DNA, 3411 bp, Homo sapiens
  SIMILAR (1155)..(4): 1001254mologous to Escherichia coli 4-alpha-l- fucosyltransferase,accession number M87049,Smith-Waterman Score= 1996.
ttatccttcaacctgcgtccggagcgatgattttgtacgtttatgaatgagtccggcgctttcaaaaagccagtacaacagttttgcgatcatcagacatgcgccgaagaccacgataaaaaagaccacgcgtgagacaaacgaatccagcccttcacgcgccagcacgatcatattgaagatcgccccaaagcagaaactgtgcaatatcgcagctttatagcgattaggctcgcggttgcccagctcatacagccagtcgaaccatttgatgatcagaccaaccacgatcgccccgagcgggatgaacaacgcgccgcccatcaccaccagtgagcctataagcgtaggcgagatcgccagtccggagtggttattcagcacttcccaggtaaagtagttggctgagttcagcaccatactcgggcgacccggccacagccaggaagggataaagacatagaaatcgcggacaattggagccaggccctggaagtcgatgttgtcgtagttctgcaacagcaacgccagattctcccacggcgagaaggtgtcgcgagtgagatagagaaacgtatagaacgcttcatcgccgctcacattcattccatagcgttttagtgccagccagaacatgccaacaatccccagcacgcccgccgccgccagcatccacaacgaaatccagccgcgaataatgccaataaacaggaagatagcgaatgcgatgatgatattggcgcgagtgccgccgacaatcatataagtcagcaagccaaaggcgaccgtgctgacgaggaaaaacagccacgctttgctgtcctggcgcagaaagtagaccaccagcatcgccgggatgaaaaagtaaaagaagcgttttaacgccacgccggagacttcactggaaaagatctgactgtaggagttaagccggaacagcaaaaagccgttgtgcatgaagaagatgccgacgcttaccagcgcgatacccatcaggatcacccacgtaagattggtctccacgcggttcatggtaaacagcggacggcgcggtacatcagcaacgcgtttgcgtaggcgggttttgtaggtgacatagtaaaccgcgtagaagcagcccgcagaaagcaacgcctgcaacaagatttctggcggcgtaggctgggactggggctgggaaggaggagagccggagccgttatcaccgaacatcggttttggcataaaggtcgcggttttaccgaagcggtgcgctacgttgtgcacaacatatttgtagatctgaatttcgtcagcttttttggtcatggtattgaagcgggtagccacttcgttctgaccagcagtcgctacttcgtggtgatgggcttcaaccaccagacccatctgttccatcaccagacacatttcagaacgaatatcctgagccgagtctaccggtggaaccgggaagtaaccgcctttcactgccggacggtgacctttgttaccaccttcgtattgggtggaggagttccatgcgccttcgatatcgtcgatagcaacgtgggaaccggagatagatgatccgaaacggatgtcatcgaacaggaagaattcaggttctggcccgaacagtacggtgtcggcaatgccagtggaacgcaggtaatcttcggcgcgcttcgcaatggagcgcgggtcacggtcatagccttgcagggtgccaggttcaaggatgtcgcaacggataatcagggtggagtcggcgaagaacgggtcaatcactgcggtggatgcgtctggcatcagcaccatgtcggactcgttaatgcctttccagccgccaatcgaggagccgtcaaacattttgccttcttcgaagaattcagcattcacctgatgagcagggatagtgacgtgctgttctttacctttagtatcggtgaagcgcaaatcaacaaacttcacttcgtgctcgttcagcatcgtcaccccccatcgtcggcttcaacacccacaacgaaggctgtcgaacccactgaacagtccagcgcagcagcgagttctgcttccgcagcgaagacatccgaaacgaacgcgaaagcgtcggaaacaagcgcagaatcctcaaaaacggctgccgcatcgtcagccagttcggcggcgtcatcggcatcatcggcgtctgcttcaaaagatgaggcgaccagacaagcgtcagcagcgaagagcagcgccacgacggcatccacgaaggcgacagaggctgctggcagtgcgacggcggcagctcagagcaaaagtacggcggaatccgcggcaacgcgcgccgagacagcagctaaacgggcagaggatattgcatccgccgtggcgcttgaggatgcaagtacgacgaaaaaggggatagtacagctcagcagtgcgaccaacagtacgtctgaaacgctggcggcaacgccaaaggcagtaaaatcagcctatgacaatgcagagaaacgtctgcagaaagaccagaacggcgctgatatacccgataagggatgcttcctgaacaacattaacgcggtcagtaaaacagactttgctgataagcgtggtatgcgttatgtgcgggttaacgctcctgcaggtgcaacatctggaaaatattaccctgttgttgttatgcgttctgctggctcagtgccgccaaatccttctgaactgttgatgagcgaacgctttgccgaactggtgaactgggcgagtaaaaactatgacctggtgttgattgatacgccgccgattctggcagtgaccgatgcggcaattgttggtcgtcatgtcggaaccacgttaatggtggcgcgttatgcggtcaacacattgaaagaagtggaaaccagtctgagccgctttgagcaaaacggtattccggtgaaaggggtgattctgaactccatcttccgccgcgccagcgcgtatcaggattatggctattacgaatacgaatataagccggataaggcgttcacgccgcatccggcaagcaaaccagctcataagccgggagaacaacctatgaaaaacaatccgctgatctcaatctatatgccgacctggaaccgccaacaactggcgattcgggcaataaaatcggttttgcgccaggactacagcaactgggagatgatcatcgtggatgattgctccacctcctgggaacaactgcaacagtacgtcaccgccctcaacgatccgcgtatcacttacattcacaacgacattaacagcggggcgtgcgcggtacgtaaccaggcgattatgctggcgcaaggggaatatatcaccgggattgatgacgatgacgaatggacacccaaccgtctgagcgtcttcctcgcccataaacagcaagctggtcacacacgcctttttgtacgctaa

SEQ ID NO: 18239 - DNA, 2561 bp, Homo sapiens
  SIMILAR (1992)..(2504): 971254mologous to Escherichia coli 4-alpha-l- fucosyltransferase,accession number M87049,Smith-Waterman Score= 864.
atatggaaatttgttaccgcattcacattacctgaagtcgctttccccgtagcgatataatcaactttaaaagtcaacgtctgatctccatcctgcaacaaaatgttcccggtttctgtgtctggcgtgatggccgttgtaccatcattcatatacatttgcagggccacgtttgtagcagcatcagatgaggcctggttagcaaacgctgtaatctgagtagtatccgcagtgccattaaaggtgaacgttgcattttttgttacggtagtatcacaatcttttaattcaattggcacatcaatttgcacgccagaaacctgaccattggtttgcaacttcgtggcactaacatctggcaaagtcaccacggaatctttcgtcgcagctaccagggtacaagctggagcaataactttaccattaaatgttactgagccatccgtgatagcattatcatcagcagccataacggttttgcggtatcgctgtactcttttgcggttttcatcatctttcctcgcaaccgttactctgttgttgccgccagtcgttaagtccgcctggcatctctttccggccagagccaactcggcctgctgtttgttgccccagaggaggacaacatggagacgatcgtcgcgcaggatgcgcttgtaatcacgtggaactcgtcgccagacaccgcagatcttgcccgtggcattctgatagacactgagagtgcccgccaaggtggtctccagttgatgctcctccaggattacacccgcatcatcaacgaattgaatggcacgcggacgaccgattcgcgatgaggtgtagaaggagtagtatagattcttcttgtggaacaggaaacgggcggtggccaccacattctgcggattgtaggtggtgtacatggacttcatttcctcacccttgaggaaataggaggtgcggcccgttagcaacgcagcgtaatgtttcatgttgcgctcttcctcttcattgggcacgggcacatccaaggctacatccgtattgttggtcgcactgctgagctgtactatcccctttttcgtcgtacttgcatcctcaagcgccacggcggatgcaatatcctctgcccgtttagctgctgtctcggcgcgcgttgccgcggattccgccgtacttttgctctgagctgccgccgtcgcactgccagcagcctctgtcgccttcgtggatgccgtcgtggcgctgctcttcgctgctgacgcttgtctggtcgcctcatcttttgaagcagacgccgatgatgccgatgacgccgccgaactggctgacgatgcggcagccgtttttgaggattctgcgcttgtttccgacgctttcgcgttcgtttcggatgtcttcgctgcggaagcagacctcgctgctgcgctggcctgttcagtggcttcgccagccttcgttgtggctgttgaagcagacgatgcggcgctttctgccgattttccggcggcggtggcactggctgaggcctgcccggcacttgttgacgctgcactggcagacgacccacaaacaccgtctgcacaggcccagttcaaggtcatcaaccggaccggttgccagggtatgggtttgcgcctgaacatcaggaatatccagttggtaatcaaataccttgatattgagtaccggaccaaacagcggttcatcacctgccgctcgcccgctgtcacgggcaatttgttcggcatcgtaacgttgatgacgacgcatttttttcagttgtgcggccagtcgggttgccagttccggcagcgtttcttgcgccgcaatgtgaatacccaacggcaaaacggtgacgcccggttccggtaaccgtcaagcccccccaagcccagtcgacgcataaagataaatccggcggcgtagtccatacgattgcacaatcgccccagccacaaggctgccagcgcaagggcccccgaaaagacggcggtgtgggggggacacagaggggaggtcgcatgagtctgctgcaaatcagtggcctgtttgttgtctggctgctctgcacgctgtttattgccacgctgacctggtttgagtttcgccgtgtgcgctttaacttcaatgtcttcttttcattgctgtttttgctcacctttttcttcggcttcccgctgaccagcgtgctggtatttcgctttgatgttggtgtcgcgccgccagaaatcttgttgcaggcgttgctttctgcgggctgcttctacgcggtttactatgtcacctacaaaacccgcctacgcaaacgcgttgctgatgtaccgcgccgtccgctgtttaccatgaaccgcgtggagaccaatcttacgtgggtgatcctgatgggtatcgcgctggtaagcgtcggcatcttcttcatgcacaacggctttttgctgttccggcttaactcctacagtcagatcttttccagtgaagtctccggcgtggcgttaaaacgcttcttttactttttcatgggaccctgtaagtggtccccaaggctcacgaagcatgatccggaacgctacgagtga

SEQ ID NO: 18240 - DNA, 1287 bp, Homo sapiens
  SIMILAR (673)..(1212): 991254mologous to Escherichia coli similar to P. putida pcaK,accession number U73857,Smith-Waterman Score=893.
atgaacggactcacggcaacgggtgtcaccgtcggtatttgtgcagggctttggcagttagtgtcttcacatgtcgggctctctcaaggatgggaattattaggaaccattggcttcgtcgccttttgcagtttttatgccgcaggcggcggtaaatcggggtttatcagaagtctggcggttaattattccgggatggtgtgggcgtttttcgccgcgctgactgctggttggctggcctctgtaagtggactgtccgcgttctgggcgagcgtaattactaccgtacccttctcggcggtagtggtctggcaagggcgtttctggttactgtcctttattcccggtggctttctcggcatgacgctgttttttgccagcgggatgaactggacggtgacgttactgggttttctggcgggtaactgcgtggggctggagaaattcatagtagataatggcgagaatggtttaatgaactcaatttttaccgaagagaatctgttggcatttactaccgctgcgcgttttggcagcttcagtaaagccgcagaagagttgggtttaaccacttccgccattagctacaccattaagtccgtcgagcaacagcgcgaagtgtttgagtttgtcgccagcagcgactacttctccggcccgacgtggatggcgatgtatcagtcgcgattcacctgcactcgcaacgaggttcatcttatgtcgactcgtaccccttcatcatcttcatcccgcctgatgctgaccatcgggctttgttttttggtcgctctgatggaagggctggatcttcaggcggctggcattgcggcgggtggcatcgcccaggctttcgcactcgataaaatgcaaatgggctggatatttagcgccggaatactcggtttgctacccggcgcgttggttggcggaatgctggcggaccgttatggtcgcaagcgcattttgattggctcagttgcgctgtttggtttgttctcactggcaacggcgattgcctgggatttcccctcactggtctttgcgcggctgatgaccggtgtcgggctgggggcggcgttgccgaatcttatcgccctgacgtctgaagccgcgggtccacgttttcgtgggacggcagtgagcctgatgtattgcggtgttcccattggcgcggcgctggcggcgacactgggtttcgcgggggcagacctgcaggcagcgagctgcactgcacgcagcgagctccattcactcatcagacttggtgaacaaagcacaatttattga

SEQ ID NO: 18241 - DNA, 795 bp, Homo sapiens
  SIMILAR (328)..(540): 951254mologous to Escherichia coli 'ferrichrome-iron receptor precursor',accession number D26562,Smith-Waterman Score=341.
atgggtgacatcgaagtggacttgaatgagatcatcgaatggactcgatgtgtgttcatcatcgcttggaatcgaatggaatcatcagatgcacatgggtgggctcatcagcgactggtgtcaagtagtctcatcgtgctgattcgagtgtcgatgaccgcgcggtgtgacgccgctctggatcctgtcgcggaattcctgtgctactgccgtgtgcacagcacatcgtcgctcgagcccaacgatcttcgggattcactacgcgtaagccttaatgtgctccaaacatccctctgcagattatacaaaaacagtgttgcgcagccgctctatcaaaaggcagcggttgaaccgaaagaagacactatcaccgttaccgctgcacctgcgccgcaagaaagcgcatgggggcctgctgcaactattgcggcgcgacagtctgctaccggcactaaaaccgatacgccgattcaaaaagtgccacagtctatttctgttgtgaccgccgaagagatggcgctgcatcagccgaagtcggtcgactctagaggatccccacttgataaggatcattgcatggacacgaatggaatcatcattttatggaatcgaatggaatcattgaatggtttcgacaggtatcatcagcgcatgggatcgaatatgattatcaacaagagcattccaattgcgatcgagggtgtcagtgtcgttggatcgcgcgcgatcggcggtggagtggtgttgctcaccatcgctggggtcgatgttatcgtcctcgggggtatcgcatga

SEQ ID NO: 18242 - DNA, 981 bp, Homo sapiens
  SIMILAR (361)..(972): 971254mologous to Escherichia coli leucine-specific binding protein,accession number J05516,Smith-Waterman Score=986.
atggggccggaaggtgtgggtaatgcgtcgttgtcgaacattgccggtgatgccgccgaaggcatgttggtcactatgccaaaacgctatgaccaggatccggcaaaccagtgcatcgttgatgcgctgaaagcagacaagaaagatccgtccgggccttatgtctggatcacctacgcggcggtgcaatctctggcgactgcccttgagcgtaccggcagcgatgagccgctggcgctggtgaaagatttaaaagctaacggtgcaaacaccgtgattgggccgctgaactgggatgaaaaaggcgatcttaagggatttgattttggtgtcttccagtggcacgccgacggttcatccacggcagccaatacctacgcgctgatagccatcggctacaccatggtttacggcattatcggcatgatcaacttcgcccacggcgaggtttatatgattggcagctacgtctcatttatgatcatcgccgcgctgatgatgatgggcattgataccggctggctgctggtagctgcgggattcgtcggcgcaatcgtcattgccagcgcctacggctggagtatcgaacgggtggcttaccgcccggtgcgtaactctaagcgcctgattgcactcatctctgcaatcggtatgtccatcttcctgcaaaactacgtcagcctgaccgaaggttcgcgcgacgtggcgctgccgagcctgtttaacggtcagtgggtggtggggcatagcgaaaacttctctgcctctattaccaccatgcaggcggtgatctggattgttaccttcctcgccatgctggcgctgacgattttcattcgctattcccgcatgggtcgcgcgtgtcgtgcctgcgcggaagatctgaaaatggcgagtctgcttggcattaacaccgaccgggtgattgcgctgacctttgtgattggcgcggcgatggcgacgtgggggggaccgagctga

SEQ ID NO: 18243 - DNA, 1113 bp, Homo sapiens
  SIMILAR (1038)..(4): 931254mologous to Escherichia coli put. methylase (cysG) (AA 1-457),accession number X14202,Smith-Waterman Score=1620.
ttaatggttggagaaccagttcagtttatcgcgcaggccaacaacccgaccaataataattagcgatggactgttcatttgctgcgccagttctcccagctgtgtgagcgtaccgtcaatcacgcgctgcgtgactgccgtaccgttttcgacaattgccaccggcatttcgcctggcattccgtgttcaatcagcttttgctgaatagtcgcggcctgattcaaccccatatagaacaccagcgtctgtttttctgccgccaggttttcccagtccagctcgccaccggtttttaagtgtccggtaattaagcgtacgctctgggcataatcgcgatgcgtgagtggaatacccgaataggcagagcaaccagaagctgcggtaatacccggaaccaccgagaacggaatacccgcgttgcacagtgtttccagctcttcgccaccacggccaaaaataaacggatcgccacctttcagccgcaccacgcgtttgcctttttgcgcttcccgcagcaggatctggttaatctcttcctggggtacgcagtggtatcccgcgcgtttgccgacgaaaacacggtccgcatcgcggcgtaccagattcataatatcgtcagaaaccagacggtcgtagaccaccacatctgcctgctgaatttgttgcagtcctttcagtgtcagcagcccggcatcgcccggacctgcaccaaccagcaccacttcaccgcgatggtcgagcggttcgttgattaactgttcggtcgtttcagtaatggctttctgatcgttgtttgccagcgactgcgccaggcggtcgttaacgaacaatttctcccagaaacggcgacgctcacccatcgtggcgaactgttgtttcactcgcccgcgtaattgcccggcgtatttcgctacctggcccagatgtaacggcacgcagtgattcaagtttttcgcgcaacaggcgtgccagaaccggagaggtgccgccagaggagaccgcatgagcggtgagcggtcaataatcgacagcataatagaattcggtaccagctctgaccggccctgcgaggaactcacgaagaacctgctctcggagccgttcatgagggc

SEQ ID NO: 18244 - DNA, 679 bp, Homo sapiens
  SIMILAR (290)..(679): 1001254mologous to Escherichia coli FixC protein,accession number D90812,Smith-Waterman Score=655.
ataaaaatgcgccaatcttcaactatgccgactacggtctggtgggcgatatctacaaagtcgtccctgccctgattagccagttgagccgctaattcccctttcaaccacatctcccgctgtaaacgcagcgggaagggagcataacgcatgtcggatgacaaatttgatgccattgtggtcggtgcgggcgttgctggtagcgttgccgcactggtcatggcacgagccgggctggatgtcctggtgatagaacgcggcgacagtgccggatgtaaaaacatgacccggcgggcgtctttatgcccacacacttgaagcaatcattccaggctttgcagtatcagcgccggtagaacgcaaggtcacacgcgagaaaatctccttcttaaccgaagaaagcgccgttaccctcgattttcaccgcgagcagccagatgttccgcaacacgcatcttataccgtattgcgtaatcgtctggacccgtggttgatggaacaagccgagcaggcgggcgcgcagtttatcccaggcgttcgcgtcgacgcgctggttcgtgaaggaaacaaggtcactggcgtgcaggctggggatgatattctcgaagcgaatgtggtgattctggctgatggcgttaactcgatgcttggccgctcgctgggaatggttcccgcttcc

SEQ ID NO: 18245 - DNA, 2244 bp, Homo sapiens
  SIMILAR (1297)..(2241): 941254mologous to Escherichia coli FixC protein,accession number D90812,Smith-Waterman Score=1524.
ttattggcgatggtcgatgattttcgctgcgtagtcatcaaactggcggagcgtattgctcatctgcgcgaagtaaaagatgcgccggaagatgaacgtgtactggcggcaaaagagtgtaccaacatcgtctcggaatcggacaactgaaatgggaactggacgaacttcggcgatgttgatctgtgcaggaacgccagcgatgtccgctacgaccttacgcagtttttctacgtcttcaccttttttaccgataacgatacccgggcgagcagtgtgaatggttacacggatgctcttagccggacgctcgataacgatacgagatacggacgctttagccagttccttagtcaggtactgacgtacgtcaatcacgcgctgcgtgactgccgtaccgttttcgacaattgccaccggcatttcgcctggcattccgtgttcaatcagcttttgctgaatagtcgcggcctgattcaaccccatatagaacaccagcgtctgtttttctgccgccaggttttcccagtccagctcgccaccggtttttaagtgtccggtaattaagcgtacgctctgggcataatcgcgatgcgtgagtggaatacccgaataggcagagcaaccagaagctgcggtaatacccggaaccaccgagaacggaatacccgcgttgcacagtgtttccagctcttcgccaccacggccaaaaataaacggatcgccacctttcagccgcaccacgcgtttgcctttttgcgcttcccgcagcaggatctggttaatctcttcctggggtacgcagtggtatcccgcgcgtttgccgacgaaaacacggtccgcatcgcggcgtaccagattcataatatcgtcagaaaccagacggtcgtagaccaccacatctgcctgctgaatttgttgcagtcctttcagtgtcagcagcccggcatcgcccggacctgcaccaaccagcaccacttcaccgcgatggtcgagcggttcgttgattaactgttcggtcgtttcagtaatggctttcggtcgattcggatcaggcatagtgtcctggtgaatgtgtccgtccaataccaaaatatagcgcagcttttgcctaattcccctttcaaccacatctcccgctgtaaacgcagcgggaagggagcataacgcatgtcggatgacaaatttgatgccattgtggtcggtgcgggcgttgctggtagcgttgccgcactggtcatggcacgagccgggctggatgtcctggtgatagaacgcggcgacagtgccggatgtaaaaacatgaccggcgggcgtctttatgcccacacacttgaagcaatcattccaggcctcgattttcaccgcgagcagccagatgttccgcaacacgcatcttataccgtattgcgtaatcgtctggacccgtggttgatggaacaagccgagcaggcgggcgcgcagtttatcccaggcgttcgcgtcgacgcgctggttcgtgaaggaaacaaggtcactggcgtgcaggctggggatgatattctcgaagcgaatgtggtgattctggctgatggcgttaactcgatgcttggccgctcgctgggaatggttcccgcttccgatccgcatcattacgctgttggtgttaaagaggttattggcctcacaccagaacagatcaacgatcgctttaatattacgggcgaggaaggtgccgcctggctgtttgccggttccccttctgacggcctgatgggcgggggatttctctataccaacaaggattccatatccttggggctggtttgtggattgggtgatatcgcccatgcgcaaaaaagcgtgccgcaaatgctggaagattttaaacaacaccccgccattcgcccgctgattagcggcggcaaactgcttgaatattccgcgcatatggtgccggaaggcggtctggcaatggtgccgcaactggttaacgagggcgtgatgatcgttggtgacgccgcaggcttctgcctgaatttgggttttacggtccgcggcatggatttagccattgcatcggctcaggctgccgccacaacggtgatcgccgccaaagaacgcgcggatttctccgccagcagtctggcgcaatacaaacgtgagctggaacaaagctgcgtcatgcgtgatatgcagcattttcgcaagatcccggcgctgatggaaaacccgcgcctgtttagccaatacccacgaatgtag

SEQ ID NO: 18246 - DNA, 1347 bp, Homo sapiens
  SIMILAR (295)..(621): 981254mologous to Escherichia coli K12 putative receptor protein,accession number AE000449,Smith-Waterman Score=569.
atgagcacacttgcacacaggaagggtaaaatcacatacgcatgtaggctacgagctcaacggcccgaaaataaaataaatacactctcccttgtttctttgtgtaaaggtctttcaggcggtattgcagaagaaggcatcattatcataggagatgacagctccatgcgtgttattgcccttgaagaccttccagtgaaacaagatgcagaggtagaagacagtgacattgatgattctgaccctgtgaactttgatggggaccaaacaaatactgtgataaaggtccttcaccaaaagtatacgccagcgacggtgaatcgtagcgtaagtacgaatgatcaagggtatgccgccaatccgttcccgaccagtagtgccgcaaaacctgatgctgtactggtcaaaaatgaagagaaaaatgccagtgagacaggctcgatttattcttccatgactctgaaagatttcagtaaatttgtgaaagatgaaattggctttagttacaacggctattaccgttctggttgggggaccgcctctcatggttcacctaaatcatgggcgattggttctctgggccgctttggtaacgaatactccggctggtttgttttgcaggctgcgatcgtaatcatcgacatcttcgcgaaccagcgcgatatcaattttacccggaccgactttccagttttccagacctacacccgctgcggcatcagtacgctgcgttttccagatagtgagggagttctcatgaaacctgatggtttaaaagtggtacttgccccttcactctctctctctctcctgctgccttgtgaagaaggtgcctgcttctccttcaccttctgccatgattgtaggtttcctgagggctccccagccatgctgaacttgacaagttttggcaaattcctatacaaatataccagcaacaaccagctcagtggttggactgagaagaaactccaaagcacttcccatggccaaacttgtgccaaaaaaaaggtcatggtcactgtttggtggtctgctctcagtctgatctactacagctttctgaatcctggtgaaaccattacatctaagaagcatgctcagcaaatcagtgagatgcacccaaaactgcaatgcctgcagccggcactgatcaacagaaagggcccaattcttctcgacaacagtgcccaaccgcatgtcatacaaccagtggttcaaaagttgaacaaattgtgctatgaagttttgcctcatccaccatattcacctgacctctcgccaaccaactaccacttcttcaagcatctcgacaactttttgcagggaaaatgcttccacagctag

SEQ ID NO: 18247 - DNA, 1065 bp, Homo sapiens
  SIMILAR (1059)..(502): 1001254mologous to Escherichia coli PHTHALATE TRANSPORTER,accession number D90856,Smith-Waterman Score=912.
  misc_feature (1)...(1065): n = a,t,c or g
cacatgaacgcgaatattttcgttttcatcagccagaccgtgaataccgcttgcggtcgtggcgtccacttcgcccaccataattgacgaacgctcactggtgcccnccgggcttgccaggaaacttaacaccggtttggtccgtttgactatcagtcccgcctcttcaatcgcttcgcgacgggcaacatcttccacactttcaccctcttcaatcatcccggcaaccatctccagtagccaaggggtttcgctggtgtcgtacgcggcaatccgaatctgctcaatcagcacaacttcatcacgcactgggtcaaagggtagcaagactgcggcgtgaccgcgctcaaaaatttcccgccgcacctcatgactcatttgcccgttgaatagacgatgacgaaatctataaagatctaatgaaaaaaagccgcgataaagtgtttctcgtgcaataatttctacatcgtttttgccaaatgtaacgggcaggttgtctgggtcggtctgcgcaacagtgcgatttacacgcagagtgaaaataatcagcgaaccgatgaccgccaccgctgccagcgtcagtaatcccgccgcatcgctggcaaataacgtttctgctttcacgcgcaggatcggggcaataaacccgcccactgcaccaaacaggtttacaaaaccaattcccgcagccagcgccgtaccggaaagcagttgtgtcggcatcgtccagaacactggctgcacggcaataaacccgatagctgcaacacacagcgctacgatcgccattactggagaaagcagcccggacagaccaataccaatgcccgccgccagtaatgtcagcgctgcgacattacgccgttcgccggttttatcggaatagcgcggaataagccaggtcccaaacaaggccgcaacccacggaatggcggtgaccaccgacgctgtaaagcccacttttgttcccagcaatgccgcaacctgggtcggcaggaagaaaattaatccgtaaaccgccacctgaatggtcaggtagataatcgctagttgccagacttccat

SEQ ID NO: 18248 - DNA, 3999 bp, Homo sapiens
  SIMILAR (3049)..(3660): 1001254mologous to Escherichia coli K12 methylmalonyl-CoA mutase (MCM),accession number AE000375,Smith-Waterman Score=1052.
atggctggggtacctggattcgaaccagggaatgccggtatcaaaaaccggtgccttaccgcttggcgataccccatccgtacaacgctttctggtgaatggtgcgggaggcgagacttgaactcgcaagaggccaccctgcaacaaccgctgttgcaggctatcgacctgaaaaaacattatccggtgaagaaaggcatgttcgcgccggaacgtctggttaaagcgctggatggcgtttcgtttaaccttgaacgtggcaaaacgctggcagtagtgggcgaatctggctgcggcgtgctggcctgcaccctttttgcctggaatcgcaactactttgttttgctattcgttggcgtctttcttagcagctttggctcgaccgctaacccgcaaatgtttgcccttgcccgtgaacatgccgacaaaaccggacgtgaggcggtgatgttcagctcttttttacgcgctcaggtttcactggcatgggtcattggcccaccgctggcttatgccttagcgatgggtttcagctttacggtaatgtatctgagcgcagcggtagcgtttattgtttgcggtgtgatggtgtggctgtttttaccgtcgatgcgaaaagagcttccgctggcgaccggcacgatcgaagcgccgcgccgtaaccgtcgcgatacgctgctgctgtttgtcatttgtacattgatgtggggctcgaacagcctgtacatcatcaacatgccgctatttattatcaacgaactgcatcttcccgagaaactggccggtgtgatgatggggaccgccgccgggctggaaatcccgacgatgttgattgccggatattttcgccaaacgtctgggccggataaggcgttcacgccgcatccggcaagaagctataagaaaagggcggagatcatctccgccctttttatttctgcaatccgcaattatcatcccgcaaatctatactttttgggtcaacacgtgattatcatggggctttttgatgaagttgtcggtgcctttctgaaaggcgatgcggggaaatatcaggctattttaagttgggttgaggagcagggcggcattcaggtgctgctggaaaaactgcaaagtggcggcttaggggccattctctcaacctggctgagtaatcaacagggcaatcaatcggttagtggcgagcaactggaatcggcgctcggcacaaatgcggtgtccgatctcgggcaaaaacttggcgtggataccagtacagcttccagtttactggcagaacaattgccgaagattattgatgcgctctcaccgcaaggaaccaatctacctggggaactcatggctattaaactcattgctatcgatatggatggcacccttctgctgcccgatcacaccatttcacccgccgttaaaaatgcgattgccgcagctcgcgcccgtggcgtgaatgtcgtgctaacgacgggtcgcccgtatgcaggtgtgcacaactacctgaaagagctgcatatggaacagccgggcgactactgcattacttataacggcgcgctggtacagaaggccgctgatggtagcaccgtggcgcaaactgctctcagctatgacgactatcgtttcctggaaaaactctctcgcgaagtcggttctcatttccacgcctgggaccgtaccacgctgtaccccgccaaccgtgatatcagcggggacatgggccccatcccgtccgggatgctgtgttggtcagtagcccatcggcaaaatgcggcgattcttctcgataacgccaggttctttggtcaaattgccctcatcatcaaagccaccatcgaccgggagctgacgacctgccagacggtaacttctaacataccactggagtatctcggttatacctttggttttattatcgtcattatggcccgccagcaattatttaccgaaaataccgtgactgcggtactacccgtcatgcaaaaaccgacaatgagcaacgtcggcttactaacaaggaaaaggggcgtcgtgctgctgggtaatattctcgggacaggtattgcggcgtgggcatttgaatatatgcctatcttcaatgaagaaactcgcgatgcatttgtcaaaatcggcatggatgtgatgaagaacacccccagcgagatgtttgccaacgcgatcatttccggctggctgatcgccactatggtttggatgtttcctgcagcgggtgcggcaaagattgtggtgattatattgatgacctggcttattgccctgggtgacaccacccatatcgtggtcggttctgttgaaatcctctatctggtgtttaacggtacgctgcactggagcgatttcatctggcccttcgcactacctactttagcggggaacatctgcggcggcacctttatcttcgcgttaatgagtcatgcacagattcgtaacgacatgagcaataagcgtaaagcagaagcacgccaaaaagcagaactggataaaataattttacccaccggatttttacccatgctcaccgttaagcagattgaagcagcaaagccgaaagaaaaaccataccgccttctcgatggtaatggcctgtacctttatgtccctgtgtcagggaaaaaggtatggcagcttcgctacaagattgacggtaaggagaaaatcctgaccgtcggaaaatatccgcttatgactttgcaggaggcaagggataaagcatggactgcgaggaaagacatctcggttggcatcgatcctgtaaaggcgaaaaaggcttcgtctaacaacaattcctttagtgcgatttacaaggaatggtacgagcacaagaagcaagtatggtcagtagggtatgcaactgaacttgccaaaatgtttgacgacgacattttacctatcattggcggccttgaaattcaggatattgagccgatgcaactgctggaagtaatccgcaggtttgaagatcgcggtgcaatggaacgagccgacaaagcacgcagaagatgcgaagagtttgccctgccctttcttgcaaaagagtccaacgctttttatcgccgtaacctggccgccgggcaaaaaggtctttccgttgcgtttgaccttgccacccaccgtggctacgactccgataacccgcgcgtggcgggcgacgtcggcaaagcgggcgtcgctatcgacaccgtggaagatatgaaagtcctgttcgaccagatcccgctggataaaatgtcggtttcgatgaccatgaatggcgcagtgctaccagtactggcgttttatatcgtcgccgcagaagagcaaggtgttacacctgataaactgaccggcaccattcaaaacgatattctcaaagagtacctctgccgcaacacctatatttacccaccaaaaccgtcaatgcgcattatcgccgacatcatcgcctggtgttccggcaacatgccgcgatttaataccatcagtatcagcggttaccacatgggtgaagcgggtgccaactgcgtgcagcaggtagcatttacgctcgctgatgggattgagtacatcaaagcagcaatctctgccggactgaaaattgatgacttcgctcctcgcctgtcgttcttcttcggcatcggcatggatctgtttatgaacgtttatgactggttgctgattgacggggagcacgcgccaaacaccattcaggatctttatcatcagctacaggcggtagcgccctatgccagccaacccgtgatccgtccggtggaaggcagtaaaccgctgattaaacaagtcctggatattggcgcgcaaactctactgatcccgatggtcgatactgccgaacaggcacgtcaggtggtgtctgccacgcgctatcctccctacggtgagcgtggtgtcggggccagtgtggcacgggctgcgcgctggggacgcattgagaattcttggtcccgtgccgatcgcctgggtgtggcgccgttccagtaa

SEQ ID NO: 18249 - DNA, 730 bp, Homo sapiens
  SIMILAR (637)..(2): 891254mologous to Escherichia coli K12 soluble lytic murein transglycosylase,accession number AE000509,Smith-Waterman Score= 996.
  misc_feature (1)...(730): n = a,t,c or g
agtancgacgtccccattccgtggcgctcatcaacgtcggtttatcccccatgaaatagcggtagtaagcgtcataagccagcacgttcttcacataaccgcgcgtctcggagaatggaatactctcgacaaatgccactgcgtcgatacgcccggcgctgttgccaagccaggttcgcacccgccctggtccggcgttataagctgctgaggagaaaatacgattattgccaaactgctgataaacatattgcaggtaactggtgccaatgttgatattcgtttccggatccagcaattgcccaggactgctataaccgggaatagagaacatcttcaccgtatgggtcgctgtaccaggcataatctgcatcaagccgctggcccctaccggtgatttcactttcggattccaagcgctcttctgacgagcaatcgccatcgcatagctttgcgggatcttcttaccgcttgtgtagcgttttgaaagatcgttgttagccaacgggaatcgctctttcagatgatccccaaggtttccggcgaatcgtggctgaacgctcaaaatccaccattgggtggtggaagcataccccggcaggtgagcccggtctggttttgatttgttcttcaacagaattggcccacttgctacgcgcgggattattttggaatcccgtgcattaaattttgggacgcgcggccatttttcggcccctgaataaggcat

SEQ ID NO: 18250 - DNA, 2193 bp, Homo sapiens
  SIMILAR (2193)..(1396): 1001254mologous to Escherichia coli PHTHALATE TRANSPORTER,accession number D90856,Smith-Waterman Score=1338.
  misc_feature (1)...(2193): n = a,t,c or g
ttatgtgtttaacaactcatatttcttaatcttgcgatagagcgtagcaatgccgatgcccagttcatcagcaacttgcttcttgctgttatgacgtgaaagcgcctcgcggatcatttgcttttccatctcctccagcgccgtgccgcccgcatcatcgagtgacaggtgcgcctcactgacctctgttacatcactttgctccgttgtgccattattcagcagatttggcggcaatagcgtgctgtcgataacttcacctgaaggaaccacgttaaccagatattccatcaaattgcttaactcgcgcaggtttccgggccaacgatgcttacgcaatatttcgacgacatcgggagcaatgccaggataaaccgatcccagacgacgggtatgcagatgtaaaaagtaatgcaccaatagttcaatatcttcctgacgttcacgcagcggtggcagagttatcgggataacattaagtcggtagaagagatcttcgcggaatttaccttcggcaatgaactgggccaaattctgattagttgcagaaatgatgcgaatgtcgacttgtattgggctaggtggcttgacccccccttcccctccccccctgagcaccagtttacagtcaccagctgactttcccatttgatcgaccatcgactccacgggtacgacatcgatgttcagccgatcgctgagacggcgaattgcttttctggccccgcatgacagcacccgaaaaccaaccacaaacactaccgtcagcgcggcgagcattatccagagcatgacttctcctgcgtaatcagaactcatgatatctggaaaccctcgccagttatttnccatttgatcgaccatcgactccacgggtacgacatcgatgttcagccgatcgctgagacggcgaatttcttttctggccccggatgtcagcacccgaaaaccaaccacaaacactaccgccagcgtggcgagcattatccagatcatgagttctccgtagggaggatagcgcgtggcagacaccacctgacgtgcctgttcggcagtatcgaccatcgggatcagtagagtttgcgcgccaatatccaggacttgtttaatcagcggtttactgccttccaccggacggatcacgggttggctggcatagggcgctaccgcctgtagctgatgataaagatcctgaatggtgtttggcgcgtgctccccgtcaatcagcaaccagtcataaccagaagtggcggcaatttctgccatataggcagtcgttgagcttaaccacagaccaatttgcacttcgcccttgcgtaaacgttctttaaagggattgcttaataatgcgatcatcgtgttccttaacctatttaatgatgtgccacgtcggtcgatgaccgccaccgctgccagcgtcagtaatcccgccgcatcgctggcaaataacgtttctgctttcacgcgcaggatcggggcaataaacccgcccactgcaccaaacaggtttacaaaaccaattcccgcagccagcgccgtaccggaaagcagttgtgtcggcatcgtccagaacactggctgcacggcaataaacccgatagctgcaacacacagcgctacgatcgccattactggagaaagcagcccggacagaccaataccaatgcccgccgccagtaatgtcagcgctgcgacattacgccgttcgccggttttatcggaatagcgcggaataagccaggtcccaaacaaggccgcaacccacggaatggcggtgaccaccgacgctgtaaagcccacttttgttcccagcaatgccgcaacctgggtcggcaggaagaaaattaatccgtaaaccgccacctgaatggtcaggtagataatcgctagttgccagactcggccattacgcagcgcatcgctcagccgagaagtcactttctgttgttcttcacttgccagttgattgataagcaacgttttttcttgtttactcagaaaacgtgcctgctccggtgtgtcatcaagccaaaagaatgtgaataccccagcaccgactgccaacaatccttcaatcacaaacatccagaaccagccgggatgccccataaatccatgcatctccaacagcgcgccggaaagcggtgatcccagtgttaacgccagcggtgcgcccatatagaacagccccat

SEQ ID NO: 18251 - DNA, 1824 bp, Homo sapiens
  SIMILAR (421)..(816): 1001254mologous to Escherichia coli HisP-like nucleotide binding protein (phnK),accession number J05260,Smith-Waterman Score =690.
atggcctccctcccagagggcctgcatcacccagtaaaacttgtgttcctggggaaaccagggtgcctcctcacagacaggcccctgaagggtcccaacacagccaagcctgtggtcagtcccagccatggcgcggcccacctgcccgccctttcctatgctggccggaagcgccaggaggaagacaatcacacaaaagagtcgctagtggaaaagccatttcgaaaaatcctggtcataaagatgcgatatcatggggatatgttattaactactcctgtcatcagtacgctcaagcagaattatcctgatgcaaaaatcgatatgctgctttatcaggacaccatccctattttgtctgaaaacccggaaattaatgcgctctatgggataagcaataaagagcgaggcaaaaaaccaatgaatcaaccgttactttcggtcaataacctgacccacctttacgcgccgggcaaaggctttagcgatgtctcttttgatttatggccgggggaagtgctgggcattgtcggggaatccggctccgggaagaccacgctgctgaagtcgatctccgcgcgcctgacgccgcagcagggggaaattcactacgagaaccgttcgctgtatgcaatgagcgaggccgaccgccgtcgcctgctgcgtaccgaatggggcgtggtgcatcagcatccactcgacggcctgcgccgccaggtgtcggcaggcggcaatatcggcgagcggctgatggcgaccggggcacgtcattacggcgatattcgtgccaccgcgcagaagtggctggaagaggtcgctaccgctatcgtcctgacgctctacatcatttatatggtcggttttttcgctaccagtggcgagctgacatatgaagtctggatcggtttcttcgcctctgcgttcaccaaagtgttcaccctgctggcgctgttttctatcttgatccatgcctggatcggcatgtggcaggtgttgaccgactacgttaaaccgctggctttgcgcctgatgctgcaactggtgattgtcgttgcactggtggtttacgtgatttatggattcgttgtggtgtggggtatgcgcgcggcgctgcaaatttcccagagcggccagacctgtgcgctgctctctaaagtcttcccgacccgttcccataccgtttctgcgcaaggcggcattaccgttgcgctgggtaatacccatgaagataactgggaatggcatatgtacgacaccgtgaaagggtcggactatatcgcgacccatacggtgaagatgttctctattcccggttatagcagtcctgggcaattgctggatccggaaacgaatatcaacattggcagccagctacctgcattatgtttatcagcagtttggcaataatcgtattttctcctcagcagcttataacgccggaccagggcgggtgcgaacctggcttggcaacagcgccgggcgtatcgacgcagtggcatttgtcgagagtattccattctccgagacgcgcggttatgtgaagaacgtgctggcttatgacgcttactaccgctatttcatgggggataaaccgacgttgatgagcgccacggaatggggacgtccttactgatccgcacgcttatgatatgctttggtactctttaacgagcacacccgggggaagggttttgcttcccccgctaacaatggcgacatattatggcccaacaatcaccctattcagcagcgatggcagaacagcgtcaccagcagtggttacaatttgtgtaccggcatagtaatgccagccaaaacgatcta

SEQ ID NO: 18252 - DNA, 1862 bp, Homo sapiens
  SIMILAR (968)..(1705): 931254mologous to Escherichia coli possibly rffA or rffC,accession number M87049,Smith-Waterman Score=1171.
  misc_feature (1)...(1862): n = a,t,c or g
atggcgtctattcagggtggagcctcgttagctaagtcactttttcctctggtgggcgcaccgggtgtcactgcgctgcgtctggcattaggaacgctgatcctcatcgcgttctttaagccatggcgactgcgctttgccaaagagcaacggttaccgctgttgttttacggcgtttcgctgggtgggatgaattatcttttttatctttctattcagacagtaccgctgggtattgcggtggcgctggagttcaccggaccactggcggtggcgctgttctcttctcgtcgcccggtagatttcgtctgggttgtgctggcggttcttgtaatggcgatcgtagcgctgtgtgttgcagctatcgggtttattgccgtgcagccagtgttctggacgatgccgmacacaactgctttccggtacggcgctggctgcgggaattggttttgtaaacctgtttggtgcagtgggcgggtttattgccccgatcctgcgcgtgaaagcagaaacgttatttgccagcgatgcggcgggattactgacgctggcagcggtggcggtcatcgaccgacgtggcacatcattaaataggttaaggaacacgatgaacgcattattaagcaatccctttaaagaacgtttacgcaagggcgaagtgcaaattggtctgtggttaagctcaacgactgcctatatggcagaaattgccgccacttctggttatgactggttgctgattgacggggagcacgcgccaaacaccattcaggatctttatcatcagctacaggcggtagcgccctatgccagccaacccgtgatccgtccggtggaaggcagtaaaccgctgattaaacaagtcctggatattggcgcgcaaactctactgattccgatggtcgatactgccgaacatgcacgtcatgtttggggggaagattctagcaaatcgttaatgtgcggattgattcaatgtcccgcacggcaggtggtgggaaccgaactcgactatatgcagtcggcaatgggtagcggcaaactgtgtggcgatggcggttttacccgtcgctgccagcagtggctggagcaacgttttggcagcgccaaattgttactgacgccgtcctgcaccgcttcgctggatatggcggcgctgctgctcgatatccagcctggcgatgaagtgatcatgccgagctacacctttgtctccaccgccaatgcctttgtgctgcgtggcgcaaaaatcgtttttgtggatgttcgcccggacaccatgaacatcgacgaaacgctgattgaagcggcgatcaccgacaaaacgcgcgttatcgtgccggtccattacgcgggtgtggcctgcgaaatggacaccattatggcgttggcgaaaaagcataatttgtttgtggtagaagatgccgctcagggcgtgatgtccacttacaaagggcgtgcactgggaaccattggtcatattggctgctttagcttccatgaaaccaaaaactacacggcgggcggtgaaagcggcgcgacgctgattaacgataaagcgttaatcgaacgagccgagatcatccgtgaaaagggcactaaacgcagccagttcttccgtggtcatgtcgataaatatacctggcgcgatattgggctcagctatttgatggtcgatctgcaagctgcatanctggcgggccaatccaccagcttgcatctgccgaatcaccacatcagcccagagaaagttttgtacttccgctttgacatcgtagtcgttgttggcgcgaacgatgcggacatcatgcccaaggtcgcgcagtgtgccatccgcgacttcggtcaccgttgtcgttcag

SEQ ID NO: 18253 - DNA, 2310 bp, Homo sapiens
  SIMILAR (1393)..(2283): 1001254mologous to Escherichia coli Membrane fusion protein MtrC precursor,accession number D90845,Smith-Waterman Score=1469.
caccagcgggaggcgacggcttcaaatttagcgatctcttcgtggtctacgttatggtttaccggcgatttttcggcattcattggcacttctactccgtaattggcaagacaaacgagtatatcaggcattggatgtgaataaagcgtataggtttacctcaaactgcgcggctgtgttataatttgcgacctttgaatccgggatacagtagagggatagcggttagatgagcgacctttgcgagagaaattacaccggtcaacattgaggaagagctgaagagctcctatctggattatgcgatgtcggtcattgttggccgtgcgctgccagatgtccgagaaggcctgaagccggtaccccgtcgcgtactttaccccatgaacgtactaggcaatggactggaacaaagcctatacttaatcggcccgggtcgttggtgacgtaatcggtaaataccatccccatggtgactcggcggtctatgacacgatcgtccgcatggcgcagccattctcgctgcgttatatgctggtagacggtcagggtaacttcggttctatcgacggcgactctgcggcggcaatgcgtatacgcggtagtaagcgtcataagccagcacgttcttcacataaccgcgcgtctcggagaatggaatactctcgacaaatgccactgcgtcgatacgcccggcgctgttgccaagccaggttcgcacccgccctggtccggcgttataagctgctgaggagaaaatacgattattgccaaactgctgataaacatattgcagctatcgggtttattgccgtgcagccagtgttctggacgatgccgacacaactgctttccggtacggcgctggctgcgggaattggttttgtaaacctgtttggtgcagtgggcgggtttattgccccgatcctgcgcgtgaaagcagaaacgttatttgccagcgatgcggcgggattactgacgctggcagcggtggcggtcatcgaccgacgtggcacatcattaaataggttaaggaacacgatgaacgcattattaagcaatccctttaaagaacgtttacgcaagggcgaagtgcaaattggtctgtggttaagctcaacgactgcctatatggcagaaattgccgccacttctggttatgactggttgctgattgacggggagcacgcgccaaacaccattcaggatctttatcatcagctacaggcggtagcgccctatgccagccaacccgtgatccgtccggtggaaggcagtaaaccgctgattaaacaagtcctggatattggcgcgcaaactctactgatcccgatggtcgatactgccgaacaggcacgtcaggtggtgtctgccacgcgctatcctccctacgtatcattccgcgaaacgtttcaggaagagaaactcttaacgatgaaaggtagttataaatcccgttgggtaatcgtaatcgtggtggttatcgccgccatcgccgcattctggttctggcaaggccgcaatgactcccggagtgcagccccaggggcgacgaaacaagcgcagcaatcgccagcgggtggtcgacgtggtatgcgttccggcccattagccccggttcaggcggcgaccgccgtagaacaggcagttccgcgttacctcaccgggcttggcaccattaccgccgctaataccgttacggtgcgcagccgcgtggacggccaactgatagcgttacatttccaggaaggccagcaggtcaaagcaggcgatttactggcagaaattgaccccagccagttcaaagttgcattagcacaagcccagggccaactggcaaaagataaagccacgcttgccaacgcccgccgtgacctggcgcgttatcaacaactggcaaaaaccaatctcgtttcccgccaggagctggatgcccaacaggcgctggtcagtgaaaccgaaggcaccattaaggctgatgaagcaagcgttgccagcgcgcagctgcaactcgactggagccggattaccgcaccagtcgatggtcgcgttggtctcaagcaggttgatgttggtaaccaaatctccagtggtgataccaccgggatcgtggtgatcacccagacgcatcctatcgatttagtctttaccctgccggaaagcgatatcgctaccgtagtgcaggcgcagaaagccggaaaaccgctggtggtagaagcctgggatcgcaccaactcgaagaaattaagtgaaggcacgctgttaagtctagataaccaaataaaacacatcttttcaatggctggctaa

SEQ ID NO: 18254 - DNA, 695 bp, Homo sapiens
  SIMILAR (285)..(680): 961254mologous to Escherichia coli 2-C-methyl-D-erythritol 2,4-cyclodiphosphate synthase,accession number AB038256,Smith- Waterman Score=669.
gccaaccggggcaaaaatcccattgttcatacctttgatcgcaacggcttatggcacgcgttaacaccgcaatttttccctcttgagctgttcccatcactgtatgacgcgcgctctaaatgaaggcggacatattatcgacgaagcctcggcgctggaatattgcggattccatcctcagttggtcgaaggccgtgcgaataacattaaagtcacgcgcccggaagatttggcaccgggccgagtttttccctcacccgacccatccatcaggagaatacataatgcgaattggacacggttttgacgtacatgcctttggcggtgaaggcccaattatcattggtggcgtacgcattccttacgaaaaaggattgctggcgcattctgatggcgacgtggcgctccatgcgttgaccgatgcattgcttggcgcggcggcgctgggggatatcggcaagctgttcccggataccgatccggcatttaaaggtgccgatagccgcgagctgctacgcgaagcctggcgtcgtattcaggcgaagggttatacccttggcaacgtcgatgtcactatcatcgctcaggcaccgaagatgttgccgcacattccacaaatgcgcgtgtttattgccgaagatctcggctgccatatggatgatgttaagggcgagatcacaggaccacaggactga

SEQ ID NO: 18255 - DNA, 1281 bp, Homo sapiens; identical to SEQ ID NO: 17831
  SIMILAR (679)..(1242): 951254mologous to Escherichia coli K12 putative transport system permease protein,accession number AE000302,Smith-Waterman Score=943.

SEQ ID NO: 18256 - DNA, 626 bp, Homo sapiens
  SIMILAR (100)..(624): 921254mologous to Escherichia coli K12 putative coenzyme A transferase,accession number AE000375,Smith-Waterman Score=810.
gcgtcggtacccgctatgtgcaaatcgatccgaaaaagattgtcgccgtcgtggaaaccaacttacccgacgccggtaatatgctggataagcaaaatcccatgcgccagcagcattccaaaaaccggtcccacgttcttatcccagaaaatggcgcatgggcgtattccaccgcaatttctgccgctgcaaagtggcgtgggcaatatcaataatgcggtaatggcgcgtctgggggaaaacacggtaattcctccgtttatgatgtattcggaagtgctacaggaatcggtggtgcatttactggaaaccggcaaaatcagcggggccagcgcctccagcctgacaatctcggccgattccctgcgcaagatttacgacaatatggattactttgccagccgcattgtgttgcgtccgcaggagatttccaataacccggaaatcatccgtcgtctgggcgtcatcgctctgaacatcggcctggagtttgatatttacgggcatgccaactcaacacacgtagccggggtcgatctgatgaacggcatcggcggcagcggtgattttgaacgcaacgcgtatctgtcgatctttatggccccgtcgattgctaaagaaggcaa

SEQ ID NO: 18257 - DNA, 1425 bp, Homo sapiens
  SIMILAR (190)..(984): 981254mologous to Escherichia coli CG Site No. 29739,accession number U28379,Smith-Waterman Score=1317.
atgcaccaacaggcactgacactccagcaggccatagaccggcagaacgatgcggagtttggctggggcagtcggaggagagcccaggtcactgagcagcccgactccaggggaaaaccttcccactccatcttcttctggcttctcccatctgctgagagctacctccactcaataaaaccttgcactcattctccaagcccagcggcaatattgagtgtggtcgaaggattgacagaatttctgccggtatccagcacgggccatatgattattgtcggtcacttgttggggtttgagggcgacacggcgaaaacctttgaagttgtgatccagttaggatcaattctggcggtagtagtgatgttctggcggcgtctgtttggcctgattggcatccactttggccgcccgttgcagcacgaaggtgaaagcaaaggtcgtttaacgctgatccacattttgctggggatgattccggcggtggtattggggctgttgttccacgacacgattaagtcattgtttaacccgataaatgtgatgtatgcgctggtcgttggcggtttgttgctgattgccgccgaatgcctgaagccgaaagagccgcgtgcgccgggtcttgatgatatgacctatcgtcaggcatttatgattggctgtttccagtgtctggcgctgtggccgggtttctcccgttccggggcgaccatttcaggtgggatgctgatgggggtgagccgttacgctgcttccgagttttcgttcctgctggcggtgccgatgatgatgggcgcaacggcgctcgatctctacaaaagctggggcttcctgacaagcggcgatatcccgatgtttgccgttgggtttatcaccgcttttgtggtggcgctgatagcgattaaaaccttcctgcaattgattaagcgcatttcgtttatcccgttcgccatttatcgctttattgtggcggctgcggtgtatggcttgcaggcaagcgagttcaaagcgtttttcaaaccagcgaaaaggattggtaaaggaactttggaactaagagctgtttgcactaatgagtctcctgacactgtcccaaagttaacagagggatttagcaatatagattatgtcatgttcttagaggggaattccctagttgtagggacccttttggtcaagtttctgaaggctcttttttcagaactaagacgtttccaagtagaaaataaagccaataaaaagaaagaagagctgagacaaagagttttagtcctcacactgctcataccctcagtgtggatgtcatctttgttctggacatctgctcctccttacctgatgttcacctgttcacctagcaacatgacatctgatatcagccctggatggagccttctgcttcctgctggtggggtcttaacttag

SEQ ID NO: 18258 - DNA, 3747 bp, Homo sapiens
  SIMILAR (3091)..(3735): 971254mologous to Escherichia coli similar to drug resistance translocases,accession number L10328,Smith-Waterman Score=1065.
atgcacattaatatctctgccacgtgttatttttcgcgtggtgtttcgtccagacccctcgttggtgttacgtgtctgtccccgtgtgattctgcttcgtgtgccccagctgggttgtacttctgcccgctggtgtgtgttgtcgtctcccctagtggttctgttgctcctcgtccattggttctccggcttttttgtggccatggctgttccattcctgcgttccccgtttcccgacgtgcttgtcgcaaacattggggtaattacacccttctaggccttctccagtgggctgtgttgccggttccgtggtcccccacaacagtgttttactctccgtactcatcatattcccaagcttttatactgtacttcccctctgccaatggaaacctctgtctgtacattacataccttcccctgagtatccaacgagctgcttcttccctacacaacttgacgctcctatgtgctttcaggactttctccccagcaatatcctatgccccttccttaactgctgtccccttgcagactatcttcacaagtcgacaaatgatctatctaatgaccctgaccattccctttccttgcacaaccagtgcagatttcctcaataccgcaaaatatccacaggcaacattcacctccaccagcgtgaagaaagacggtgacgaactggatattaccggcgatctgacgctgaatggcgtaaccaaacccgtcacgctggaagcgaaattaattggtcagggcgacgacccatggggtggtaaacgtgcaggcttcgaggccgaaggcaaaattaagctcaaggacttcaatatcaagacagatttaggtccagcttctcaggaagtggatctgattatttcagtggaaggcgtacagcagaaacgtccacgagacttattaaagatcttattgccattttcacgtcctgcccgacggcgtcgctgttcttctggcggtaacgcgctttcttcgcaacaaatctcactacaacaacctttgtatttttccgcacatactggacactgaataaacagcaggtggcagccatcatttttacagttggtatggctgtcgcacggcgcgccgcactggtggcaatgcgcgataatctcatccgatatacgttcgcccatccgctcgtaaaaaacaaaatttttgccaataaaacgcaccggcaagccctgctcgcgcgccttacgggcgtattcaataattccgccctcgatatgccagactttgttgaatccgttatgtttcatccaggcactggccttttcacaacgaatgccgccggtgcagtacatgacgatttttttatctttatgtgcctgcatcatcctcgactgcttttggcacctgctcacggaaggcatctgccggaatttcgagcgcgttttcaaaatactcaccaacattgctggcatcaaagtgaggatcgtcaataccgtcggcaacaatgcgatcgcgtaccttcatgcgcagtacccagaagggggatcctctagatcattgttgcgtccgcaggagatttccaataacccggaaatcatccgtcgtctgggcgtcatcgctctgaacatcggcctggagtttgatatttacgggcatgccaactcaacacacgtagccggggtcgatctgatgaacggcatcggcggcagcggtgattttgaacgcaacgcgtatctgtcgatctttatggccccgtcgattgctaaagaaggcaagatctcaaccgtcgtgccaatgtgcagccatgttgatcacagcgaacacagcgtcaaagtgatcatcaccgaacaagggatcgccgatctgcgcggtctttccccgcttcaacgcgcccgcactatcattgataattgtgcacatcctatgtatcgggattatctgcatcgctatctggaaaatgcgcctggcggacatattcaccacgatcttagccacgtcttcgacttacaccagcaactttcggtaatcaccactattggtgtttacgactgggaacagaccatcgaacagaagttagtgttcgatatcgaaatggcgtgggataaccgtaaagcggcgaaaagtgatgatgtggcggattgcctcagttacgctgacattgcagaaacggtggtcagccacgtcgagggggcgcgttttgcgctggtggaacgcgtggctgaagaggtggcggagctgctgttagcacgcttcaactcgccgggtttattgatgagcgatatgcactcgctgctgatagcggcaatattgggtgtggtcgaaggattgacagaatttctgccggtatccagcacgggccatatgattattgtcggtcacttgttggggtttgagggcgacacggcgaaaacctttgaagttgtgatccagttaggatcaattctggcggtagtagtgatgttctggcggcgtctgtttggcctgattggcatccactttggccgcccgttgcagcacgaagctggcgcatctgtggtggtcagtgatattaacgccgacgcagctaaccatgttgtagacgaaattcaacaactgggtggtcaggcatttgcctgccgttgtgatatgacttccgaacaggaactctctgcactggcagactttgctatcagtaagctgggtaaagttgatattctggttaacaacgccggtggcggtggacctaaaccgtttgatatgccaatggcggattttcgccgtgcttatgaactgaatgtgttttcttttttccatctgtcacaacttgttgcgccagaaatggaaaaaaatggcggtggcgttattctgaccatcacttctatggcggcagaaaataaaaatataaacatgacttcctatgcatcatctaaagctgcggccagtcatctggtcagaaatatggcgtttgacctgggtgaaaaaaatattcgggtaaatggcattgcgccgggggcaatattaaccgatgccctgaaatccgttattacaccagaaattgaacaaaaaatgttacagcacacgccgatcagacgtctgggccaaccgcaagatattgctaacgcagcgctgttcctttgctcgcctgctgcgagctggatggcgcaaaccatttatattccagctattgccgatatggcgcgcgatctcaacgtccgtgaaggggcggtgcagagcgtaatgggcgcttatctgctgacttacggtgtctcacagctgttttatggcccgatttccgaccgcgtgggccgccgaccggtgatcctcgtcggaatgtccatttttatgctggcaacgctggtcgcggtcacgacctccagtttgacggtgttgattgccgccagcgcgatgcaggggatgggcaccggcgttggcggcgtaatggcgcgtactttaccgcgagatttatatgaacggacacagttgcgccatgctaacagcctgttaaacatggggattctcgtcagtccgttgctcgcaccgctaatcggcggtctgctggatacgatgtggaactggcgcgcctgttatctctttttgtcggttctttgtgctggtgtgaccttcagtatggcccgctggatgccggaaacgcgtccggtcgatgcaccgcgcacgcgcctgcttaccagttataaaacgcttttcggtaacagcggttttaactgttatttgctgatgctgattggcggtctggccgggattgccgcctttgacgcctgctccggcgtgcacagattgtga

SEQ ID NO: 18259 - DNA, 793 bp, Homo sapiens
  SIMILAR (166)..(483): 981254mologous to Escherichia coli cobalamin-independent methionine synthase,accession number M87625,Smith-Waterman Score= 547.
ctgctgccggtggcgattttgcctggtacgatcatgtactgaccaccagtctgctgctgggtaacgttccggcgcgtcatcagaacaaagatggttcggtagatatcgacaccctgttccgtattggtcgtggacgtgcgccgactggcaacctgcggcggcacggaaatgaccaaatggtttaacaccaactatcactacatggtgccggagttcgttaaaggccaacagttcaaactgacctggacgcagctgctggacgaagtggacgaggcgctggccgtgggccacaaggtgaaacctgtgctgctggggccggttacctggctgtggctggggaaagtgaaaggtgaacaatttgaccgcctgagcctgctgaacgacattctgccggtttatcagcaagtgctggcagaactggcgaaacgcggcatcgagtgggtacagattgatgaacccgcgctggtactggaagcgctgcctgttcagggtctgcatgttgacctcgtacatgctaaagatgacgttgctgaactgcacaagcgcctgccttctgactggttgctgtctgcgggtctgatcaatggtcgtaacgtctggcgcgccgatcttaccgagaaatatgcgcaaattaaggacattgtcggcaaacgtgatttgtgggtggcatcttcctgctcgttgctgcacagccccatcgacctgagcgtggaaacgcgtcttgatgcagaagtgaaaagctggtttgcttcgccatacaaaaatgccatgaactggcacctgcctcgatgcg

SEQ ID NO: 18260 - DNA, 4107 bp, Homo sapiens
  SIMILAR (1338)..(616): 991254mologous to Escherichia coli yjdB,accession number U14003,Smith-Waterman Score=1293.
tcaggaatcttccataacatagaaattggctttatccagataagcaatcagcagcgcaaccgactttaatcggtcacctttttgccaatcttcagcgttaatagtaccagtgttgattgcttgtataaggagatcaaggtaaagacctaaagcatcattttgtttatggttccacagctgcggcttgccttcttcctgcacatctgccatcacgggggagttgctgtcaaatcggatatgcacagcattcatttgcacgggaattccatccagtcgttttgggttgctaatgacgtcctgcatccgcttaatctggtcgggcgtagacatataatcccacagggtgagcagaaccttttttgcggctacactatttccctgatctgatactaatagctcgcgaccgctgatgatcagccttttgctgtaatgcgtcgcctgacgctgcaggataatcctgctatcgcccgcgtcattcgtcaggtatccgccgaatacggtcttaccgctgataaaggctacaccgtcgccgatccgaatcttgacgagctgtatcaagtatatagtcagcgagggtgaagtggtcggcggcggtgggatagcgccattaaccgggagtgagtcggaaaatttatcctgatgttctttcagcagattaatcgctttatcaacaatatagtcgacgtaaaccagcgtgttgtcgtaagtgttcaccagttgctctttggtacaggtctggatctcattggtgtcgcaggttggggtaaatttcctgaactgaggcggatagcggttgtaataggtcggaccgtggctgccgatggtgtgtaagacaatcacgccatcaccttgcaggttattgatgtactcttcaagcccgtggaacagcacttcgtcatagcattcgccgttgatgcactgatcaggtagattcagcgcggtgacgttctggtgaggcacgcggtcgcaggcacctttacagccgccatcgttgtcattccacagcacgttgatgcccgctcgctgaatgatatccagcacgccttcctggtgctgtgccagctcttctttgtagtgctcacgcggcatatccgagaacatgcacggtactgaaactgccgttgccgtgccgcaagatgcggtattagggaaatagaccacgttatctttcgccagccgcgggttagtttcacgcgggtagccgttgagggagaagttctccgcccgcgaggtttcgccgacaatcaggatggtcaaatttttacgtttttcgttctgcattaacgggttgcggtgcgcgtcttcaccaattcgcaccagcggcagatttgccagtcgcagggacataaacgcacaccgaaacagttggcgctcatcatcaaacgttgtttgccgatggtgctcactggcagcggcatgctttgcactaccgctaacgccgaagagtattatttcgaccccattatgctgatcgagttttgcaatttcgccgagttcgtctttgtcgagacggaaatcccagacatcaaagttttcggcaatacgtgaaggtgtgaccgatttcgggatcaccaccaggccgctatccagatgccagcggataacaatctgcgccggggttttgccgtatttatctgccagatcgcgaatgactttctgatcgaaaacgcctttccctccttgcgctaatgggctccaggattcggtctggattttgtgtgtcgcgttccaggcgtgtagctggcgttgttgcatcagcggatgaagttcgatctggtttatcacaggcgtcacgccagtttcatcaatcaggcgttgcaggtgatggatctggaagttgcacacgccgatgcttttgattaatccctctttttgcaattcgatcatgcctttccatgcttcgacataatggtcgatagcgggaacgggccagtgcattaagtagaggtcgatataatcaagctggagttttttcaggctgtcgagcagggcttcgcgggggccgactatcacggccgacgacgacgcggaccgcacggatgtcgacggacgatgacaccgaacatcgatacacaagttaatactgcgttcgcgcagtacctctttcatcgcctgagtcaccagttcatgttcatggcgatctttttctgacgccagcagacgattacctgcttcgcgatcgagcacttcatccggctgacgacgcgcggaaccggctaacggaatggagctaaaacgctcgccgtctttacgtagcagcagttccgggctggcccccagcaggacgccaccatcagccagcggaacatggaagttgtaactaaccgggttttgcgcaatcaaccgttccagcaatacgccactatcaatggcggcgtcagtggtgatatcaatcaaccgtgacaacaccactttgtcgacctgcggcgtggcggtaagtgcggcggcgcgggcaaccatctgttcaaacgtggtttgctccggaattgcctggcgttccaccacattcagcgactggctgcgggtgaaacggcgtgcggaagcttgtttttcctgacgggagaacgactgccaggattcaggaatatacagcgacgaaggctgacgtggatcgaagggaatcgccccgaccatcaccggatttaagcccggtggagatcgcctggccgcaggaagcgtagcagcagccggcgcgatatattgattagtctgcgaacaagctttgcagattttgccaccgctttcacagaagtggtagacttcgttccttatgaagattctctgaaacaactggcgcgcgaacgctataaagcctaccgcgtggctggtttcaacctgaatacggcaacctggaaataatggaaaagacatataacccacaagatatcgaacagccgctttacgagcacctcggtttccctcgcgttggcctgcgtcgcgagctgaaaaaagcgcaagaaagttattgggcggggaactccacgcgtgaagaactgctggcggtagggcgtgaattgcgtgctcgtcacctgggatcaacaaaagcaagcgggtatcgacctgctgccggtgggcgattttgcctggtacgatcatgtactgaccaccagtctgctgctgggtaacgttccggcgcgtcatcagaacaaagatggttcggtagatatcgacaccctgttccgtattggtcgtggacgtgcgccgactggcgaacctgcggcggcagcggaaatgaccaaatggtttaacaccaactatcactacatggtgccggagttcgttaaaggccaacagttcaaactgacctggacgcaactgctggacgaagtggacgaggcgctggcgctgggccacaaggtgaaacctgtgcttgctgggcccggtacctggctgtggctggggaaagtgaaaagtgaacaattttaccggctgagcctgctgaacgacattcttgcgggttatcaacaagggctggcagaaaccggagtaggtccagacgatatcgtcacggcttaactgctttttaaagtgcgtgttatacacattcagcaggtaattgatttcactctcttcaatcttcaccgctttcggatcgcctttgtactcgacatcggtagtgccgatgatggaaaactcgtccatccacgggatcacgaacacaatacgtttatcttcgttttgcagaatgtaggcttgcttctgggtatgcacgcgcggcaccacaatatggctgcctttgatcaggcgaatgccataaggcgaaggcagatgcatcccgtcgtcgaagaactgtttcacccacgggccggtggcgttaaccaagccgcgcgcttgccagctatattttttgccggtatcgatatcttccgcttccacaatccacaggccgttttcgcggcgagcagaggtggcgcgagtccgagtaagcacttcgccgcctttacgcaccaccatctgggcgttggcgagtaccagacgggcgtcgtctacccaacagtcagaatattcgaatccgcgcttaatttccggttttaacactgaatttgcgccaaaacgcaaaccagttgatcccggcaagctggtgcgtttacccagatgatcgtacat

SEQ ID NO: 18261 - DNA, 2812 bp, Homo sapiens
  SIMILAR (694)..(1353): 981254mologous to Escherichia coli cobalamin-independent methionine synthase,accession number M87625,Smith-Waterman Score= 1148.
atgaagcaaacagtttatatcgccagccctgagagccagcaaattcacgtctggaatctgaatcatgaaggcgcactgacgctgacacaggttgtcgatgtgccggggcaggtgcagccgatggtggtcagcccggacaaacgttatctctatgttggtgttcgccctgagtttcgcgtcctggcgtatcgtatcgccccggacgatggcgcactgacctttgccgcagagtctgcgctgccgggtagtccgacgcatatttccaccgatcaccaggggcagtttgtctttgtaggttcttacaatgcgggtaacgtgagcgtaacgcgtctggaagatggcctgccagtgggcgtcgtccatgtggtcgacgggctggaccgtctggctaggcagttaattaagaatctggcgacactaaaagcaggcaatgcacgcgtggtgaacagcaacgcgatgtcattcctggcgcaaaaaggtacaccgcataatatcgtgtttgtcgatccaccgttccgccgtggcttgttagaagagacgataaatttactggaagataacggctggctggctgacgaagccctgatttatgtcgaaagcgaagtcgaaaacggtctgcccactgttccagcaaactggtcattacatcgggaaaaagtggcggcttttgctggagcggagccatatcattatttgaatcacaccctcggtttccctcgcgttggcctgcgtcgcgagctgaaaaaagcgcaagatagttattgggcggggaactccacgcgtgaagaactgctggcggtagggcgtgaattgcgtgctcgtcactgggatcaacaaaagcaagcgggtatcgacctgctgccggtgggcgattttgcctggtacgatcatgtactgaccaccagtctgctgctgggtaacgttccggcgcgtcatcagaacaaagatggttcggtagatatcgacaccctgttccgtattggtcgtggacgtgcgccgactggcgaacctgcggcggcagcggaaatgaccaaatggtttaacaccaactatcactacatggtgccggagttcgttaaaggccaacagttcaaactgacctggacgcagctgctggacgaagtggacgaggcgctggcgctgggccacaaggtgaaacctgtgctgctggggccggttacctggctgtggctggggaaagtgaaaggtgaacaatttgaccgcctgagcctgctgaacgacattctgccggtttatcagcaagtgctggcagaactggcgaaacgcggcatcgagtgggtacagattgatgaacccgcgctggtactggaactaccacaaccctgtctggaccgcatacaaacccgcttacgatgcgctccagggacagggtctgcatgttgacctcgtacatggtaaagatgacgttgctgaactgcacaagcgcctgccttctgactggttgctgtctgcgggtctgatcaatggtcgtaacgtctggcgcgccgatcttaccgagaaatatgcgcaaattaaggacattgtcggcaaacgtgatttgtgggtggcatcttcctgctcgttgctgcacagccccatcgacctgagcgtggaaacgcgtcttgatgcagaagtgaaaagctgtggtgacacggcagctctggcagagtggagcgccccgattcaggcacgtcgtcactctacccgcgtacataatccggcggtagaaaagcgtctggcggcgatcaccgcccaggacagccagcgtgcgaatgtctatgaagtgcgtgctgaagcccagcgtgcgcgttttaaactgccagcgtggccgaccaccacgattggttccttcccgcaaaccacggaaattcgtaccctgcgtctggatttcaaaaagggcaatctcgacgccaacaactaccgcacgggcattgcggaacatatcaagcaggccattgttgagcaggaacgtttgggactggatgtgctggtacatggcgaggccgagcgtaatgacatggtggaatactttggcgagcacctcgacggatttgtctttacgcaaaacggttgggtacagagctacggttccccccagacaaatgaacaccaaaccctgagtgaattgttttataaagaactcgaggataaattttctggcaaggagctggcgacgcctctattaaaaagcttctcagagaactgtagacaaaatggtcgtcatatctttagcaacaaggattttgtcattaaattttccacgtccgtcttacaagctgataagaaagaaattacgataattaataaaaacgaaaacacgacacttactcaaaccattgccccaatatttgaaaaatacctaatggaaattttacctcaacgctcagacactcttgataaacaagaattaaacctaaaatcagatagaaaagaaaaagaattcccaagaattaaacttaatggtcaatgttattttccggggcgaccccaaaaccgtatagtatgccgacacattgctgcacaatatattaatgatatttatcagaatgttgattacaaaccccatcaagatgattactcttcagctgaaaaatttctcacgcacttcaacaaaaaatgcaaaaaccagactttggcgttggtttccagccgtcctgaggggcgttgcgttgctgcctgcggtgatttcgggctagttatgaaagcatattttgacaagatggaatcaaatggcatcagtgttatggcagccatattactggtggataaccatgctttgacggtcccgcttaagaataaagaacacaactga

SEQ ID NO: 18262 - DNA, 2563 bp, Homo sapiens
ttatccgttctgcttttgcatccactccaccacaaaatcagccagcccctcaacatcattaatatccagtaatgcgacatgtggagaaatcgtgcacgggattgagattgaggagaaagtccagatcccatccatgcccttcatatccccgtggagcagaaggtatttttctggcttctgctctctcaaattctcaactgtgcaatacccacaacggcaggcacacttcacgggtttttcctggcaaaactttgacgggtgcgtttcaacggaaggggagaagccacccttctccatggctgtgtgtgtgcctatggtctgctcaggtcccgggtgtagcaccgcaggtgattcatcgccgtgggtcgttatcgccgtggtcagtgaggtattgtcggcgataatctgacagccaggcagttgaaatgcgatgcgatcgcctgattcaatacccttcgctaacatccagtttgccagacagctcgcggcgggatcgagcgcgctataggtgtacgatgcaccatgattatcgaccacggcaattttgtctggcatcgcacgacggtctgctgccagtaatcggccagcgaagcatcgccccataacccgtgccagactcagcacgtcggcgtgttcatatcccaggcgttcatacattccgagcaccatgtcgttatcttccggcacattgactccgcgatgcccgtcataaccgcccatcaccgttccgaccacgtcaccgtttacctcagcgaccaaaaacaaactgacgtcatggttcatcttacgctcgatgtccatttccggatcgttccacgacgcagcaagtcgcacgctcccaagggtgatgacctttcgagggatatagctgtcgtcgaggcctgacccagaggattccagggcgcacgacaacgctacttcggtcgcccggaagacggcacggttacggcgaactgcgatcgtatcgaaaaccgttacaacggtacggtaaaccactacttcctctgcgaccgtggtcgtttcggttacggttacgtcaacctgaaggatcgtccgcgtcagccagtacagcgtcgtggcgatgatttcattaccaggcaatgcagggccgcggcagatattctgcgtcagtcgaagaaagtgatcggtattggttctccgcgtgccagcgtggaaagcaactttgcgctgcgtgaactggtgggcgaagaaaacttctacaccggtatcgctcacggtgagcaggaacgtctgcaactggcgctgaaagtgctgcgtgaaggcggcatttatactccggctctgcgcgaaatcgaatcttacgatgcggtactggtgctgggcgaagacgttacccagaccggcgcgcgcgtcgcgctggcagtgcgtcaggctgtgaaaggtaaagcgcgcgaaatggcggcagcacagaaagtggctgactggcagattgcggcaatcctcaacatcggtcaacgtgcgaagcatccgctgtttgttaccaacgttgatgacacccgtctgcaagcctggcaaaaagcacaaatcgacgtcatcgtgcaggcactggcagtgcaagaactcctgcaggttgactctagaggtatcccccagacgcacttcatagtcgaccatcgccgaataatgcaggccactgcgcggcagaatatcggacgtcattaccagatccagctctccctgttgcaaggcgggctgttcatcaaatgtcacgcccgatttaaaatccatgtctacctgcggccagttcttatggaaattttctaacgcgggtgtcagccactgaatacagctatggcactcaatggcaatgcgcagacgcgtctgctgcggttcattgcaggcttgcagggcctggctaatttgcggcagtacctggtttgccagttgcaacaggatttctccctgcggtgtaaagcgtaacggctggctcttacgcacaaatagccggaagccaaggcgttgttccacatcgctaaactggtgagacagggcggattgcgtctgatgcaacgtcgccgcaacggctgcgagcgagccgcagttccgcaacgcttgtagcgctttcaggtggtttacttcgatcatgaaaagccttcacttcggcatgaataatttgcgcttgaggaatatacaggaactcgcaattaaggatgtgtaaaccttctggaccggtaaaagcctttcccctttaaatttatggtgcgttggctgcgtttctccaccccggtcacttacttcagtaagctcccggggatgaatgaactttggcgcctccctaaattccccaacccctaggagttacctttcattggggggagaaaaaaaggcccctgtttgggagcacacccttggggtcccctcccgtaggcctgcggccgggaagctgaaaaaagcgccagaaaggtattggggcggggaacatccccccgtgaaaaaatggctgggcgggtaggcccggaaatgccggcctcgtccctgggaaaccctctagaagtcccacctgcggcgccggccaagcttggggccttgggccggcggttta

SEQ ID NO: 18263 - DNA, 1314 bp, Homo sapiens
  SIMILAR (499)..(990): 991254mologous to Escherichia coli cobalamin-independent methionine synthase,accession number M87625,Smith-Waterman Score= 875.
tcaagcccacccgcgaactgataacccaggtaattcaccatttttgctggcattaaaacgtaggccggataaggcgctcgcgccgcatccggcgctgttgccaaactccagtgccgcaataatgtcggatgcgatggatttaaaatccatctctacctgcggccagttcttatggaaattttctaacgcgggtgtcagccactgaatacagctatggcactcaatggcaatgcgcagacgcgtctgctgcggttcattgcaggcttgcagggcctggctaatttgcggcagtacctggtttgccagttgcaacaggatttctccctgcggtgtaaagcgtagcggctggctcttacgcacaaatagccggaagccaaggcgttgttccagatcgctaaactggtgagacagggcggattgcgtctgatgcaacgtcgccgcagcggctgcgagcgagccgcagttccgcaacgcttgtagcgttttcaggtgttttacctcggtttccctcgcgttggcctgcgtcgcgagctgaaaaaagcgcaagaaagttattgggcggggaactccacgcgtgaagaactgctggcggtagggcgtgaattgcgtgctcgtcactgggatcaacaaaagcaagcgggtatcgacctgctgccggtgggcgattttgcctggtacgatcatgtactgaccaccagtctgctgctgggtaacgttccggcgcgtcatcagaacaaagatggttcggtagatatcgacaccctgttccgtattggtcgtggacgtgcgccgactggcgaacctgcggcggcagcggaaatgaccaaatggtttaacaccaactatcactacatggtgccggagttcgttaaaggccaacagttcaaactgacctggacgcagctgctggacgaagtggacgaggcgctggcgctgggccacaaggtgaaacctgtgctgctggggccggttacctggctgtggcggggattccgcccggtaaaccactcgaccagcgtatgattgtgctgggcgcactggaagcggtcgactggtgtagtgtcgtgttgaagaggacacgccgcagacgcttgatcgccgggatcttgccagatctgctggtgaaaggcggcgacatgtgacaaatgtggtgccagcatcacatacgacgattaccaggatcatccacagagcatactggcttgcgttatgagctaggcgaacaccaggaaccatacgcacacaaacgtcgcaccatcgccacactgccggcgtaccacatacatacaatgccgttcgcagcaggacgtacat

SEQ ID NO: 18264 - DNA, 1833 bp, Homo sapiens
  SIMILAR (865)..(1815): 951254mologous to Escherichia coli CG Site No. 18031,accession number U00039,Smith-Waterman Score=1629.
atgaatgaaaattttggcacgcaaatttgcgtaaataatcggctgagcttcactgactgttccggttatgtaacccgctatgaccatgaccgttttggtcaggtgacggcggtgcaccgcgaggaagggctgagtcagtaccgcgcatacgacagccgtggacagttaattgccgtgaaagacacgcagggccatgaaacgcggtatgaatacaacgccgccggtgacctgaccaccgtcattgccccggacggcagcagaaacgggacacagtacgatgcgtggggaaaagccatctgtaccacgcagggcggtctgacgcgcagtatggaatacgatgctgccggacgggtcatccgcctgaccagtgaaaacggcagccacaccaccttccgttacgatgtactcgaccggctgatacaggaaaccggctttgacggccgcacacagcgttatcaccacgacctgaccggcaaacttatccgcagcgaggatgaggggctggtcacccactggcactatgacgaagcagaccgcctcacgcaccgcaccgtgaatggcgaaaccgcagagcggtggcagtatgacgaacgcggctggctgacagacatcagccatatcagcgaaaggcaccgggtgacggtgcactatggttatgacagtaaaggccgcctcgccagtgaacacctgacggtgcatcatccgcagacgaatgaactgctctggcagcatgagaccagacttgcgtacaaacgcacaggactggcgaaccgctgtataccggacacctgcccgcctgtgaatgcttacctaggcacggcttgctgtcagcatgaaatctgtgacacaccgtggttgagttaccgcgaccctttcaccgggaaatcttggctttccggccgttatgaattacacaagcgtatttacggcatcaccgctaaagagcgtaaagatgttgatgtctggcatccggatgtacgtttcttcgaactgtatgacgaaaataacgaactgcgcggtagcttctacctcgatctgtatgcccgtgaaaacaagcgcggcggggcgtggatggatgactgcgtaggccagatgcgtaaagctgatggttctttgcaaaaaccggtcgcgtatttgacttgtaacttcaaccgcccggtaaatggtaaaccggcgctgttcactcacgacgaagtgatcaccctcttccacgagttcggtcacggcctgcaccatatgctgacccgcatcgaaaccgctggtgtttccggtatcagcggtgtgccgtgggatgcggtcgaactgccgagtcagtttatggaaaactggtgctgggagccggaggcgctggcgtttatctctggtcactatgaaaccggcgaaccgctgccgaaagagttgctggataaaatgctggcggcgaagaactaccaggcggcgctgtttattctgcgtcagctggagttcggcctgtttgatttccgccttcatgccgagttccgcccggatcagggggcaaaaatcctcgaaactctggcagaaatcaagaaactggttgccgtggtgccatctccgtcctggggccgtttcccgcacgctttcagccatattttcgccggtggttatgccgcaggttactacagctacctgtgggctgacgtactggcggcagatgctttctcgcgctttgaggaagagggcattttcaaccgtgaaaccgggcagtcgttcctcgacaacattctgagccgtggcggttcagaagagccgatggatctgttcaaacgcttccgtggtcgtgaaccgcagctggatgtgtccaaaataccttga

SEQ ID NO: 18265 - DNA, 535 bp, Homo sapiens
  SIMILAR (158)..(409): 701254mologous to Escherichia coli YbaU,accession number D82943,Smith-Waterman Score=285.
aacccggacgcttcatcagtttgagaatgcgcgggctggcgtgctgcaacggaatgtccagatacggcaggattttgccttctgccatcagtgggatgacgtcgtccacatgcggataaggcaaagacaaattgatcccaagtctgaaagagagcctgcaaaaattgcgtaccgattattggtgcgtgaggcgactatcgatgttaacgcgctggcggcgaagcagcctgtgaccgaacaggagattgccagctactacgaacaaaacaaaaacaatttcatgacgccggaacaattccgcgtgagttacatcaagctggatgccgcaacgatgcagcaaccggtcaggtggagtaccatttacggcgactccacccggaaaagagttccccgcgccagcagggataaaccggcaacgacgcgccagtgccagcacaatcagcacaataccgctaccttcaacggcccccggattctcgccgagcagccaccaggaaaagagtacgccgcaaacgggaacggccagtgtgcttaa

SEQ ID NO: 18266 - DNA, 886 bp, Homo sapiens
  SIMILAR (1)..(747): 881254mologous to Escherichia coli K12 putative FADA-type transcriptional regulator,accession number AE000402,Smith-Waterman Score=1086.
atgggccttatgaacgcatttgattcgcaaactctagattcttcacctgcaattggtcgcaacttgcgtagccgcccgctggcgcgtaaaaaactctccgaaatggtggaagaagagctggaacagatgatccgccgtcgtgaatttggcgaaggtgaacaattaccgtctgaacgcgaactgatggcgttctttaacgtcgggcgtccttcggtgcgtgaagcgctggcagcgttaaaacgcaaaggtctggtgcaaataaacaacggcgaacgcgctcgcgtctcgcgtccttctgcggacactatcatcggtgagctttccggcatggcgaaagatttcctttctcatcccggtgggattgcccatttcgaacaattacgtctgttctttgaatccagtctggtgcgctatgcggctgaacatgccaccgatgagcaaatcgatttgctggcaaaagcactggaaatcaacagtcagtcgctggataacaacgcggcattcattcgttcagacgttgatttccaccgcgtgctggcggagatccccggtaacccaatcttcatggcgatccacgtttgcctgctcgactggcttattgtcgcacgccccaccgttaccgatcaggcactgcacgaacataacaaacgtttggtattaacaacatatttgcgatcggtgatgcgatcccgccgtcatgattctgacgaaacccgatcgcatagtgctgtgtttaacggtgcttggatttaccctttttggtcggagactccctgtgtgaggttaccgtggaagaacccaattttgaagttaaaggctgttctcgctttccaacccaaagatgtacccctttgccgggaaggaatccctaaaggcctacctaaag

SEQ ID NO: 18267 - DNA, 1527 bp, Homo sapiens; identical to SEQ ID NO: 16051
  SIMILAR (1)..(474): 1001254mologous to Escherichia coli ORF_f413,accession number U28377,Smith-Waterman Score=830.

SEQ ID NO: 18268 - DNA, 1008 bp, Homo sapiens
  SIMILAR (532)..(987): 961254mologous to Escherichia coli Hypothetical 51.7 kd protein in dnaJ-rpsU interegenic region,accession number D90721,Smith-Waterman Score=760.
atgaaaatcaagcatgagcacatcgaatcagtgttgtttgccctagcagccgaaaaagggcaggcatgggtagccaatgcaattactgaagaatatctgcgccaggggggcggcgaattgcccctggttccaggcaaggactggaacaatcagcagaatatctatcaccgttggttgaaaggtgaaacgaaaacgcaaagagaaaaaattcagaagctgatcccagcaattctggcaatccttccgcgcgagctgcgtcaccgactctgcatcttcgatattatgaacgcatttgattcgcaaaccgaagattcttcacctgcaattggtcgcaacttgcgtagccgcccgctggcgcgtaaaaaactctccgaaatggtggaagaagagctggattcaaagaacagactgaccagagataaacgccagcgcctccggctcccagcaccagttttccataaactgactcggcagttcgaccgcatcccacggcacaccgctgataccggaaaccaggcaacaaacgtcgacatcagcaaaatatgcagacacataatgttctgcattattccgtctatgcgcggcgacctggtgagccgtccgattggcgaagtgttaagtgaagcgaaacgtctggtagatgcgggcgttaaagagattctggtgatctcgcaggatacttccgcctatggcgttgatgttaaacatcgtactggcttccacaacggcgagccggtaaaaaccagcatggtcagcctgtgcgaacagttatcgaaactggggatctggacacgtctgcactacgtttacccttatccgcatgtggacgacgtcatcccactgatggcagaaggcaaaatcctgccgtatctggacattccgttgcagcacgccagcccgcgcattctcaaactgatgaagcgtccgggttctgtagatcgccaactggcgcgcatcaaacagtggcgcgaaatctgcccggaactgctgtgggttatggccgcttaa

SEQ ID NO: 18269 - DNA, 747 bp, Homo sapiens
  SIMILAR (298)..(744): 721254mologous to Homo sapiens associated microfibrillar protein,accession number U04209,Smith-Waterman Score=529.
atgggtgtcttactgctcaggctcaacgacgctgccctgcgggcgctgcaagagtgtcagcggcaacagggaccttgggcctcagccggcgaccctggagaaggtgcaggggagagggagcggcttccgcaagctctggcctccccacctctccaagtgaagcccgctaggcaggtgatcccgggctccggacgccggatcctggggacactgcttcacctgcgctcaacggtcacatcttcgctctccccgcaggtacggccggtgattgctttccaaggccaccgaggggaaggaaaaatagtggaacctgaagtggtaggagagagtgactcagaagtagaaggagatgcttggcgcatggaacgagaagacagcagtgaagaagaggaggaggaaattgatgatgaggaaatagagcggcggcgtggcatgatgcgtcagcgagcacaggagagaaaaaatgaagagatggaagtcatggaagtggaagatgagggtcgttctggagaggagtcagaatcagagtctgagtatgaagagtacacagacagtgaagatgagatggagcctcgccttaagccagtcttcattcgaaacagtacccaagttacagagaagaaaagcgtcgctggtggccgtgaattaagtgattttattagctatctacaaagagaagctacaaacccccctgtaattcaagaagaaaaacccaagaagaagaagaaggcacaggaggatctctaa

SEQ ID NO: 18270 - DNA, 576 bp, Homo sapiens
  SIMILAR (96)..(575): 961254mologous to Homo sapiens RNA polymerase II elongation factor ELL3,accession number AF276512,Smith-Waterman Score=819.
tttcgtgggtgtgccaaccaaaccctgaacagaggaggtggcggaggtggccctcgcctgtggcccccgtgctgcttgcactcgaactcgtcgccatggaggagctccaggagcctctgagaggagagctccggctctgcttcacgcaagctgcccggactagcctcttactgctcaggctcaacgacgctgccctgcgggcgctgcaagagtgtcagcggcaacaggtacggccggtgattgctttccaaggccaccgagggtatctgagactcccaggccctgggtgggcctgcctcttctccttcatagtgccccaacgttgtcaggagggcgctggtggtagcttggaccttgtgtgccaacgcttcctcaggtctgggcctaacagcctccactgcctgggctcactcagggagcgcctcattatttgggcagccatggattctatcccagccccatcatcagttcagggacacaacctgactgaagatgccagacatcctgagagttggcagaacacaggaggctattctgaaggagatgcagtatcacagccacagatggcactagagg

SEQ ID NO: 18271 - DNA, 1578 bp, Homo sapiens
  SIMILAR (634)..(1095): 901254mologous to Homo sapiens Clone HHFEK40 of TM4SF superfamily,accession number W61624,Smith-Waterman Score=704.
atggtcttctgcccctctgtgctgccaggatctgctgggagacagggtcacagtcgagggggatatgcatttggtctgcacagtgccgtggcagagctgttgcaaagctcagaagagaaaatggtaaatacatgttcgtttgctcaacggatgtctgtgactgcccagaacagagaactgggaaatgacagggtcgggggagcagccgtcctggctgtgggcatctggaccctggtggagaagagtggctacctcagcgtcctggcctccagcacctttgccgcctccgcctacatcctcatctttgcgggcgtacttgtcatggtgaccggcttcctgggcttcggtgccatcctctgggagcggaagggctgcctctccacgaccacaggggatcgattttggaaggaccggcagccctggacctgcaggggcagaccagtcacagaaaccagagtggagctggaggtcagtgggataggttcaggtcacaccaagggcacagggaccatgaaggcagaaccagtaactggggcagtggcttcccccgagaagtggcgtgacactgccagctatccaggagtatcctacgggcctgactcacagctcacagtggtggtggagagaaggaagtatttctgcctgttgctcgtcatcttcctggttgagctggtggcgggagtcctggcccatgtgtattaccagaggctgagtgatgaactgaagcagcacttgaaccggactctggctgagaactacgggcagcccggagccacgcagatcaccgcctcagtggaccgactccagcaggatttcaagtgctgtggaagcaacagctcagccgactggcagcacagcacgtacatcctgttgcgggaggccgagggccgccaggtgcccgacagctgctgcaagacagtggtggtgcgctgcggccagcgggcccacccctccaacatctataaggtggagggaggctgcctcaccaagctggagcagttcctggccgaccacctgctgcttatgggggcagtgggcatcggggtggcctgcctgcagggcaggccttctgtcctgtgtgctgaaccccagaggagtagtcagtgggaacaggagaagtcatggaacagcacaccagaggcagtttcagacctggacaggatcatcacagtgctgaggcagtgctgttactggcttacaactgctgcctacacagccccaacagccaacaagagccttgtcagccaggcaggcagcatgatgccattgctgaagctgtgcctttggtggctgctggctggcctgccagctgccactacttcccagcaagtgctgatgcctcatgtcagccccaaagaccaagttgtcattgctgcctctgggctcctgtctgcagatgccaggactggcaggacccctgtgtcctctccacgcattctgagcgaaggctggtccaggatgaggagacacagcaacgtccctgtcaccacagttattgagtgcttgccccgtgccttcaacaagccagggaaacagacacataaccagatgatgcgagtgcgatgcgtgtttcgatag

SEQ ID NO: 18272 - DNA, 534 bp, Homo sapiens
  SIMILAR (96)..(188): 381254mologous to Human papillomavirus type 80 putative,accession number Y15176,Smith-Waterman Score=67.
atgatgccattgctgaagctgtgcctttggtggctgctggctggcctgccagctgccactacttcccagcaagtgctgatgcctcatgtcagccccaaagaccaagttgtcattgctgcctctgggtccaggatgaggagacacagcaacgtccctgtcaccatagttattgagtgcttgccccgtgccttcaacaagccagggaaacagacacataaccagatgatgcgagtgcgatgcgtgtttcgaaaggcaccgcggagggcagccagttcagcagcaatggatccaaaccaagaagaaatccctgatttacctgaaaaagaattcaggaagttagttattaagctaatcaaggagagaccagagaaaggcgaaggccaattctgtaaaatcagatggaccatcaatcggaaaatgagagctgcccagtctggccttacattctttcaattaatacataaacacaaagacctaaaagcaaagagtgtcaccctccagatgtcccttggctacaccgtggccctgggttaa

SEQ ID NO: 18273 - DNA, 1901 bp, Homo sapiens
  SIMILAR (720)..(1898): 961254mologous to Escherichia coli K12 phosphopentomutase,accession number AE000508,Smith-Waterman Score= 2057.
gcgtgaggtcgcctctagaggatcgcatgccgtattcaatggctgggataaacattggctattgactgaatcaatgtattgcaatgtttatattttaattatttatagtttaaggacaaataatgagtaagtttgttaaaacagctattgctgcggcaatggtgatgggcgcgttcacctctacggcaacaatcgctgcgggtaacaacggtactgcacgtttttacggcaccattgaagactcagtgtgttctatcgttccggacgatcacaaactggaagttgatatgggtgatatcggtgccgaaaaactgaaaaataacggcaccaccacgccgaaaaatttccagattcgcctgcaagattgcgtatttgatactcaggaaacaatgaccactacctttactggtaccgtttcttctgcaaatagcggcaattattacaccattttcaataccgataccggtgcggcatttaacaatgttagcctggcgatcggtgactctctgggtacctcttacaaaagcggcatgggtattgaccagaaaatcgcgacagatactgccactaataaaggcaaagcgaacgagaatgtgaactttaaagcctggatggtcggcgcactgactgcgccagatctgggtaatttcgcagcaaataccacctgccagattacttacctccgccgggtatgtttgagcctgcgcctcggagaacatatgaaacgtgcatttattatggtgctggactcattcggcatcggcgctacagaagatgcagaacgctttggtgacgtcggggctgacaccctgggtcatatcgcagaagcttgtgccaaaggcgaagctgataacggtcgtaaaggcccgctcaatctgccaaatctgacccgtctggggctggcgaaagcacacgaaggttctaccggtttcattccggcgggaatggacggcaacgctgaagttatcggcgcgtacgcatgggcgcacgaaatgtcatccggtaaagataccccgtctggtcactgggaaattgccggtgtcccggttctgtttgagtggggatatttctccgatcacgaaaacagcttcccgcaagagctgctggataaactggtcgaacgcgctaatctgccgggttacctcggtaactgccactcttccggtacggtcattctggatcaactgggcgaagagcacatgaaaaccggcaagccgattttctatacctccgctgactccgtgttccagattgcctgccatgaagaaactttcgagctgaccaacggcggctacaatatcggtcgtgttatcgctcgtccgtttatcggcgacaaagccggtaacttccagcgtaccggtaaccgtcacgacctggctgttgagccgccagcaccgaccgtgctgcagaaactggttgatgaaaaacacggccaggtggtttctgtcggtaaaattgcggacatctacgccaactgcggtatcaccaaaaaagtgaaagcgactggcctggacgcgctgtatgacgccaccatcaaagagatgaaagaagcgggtgataacaccatcgtcttcaccaacttcgttgacttcgactcttcctggggccaccgtcgcgacgtcgccggttatgccgcgggtctggaactgttcgaccgccgtctgccggagctgatgtctctgctgcgcgatgacgacatcctgatcctcaccgctgaccacggttgcgatccgacctggaccggtactgaccacacgcgtgaacacattccggtactggtatatggcccgaaagtaaaaccgggctcactgggtcatcgtgaaaccttcgcggatatcggccagactctggcaaaatattttggtacttctgatatggaatatggcaaagccatgttctga

SEQ ID NO: 18274 - DNA, 924 bp, Homo sapiens
  SIMILAR (1)..(306): 1001254mologous to Escherichia coli FIMBRIA A PROTEIN PRECURSOR,accession number D90864,Smith-Waterman Score=534.
atggtgatgggcgcgttcacctctacggcaacaatcgctgcgggtaacaacggtactgcacgtttttacggcaccattgaagactcagtgtgttctatcgttccggacgatcacaaactggaagttgatatgggtgatatcggtgccgaaaaactgaaaaataacggcaccaccacgccgaaaaatttccagattcgcctgcaagattgcgtatttgatactcaggaaacaatgaccactacctttactggtaccgtttcttctgcaaatagcggcaattattacaccattttcaataccgataccgacggccccaccatcacgctgaaccagcggttacgcacggaatcttcatgccagcggcaagaagttccgcaatatggcacgctgctggaactggtagctgatgtgaatctggctgtgctggaaaacaatcctcaactgcacgaaaaaatggtaaatgcagacgagctggcgcgactgaatgttgaacgtcatggggcgattcgcgttgggactgcacaagagcttgctactcttcggcggatgtttgccattatggggatgtacccggtgagctattacgatctctcgcaggcaggggtgccggtacattcgacagcatttcggcccattgatgatgcttctctggcgcgtaatcccttccgcgtttttacctccttactccgccttgagcttatcgagaacgaaattttgcgccagaaagcggcggagattctgcgtcagcgcgatatcttcaccccacgttgtcgacaactgttagaggaatatgagcagcagggcggttttaacgaaacacaggcacaggagtttgtgcaggaagccctggaaacgtttcgctggcaccagtcagcaacggtagatgaagaaacctatcgcgcattgcacaacgaaccgaggtaa

SEQ ID NO: 18275 - DNA, 2118 bp, Homo sapiens
  SIMILAR (220)..(825): 921254mologous to Salmonella typhimurium putative chaperonin,accession number AF093749,Smith-Waterman Score=951.
atggcaacactaaccaccacccaaacgtcaccgtcgctgcttggcggcgtggtgattatcggcggcaccattattggcgcagggatgttttctctgccagtggtcatgtccggggcgtggtttttctggtcaatggcggcgctgatctttacctggttctgtatgctgcattccggggggatctctagagtcgactgcaggatgctagctctatggggtctattgagcgtcggtatcgatatcggcaccaccaccacccaggtgattttctcccggctggagctggttaaccgtgcggcggtgtcgcaggtgccgcgctacgaattcattaaacgcgaaattagctggcaaagtccggtgttctttacccctgtcgataaacagggcggtttaaaagaagcggaactgaaaaccttaatactcgagcaatatcatgctgcgggtattgagccggaaagcgttgattctggtgccatcatcatcaccggtgaaagcgcgaaaacccgcaatgctcgcccggcggtgatggcgctctctcagtcgctgggcgattttgtcgttgccagcgccgggccgcacctcgaatccgtgatcgccggtcacggagccggggcacaaaccctttctgaacaacggctgtgtcgggtactgaatatcgacatcggcggtggcaccgcgaactacgccctgttcgatgccggaaaaatcagcggcactgcctgcctcaacgtcggtggtcgcctgctggaaaccgacagccacgggcgcgtggtttacgctcataaaccggggcagatgattgtggatgagtgcttcggtgcagggggtaccgagctaaacccgggatacgaccagcagtgtagagtcgcggtgtgttggccgtactggaatttacgaacgatcggattaagcaatgtaatatcctttctctttcttagacagtaccttacggcactggtgttaatacccgatcttctgcgcatcctcgcgactaatgacaaccctaacccagctctatgtagtcgagcagtttacgacgctgagaaaccatgcgcagcagaccacgacggctgtggtgttgcccatacctatatggcagcagaggcgctggaaagtgccgcgaaagcgaaaggctgggaagtgaaagtagaaacccaggggtcaattggtctggaaaatgaactgactgcggaagatgtggcgagcgctgatatggtgattctgaccaaagatatcggcatcaagtttgaagagcgttttgctggcaagaccatcgtgcgcgtcaacatcagcgatgcagagttcctcatcacgaatcgtatctctcgcctccccactgcactgttccccaatacccgtgaaatctcgctggagcgggcgctgctttataccgccagccatcggcaaacccaaggcgaaccgtccattactccggcaaacacctcagagcagtgcgatggttattcagagagtcgacctgcacgactgcagtcagccctggtaaaaatttatcgccggttgatttttttgataaacctccagcatcaggtggggatggcgctgctgcacatactgcatcagcgccttaccaataccgcgcctgacggccttcggtgcgacaaacatcgctgccagaaatcggccttccataatgctgacaaaaccgagaagcttaccgtcttcttcccagacccagttttgcgcgttggcaagataggcatcccgcaccagcggaatgcagtcacgccagtaattcgcttttataaagggatgcccccagccacagttcgaggatcgcggggagttctgaacgttgcgcttcccgaatcatggtttatttcccggatagcaacagcagccaaccacatgatcattcaccagcccacatgcctgcataaaggagtaacagattgtggtgccgacaaacttaaaaccacgttttttcagtgccttagatacggcgtcggaggcgcacgtagacgtgggaatttcgcccaacgttgtggcttgtgtcacctgtggctgatgatttacaaacgaccagacaaagtcgacaaacggttcgccgttctgttccatttgcaggtttcaatgcctgcatacagtgaacaattatga

SEQ ID NO: 18276 - DNA, 457 bp, Homo sapiens
  SIMILAR (3)..(227): 1001254mologous to Escherichia coli ribosomal protein L11 methyltransferase; PrmA,accession number S67010,Smith-Waterman Score=376.
agccagaagaaatgaaagccgacgtggtggtcgctaacatccttgcaggcccattacgtgaactggcaccgttaatcagcgtcctgccggtttcaggcggtttgctgggcctttccggtattctggcaagccaggcagagagcgtttgtgaagcttatgccgatagcttcgcactggacccggtcgtggaaaaagaagagtggtgccgtattaccggtcgtaagaattaaccttcgcatcgccgtagggtgacgcggggcgaagtgcgagcaagctcacaaaaggcacgtaaatttgccgattatttacgcaaatttgcgtgccaaaattttcattcataaagaaaaattgagaacttactcaaatttctttgagtgtaaattttagtcactattttctaatatgatgatttttatgagtaattatcgcaccacgctcattttaaatgcaattcttt

SEQ ID NO: 18277 - DNA, 1657 bp, Homo sapiens
  SIMILAR (1010)..(1651): 951254mologous to Escherichia coli similar to arylsulfatases,accession number L10328,Smith-Waterman Score=1133.
atggcaacactaaccaccacccaaacgtcaccgtcgctgcttggcggcgtggtgattatcggcggcaccattattggcgcagggatgttttctctgccagtggtcatgtccggggcgtggtttttctggtcaatggcggcgctgatctttacctggttctgtatgctgcattccggcttgatgattctggaagctaacctgaattacagaatcggttcgagttttgacaccatcaccaaagatttgctgggcaaaggctggaacgtggtcaacggcatttccattgcctttgtgctctatatcctgacctatgcctatatttctgccagtggttcgattctgcatcacaccttcgcagagatgtcactaaacgtcccggcacgggcggcgggttttggttttgcattgctggtagcgtttgtggtgtggttgagcagtaaagccgtcagtcggtaccgagagctcgacagcctcgatttaaccgcaaaagccattggtattgatatcgatccgcaggcgattcaggccagccgcgataacgcccgaacgtaatggcgtttctgaccgtctggaactctacttaccgaaagatcagccagaagaaatgaaagccgacgtggtggtcgctaacatccttgcaggcccattacgtgaactggcaccgttaatcagcgtcctgccggtttcaggcggtttgctgggcctttccggtattctggcaagccaggcagagagcgtttgtgaagcttatgccgatagcttcgcactggacccggtcgtggaaaaagaagagtggtgccgtattaccggtcatgcgtttgcggtggacatgaaaccgtggaaaaacgtcaagatcgcgtcaattggcatcctgttcgcgatgattggcgtctatgccgggctggctgaattcggcggctacggtacgcgctggttagcgatgatcagttatttcattgccgccgtagtgattgtctacctgatttttgacagctggcggcatcgtcacgacccagccgccaccaatatggtcggttgctatagcggtaaaccgctgaatacgcaaaatattgatagtctggcggcggaaggtattcgctttaattccgcctacacctgttcaccggtttgtacgcctgcacgggccggactatttaccggtatctacgctaaccagtccggcccgtggaccaacaacgtcgcgccaggcaaaaacatctccactatggggcgctactttaaggatgccggctatcacacctgttacatcggcaaatggcatctcgacggtcatgactatttcggcactggcgagtgtccgccggagtgggacgctgattactggttcgatggggcgaactatcttagcgaactgacggaaaaagagattagcctgtgggcgccaagtcctatacaaagtgtaaaatatttacaggcgaaccatatcgacgaaaccttcacctgggcgcatcgtatcagcaatcgggcggtggattttctgcaacagcctgcgcgcgcagacgagcctttcctgatggtggtttcgtatgatgagccgcatcacccgttcacctgtccggtggagtatttagagaaatacgctgatttttactacgagctgggcgagaaagcacaggatgacctggctaacatttga

SEQ ID NO: 18278 - DNA, 969 bp, Homo sapiens
  SIMILAR (634)..(936): 971254mologous to Escherichia coli Thiosulfate reductase electron transport protein PhsB,accession number D90810,Smith- Waterman Score=554.
atggagaatgcctgtgtcctgttgatgggggttctgagcacttttctggtcagctggctgggaaaagatgcgatggccggcgtgggattggcggacaacttcaatatggtcattatggctttttttgctgctatcgatcttggtactactgtccctggggcatttagtctctgtaagcgggatcgacgacaagcgagggtggcgacgcggcagtcattggtgatcatgacgtttttgcccgtactgttggcaccgcttattcatcattttggcgaacaaattattgatttcgtcgcgggtgatgccacgacagaagttaaagccctggcgttgacttatctggagctgacggtactcagttatccagcagctgccatcactcttattggtagcggggcacttcgtggtgcagggaatacgaaaatcccgctattgattaacggtcaagtcgccatgctgatgcaagcgccatattacttccaggaagcgcagattgaagccgcgatcgccgcgatggatgttgcacctgaatatgccgatatacggcaggtggagtcatcgacggcggtgttgtacttgtttagcgagcgatttatgacctatggcaaggcttatggcttatgcgaatggttcgagggaagccgtttatcgatagcacacattccagtcaccgataacgacaacgaaacgcagtatcacttttttcgccagtcatgtcagcactgcgaagatgctccgtgcatcgacgtttgcccgacgggggcgtcgtggcgtgatgagcaggggatcgtgcgggtagaaaaatcgcagtgcatcggctgcagttattgcattggcgcttgtccgtaccaggttcgctaccttaaccctgtcactaaagtggcagataaatgtgatttctgcgctgagtcccgactggcaaaagctttccgcccatttgcgtcagcgcctgcccggaacacgcattga

SEQ ID NO: 18279 - DNA, 9231 bp, Homo sapiens; identical to SEQ ID NO: 7029
  SIMILAR (3757)..(4635): 971254mologous to Escherichia coli Aldehyde dehydrogenase, mitochondrial 3 precursor (EC 1.2.1.3),accession number D90776,Smith-Waterman Score=1462.

SEQ ID NO: 18280 - DNA, 1431 bp, Homo sapiens
atgatagcagaccccacgttagctgaaatgggaaaaaacttgaaggaggcagtgaagatgctggaggacagtcagagtggacaagatatggtgagcatcctccagttagttcagaatctgatgcatggagatgaagatgaggagccccagagccccagagaggcgctggcagaaggactgaagactttgatgtatgatctgaaggttccccgctgggacttccagaccggtaggcagttacgcacctctcctctctacgaccggctggatgcacagggagccaggtggatggagaaacatggatttgagaggccaaagtactttgttccccccgacaaggacctcctggcattggagcagagcaagactttctataagccagattggtttgacatcgtggagtctgaagtcaagtgcttttcactgaatgataaaggggatatcaccaccgatcccacagaaatacaaactaccgtcacagaatactataaacacctctatgcaaataaactagaaaatctagaagaaatggataaattcctcgacacatacaccctcccaagactaaaccagaaagaagttgaatctctgaatagaccaataacaggctctgaaattgtggcaataattaagagcttaccaaccaaaaaaaatccgggaccagatggattcacagccgaattctaccagaggtgctgccatggccacgactgttgttacactggagctgaggaggccggctgcagccccaagacagagcgctactcctggcagtgcgtcaatcagagcgtcctgtgcgaagtcttgaagtatgacaagggtgaagccgggctaaagcgggtggtaaaaaaggaacacgcggacggcagcgtcacgcagagtcagtttgacgccgtgggcaggctcagggcacagacggatgccgcaggcaggacaacagagtacagcccggatgtggtgacgggcctcatcacgcgcataaccacgccggatggcagggcatcggcgttttactataaccaccacaaccagttaacgtcagccaccgggcctgacgggctggaattgcgccgggaatatgatgaattgggccgtctgattcaggaaactgcccctgacggcgatatcacccgctaccgttatgataatccacacagtgacttaccctgcgcaacggaagatgccaccggcagccggaaaaccatgacgtggagccgttacggcttgttcgatggcctgcacaaaatgcgggttatctggcagatcatcaccgaaaacttcacgcagggaaagcagggcggttacgcgttgttcactgctgctgcccgcaacaagttcgcgaattttatcgctaagcggatcgcgaacatcaatggcatttccggcatcatcaacgccgctgacgtaacgcatccagcctgcaacgcctaa

SEQ ID NO: 18281 - DNA, 1530 bp, Homo sapiens
  SIMILAR (781)..(1527): 991254mologous to Escherichia coli IS30 transposase,accession number U70214,Smith-Waterman Score=1304.
atgattgtgttcctccaaaatggaaatagttcccaaaagtcaatacaaggatcccttcagagcgatattactttctggcgcgatattttctttcagtacaatccggagatcatatccgccacggggagtaatagtcacagatatattaatgataatcactatcaccatatcgtcacgcctgaagccatcagtctggcgttggaaaaccacgaattcaaaccgtggatccaaccggttttctgcgcgcagactggcgtactgacgggctgtgaggtgcttgtccgctgggaacatccacaaacgggaattatcccaccggatcagtttattcctctggcggagtcatccggtcttattgtcataatgacccgccaactgatgaaacagactgcggatattctgatgccggtaaaacatttgctgccggacaatttccatattggcatcaacgtctcggcgggttgttttttggcagcgggatttgaaaaagagtgtctgaacctggttaataaattaggtaacgataaaatcaagctggttctcgagctaacggaacgtaaccctattccggtaacgccagaagccagagcgatatttgacagccttcatcagcacaacattacctttgcgctggatgactttggtacgggttatgcgacctatcgttacttgcaggcgttcccggtcgattttattaagatcgataagtcatttgtgcaaatggcgagtgtcgacgaaatctccggtcatattgtggaccatattgtcgaactagcgcctgttctggaaaagctggagatgaaatggtctccagagcaaatatcaggatggttaaggcgaacaaaaccacgtcaaaaaacgctgcgaatatcacctgagacaatttataaaacgctgtactttcgtagccgtgaagcgctacaccacctgaatatacagcatctgcgacggtcgcatagccttcgccatggcaggcgtcatacccgcaaaggcgaaagaggtacgattaacatagtgaacggaacaccaattcacgaacgttcccgaaatatcgataacagacgctctctggggcattgggagggcgatttagtctcaggtacaaaaaactctcatatagccacacttgtagaccgaaaatcacgttatacgatcatcgttagactcaggggcaaagattctgtctcagtaaatcaggctcttaccgacaaattcctgagtttaccgtcagaactcagaaaatcactgacatgggacagaggaatggaactggccagacatctagaatttactgtcagcaccggcgttaaagtttacttctgcgatcctcagagtccttggcagcggggaacaaatgagaataccaatgggctaattcggcagtactttcctaaaaagacatgtcttgcccaatatactcaacatgaactagatctggttgctgctcagctaaacaacagaccgagaaagacactgaagttcaaaacacccaaagagatcatcgcacggggtgttgccttgaccgattga

SEQ ID NO: 18282 - DNA, 2516 bp, Homo sapiens
  SIMILAR (617)..(1369): 921254mologous to Homo sapiens phosphoprotein p53,accession number M13121,Smith-Waterman Score=1241.
gttttgtcccgtaagagagctctgcatgcttcaggcgactctgaggatcccgtatggtgatggtgataatggtggtgatgatgatgatggtgatgatggtggcgatggtgatgatgatggtgatgaagatggtgatgatataatgatgatgagggtgatggtgacgatggtaatggtgatgaggatggtgatgatactgatgataatgatgaaggccaaacgcagcggcggacgacggcgcgttacgcagtcatcgaagcgcctcattcctgctatcactcagctcaactggactcagctgcagctccggtcggaccagagctgcagcagacgcggtatccagatccaatcaaaaaggcagagctggatccccaagatcttcaagaagaagacctgcacgacgttcatagttgactccacagatccgggtggcctcgaccggaccgagcagagagcgctgacccggagcagagcccaggaccgagacgcccacgcatccactgggcacaggcaaacccgtctcaaaaaagaaaaaagcatcaagctgtccaccttcgtgcatttttctgcagccgtgtgtgccgtcatccaccagggtaccggagtattaggccccttccgtctgggcttcttgcattctgggacagccaagtctgtgacttgcacgtactcccctgccctcaacaagatgttttgccaactggccaagacctgccctgtgcagctgtgggttgattccacacccccgcccggcacccgcgtccgcgccatggccatctacaagcagtcacagcacatgacggaggttgtgaggcgctgcccccaccatgagcgctgctcagatagcgatggtctggcccctcctcagcatcttatccgagtggaaggaaatttgcgtgtggagtatttggatgacagaaacacttttcgacatagtgtggtggtgccctatgagccgcctgaggttggctctgactgtaccaccatccactacaactacatgtgtaacagttcctgcatgggcggcatgaaccggaggcccatcctcaccatcatcacactggaagactccagtggtaatctactgggacggaacagctttgaggtgcgtgtttgtgcctgtcctgggagagaccggcgcacagaggaagagaatctccgcaagaaaggggagcctcaccacgagctgcccccagggagcactaagcgagcactgcccaacaacaccagctcctctccccagccaaagaagaaaccactggatggagaatatttcacccttcagatccgtgggcgctgggaaggagccaggggggagcagggctcatccagccacctgaagtccaaaaagggtcagttaggtaccgagctcgattcgcattgctcggacccgcgatggttgcgcaccgtcacacgggccggccggaaatccgttaccgttacgacagcgacgggcgggtgacagaacagctaaacccggcaggcttaagctacacgtatcagtatgagaaagaccgcatcaccatcaccgacagcctggaccgccgtgaagtgctgcacacgcagggcgaagccgggctgaagcgggtggtgaaaaaggaacacagcggacggcagcgtcacgcagagtcagtttgacgccgtgggcaggctcagggcacagacggatgccgcaggcaggacaacagagtacagcccggatgtggtgacgggcctcatcacgcgcataaccacgccggatggcagggcatcggcgttttactataaccaccacaaccagttaacgtcagccaccgggcctgacgggctggaattgcgccgggaatatgatgaattgggccgtctgattcaggaaactgcccctgacggcgatatcacccgctaccgttatgataatccacacagtgacttatccatgcgcaacggaagatgccaccggcagccggaaaaccatgacgtggagccgttacggtcagttgctgagcttcaccgactgttccggttatgtaacccgttatgaccatgaccgcttcgggcagatgacggcggtgcaccgcgaggaagggctgagtcagtaccgcgcatacgacagccgtggacagttaattggcgtgaaagacacgcagggccatgaaacgcggtttgaatacaacatcgccggtgacctggacggcggtattgccccggaaggcggcaaaacgggcgcagtacgatgcgtggggaaggcgtcgtacaacaaggggggtgacgcagatgatagaagtgcggggggaacgcgtgcaagaaaggggcacacttcgtttaggtctgtcggcgatagaacacgtttcgcggcacggttaccccggacggaatctgcggagaatggtccggagctcggtaccactttatcggctgacagcgtccattgcgccagttccacaagagtaccgatttccaccccatcaatcagaggaagtgtactaatcccgcgcccgtcggtacaggttttgcacaatttcaccggtacattctga

SEQ ID NO: 18283 - DNA, 2604 bp, Homo sapiens
  SIMILAR (451)..(1398): 931254mologous to Escherichia coli K12 putative outer membrane receptor for iron transport,accession number AE000242,Smith-Waterman Score=1487.
atggggcaacaaaagcagcgtaatcgacgttgggttctggcctcgcgtccacatggcgcacctgttccggaaaatttccgtcttgaagaagatgatgtcgccacaccgggtgaaggacaggtgttactgcgcacagtttatttgtccctggacccgtatatgcgtggacgtatgagcgatgagccatcttattcaccgcctgttgatattggcggcgtgatggtcggcggtacggtgagccgtgtcgtggagtcgaatcatcctgattatcagtctggcgactgggtgctgggctacagtggatggcaagactatgacatatccagtggtgatgatctggtgaaacttggcgatcatccgcaaaatccatcgtggtcgctgggtgtgctagggatgccaggctttaccgcttatatgggcctactggatatcggtcagcctaaagagggcgaaacgttggtggtagctgcggcgacaggaccagtgggggcgacggtggtttcagaactggataccccagcagcagtaagcgtggtggatggcgaggagatgcgcctggcaacaccgcgcattaacttgtccgaatcactgaccggcgtgcctggtttgcaggtacaaaaccggcagaactatgcgcaagatttacagctgtcgattcgcggatttggctcccgctccacttacggtattcgcggtattcgcctgtatgtggacggtattcccgccaccatgcccgacgggcaagggcaaacatccaacatcgatttaagcagtgtgcaaaatgtggaagtgctgcgtggccccttctctgccctgtatggcaacgcgtctggtggggtaatgaatgtcaccacccagaccggacaacagccaccaaccattgaagccagtagttactacggcagttttggcagctggcgctatgggctgaaagcaacgggcgcaacgggagacggcacacagcctggcgatgtcgattacaccgtctcaaccacgcgttttacgacccacggctatcgtgaccatagtggcgcacagaaaaatttagccaatgccaaactgggcgtacgcattgatgaagccagcaaattaagtctgattttcaatagtgtggatatcaaagcagatgacccaggtgggctaaccaaagcagaatggaaggctaatccacaacaagcgcctcgtgcagaacagtacgacacgcgaaaaaccatcaagcaaactcaggctgggttgcgctatgagcgtagcctgagttcgcgggatgatatgagtgtgatgatgtatgccggagagcgagaaacgacccagtaccagtcaatacccatggcaccacaacttaacttgtcacatgcgggcggcggtatacactttgtcgtttaccccctgaagcgtcacattgttgccctgctttttcgccagatcgataagatggagcagcagtgccagtccccccgtatccacgcgggagacacggctaagatcgatgcagcggtagcaaaacgtcctgatccagctctccggataacgccagcgtgtcacccgtctgcatccagctcagtgactcgctcattattttttctcttccagagtgattttctgttgagaaatcgatttcagttgcgcagtcaggccgtcgatacctttggtacgcagcagcgttccccactcgttttgtttggtggtgatcatactgacgccttcagcaatcatgtcgtaagcctgccaattgcccgtctgggagtttttacgccactggaagtccagacgcaccggcggacggccattcgggtcaataatggtgacgcgaataggcacaatggttttatcgcccagcggctgttctgcgcaatctggatagttgaccgtgatacatcgccagcgcctgaccgtagcctgctcaagactcacgaaagcgcaaagggcgactctggattctgcccactggctaaaggaatgggtaagatgacccatcagagtgaattgcctttagcgaaagtcaggcaatgttacgagccgaagcggcaatggttgcaggagatgcatcactccgttgatccggtacccgacccagaacctgctgaaatcctggctgagttcattcgccagcattctgcggctgggcagctggtggcgcgcgccgtgtttctctcgccaccctatttggttgcagaagaggaactgtcagttttgctggaaagcattaagcagaacggagactacgcggatatcgcttgtttgacgggaagcaaggatgattactattactcaacgcaggccatgagtgaaaactacgcggcgatgtctttgcaagttgtggagcaggacatttgtcgcgccattgcacacgccgttcgttttgagtgccagacgtatcctcgtccttacaaagtcgccatgctgatgcaagcgccatattacttccaggaagcgcagattgaagccgcgatcgccgcgatggatgttgcacctgaatatgccgatatacggcaggtggagtcatcgacggcggtgttgtacttgtttagcgagcgatttatgacctatggcaaggcttatggcttatgcgaatggttcgaggtagagcagtttcagaacccctga

SEQ ID NO: 18284 - DNA, 2643 bp, Homo sapiens
  SIMILAR (1327)..(1863): 971254mologous to Escherichia coli rhsA,accession number U00039,Smith-Waterman Score=920.
atggtgcggatgcacttccgtttataccaaaatgtgtcgcgagaaaatattagtgatgcgatgactggactgtataatcgcaaaattttaacccctgaactggagcagcggttgcagaaactggtgcaatccggttcttcggtgatgtttattgctattgacatggacaagttaaagcaaataaatgacaccctcggtcatcaggagggggatttagcgattacgttattagctcaggcgattaaacagtcgattcgtaaaagtgattatgccatccgactcggtggcgatgaattctgcatcaatctgtcgattcgacgccacaaattgcagcacaactggctgccgcgtgtccactattgctgggtaagatcagattacaacctgtacgccaatactatcaccgtaactaacggcggtgtattggatgtgaacgttgatcagttcgatactgaagctttccgtactgacaaactggaactgaccagcggcaacatcgctgaccataacggtaacgtagtatctggtgtgttcgatatccatagcagcgattacgttctgaacgctgatctggtgaacgaccgtacctgggatacttccaagtctaactacggttacggtattgttgctatgaactctgatggtcacctgactatcaacggtaacggcgacgtagacaacggtactgaactggataacagctctgtagacaatgttgttgctgcaaccggtaactacaaagttcgtatcgacaacgcaactggcgctggcgctatcgctgattacaaagatcaagaaattatctacgtaaacgacgtcaacagcaacgcgaccttctctgctgctaacaaagctgacctgggtgcatacacctatcaggctgaacagcgcgcctcaattcttccatgtggcattgtcggcctagaacttcgatttcgagggtatacgcgtgtccgtattcccgcgtttgtcggagccccacattcatctctgacgaaatgtggcttcccgcgcatgtgtccatactggtccaaagtatgtgaccaccaccccgttggcatccgtgtgaatcttgatcatgttgaccaaacgccaaaattcacggatgttttggaccacgttagcgtggagttgggataccctcgtctgtgcaacatccatcgcggcgatcgcggcttcaatctgcgcttcctggaagtaatatggcgcttgcatcagcatggcgactttgtaaggacgaggatacgtctggcactcaaaacgaacggcgtgtgcaatggcgcgacaaatgtcctgctccacaacttgcaaagacatcgccgccaaccggcaggcttaagctacacgtatcagtatgagaaagaccgcatcaccatcaccgacagcctggaccgccgtgaagtgctgcacacgcagggcgaagccgggctgaagcgggtggtgaaaaaggaacacgcggacggcagcgtcacgcagagtcagtttgacgccgtgggcaggctcagggcacagacggatgccgcaggcaggacaacagagtacagcccggatgtggtgacgggcctcatcacgcgcataaccacgccggatggcagggcatcggcgttttactataaccaccacaaccagttaacgtcagccaccgggcctgacgggctggaattgcgccgggaatatgatgaattgggccgtctgattcaggaaactgcccctgacggcgatatcacccgctaccgttatgataatccacacagtgacttaccctgcgcaacggaagatgccaccggcagccggaaaaccatgacgtggagccgttacggtcagttgctgagcttcaccgactgttccgctgcgctggatcgtgcattgactatgtcgctggcggaacgtatttcccgtcatgcagaaatgctggacgttatcgtgaaaaacgatattaaccactggcaggagtgcttcattagcgacctaaagcagatagttccgcgaagcgcggaaagccagcagcgcgataaagttgctacctttccaaagcttgccgacagaatatgctatagcggtaccgaggcccccagtgggaacatcccggggaattttgggtttcctccacgaaaaggcgccccaagaattgtgaaagtcccccagatgctgcagttcggtacaacggttcatttgtcattgcctggtagcgtatccgagaaagaacgactgctactcaagctgctgatgcagggaatgtctgtaacagaaatatcacagtacagaaatcgcagtgcaaagacaatttcacatcaaaagaaacagctctttgagaaactggggattcagagcgatattactttctggcgcgatattttctttcagtacaatccggagatcatatccggtttacatggtgcgcgggtttatattgatgtcatcaatacaggcacgcccattccgcaagaggaacgcgccatgatcttcgaacccttttttcagggaagccaccagcgaaaaggggcggtgaagggcagcggtctgggattaagcattgccagggattgtattcgccgtatgcaaggggaactgtatctggtcgacgagagcgggcaagacgtttgtttccgcattgaattaccgtcgtcgaaaaacacgaaataa

SEQ ID NO: 18285 - DNA, 552 bp, Homo sapiens
  SIMILAR (133)..(459): 1001254mologous to Escherichia coli 5-aminolevulinate synthase,accession number D10264,Smith-Waterman Score=574.
atgcgtaagtcagttatcgcgattatcatcatcgtgctggtagtgctttacatgtctgtctttgtcgtcaaagaaggtgagcgcggtattacgctgcgttttggtaaggtactgcgtgacgatgacaacaaacagcaagacgtgcgcaatcttaatcagtatcagactcgcggcgcgttcgcttatatttctgaccaacaaaaagtgtacgcccgctttttctggcagcaaaccggccaggatcgctaccgtctgctgctcactaacccattgggcagcacggaactggagctgaatgctcaaccgggtaacgtgcagttagtcgacaataaaggtcagcgttataccgccgatgacgccgaagagatgattggcaaattgaccggaatgccaattccgctcaacagcttgcgccagtggattttaggtttaccgggtgatgcaaccgactacaaactggttcgacgtgtcgttgttgcaatcactttgacatcaattggtattaaacgccgcgcatccagtcgcgtgataaccccctgcttgataacctga

SEQ ID NO: 18286 - DNA, 389 bp, Homo sapiens
  SIMILAR (144)..(389): 891254mologous to Escherichia coli Exoribonuclease II (EC 3.1.13.1) (Ribonuclease II) (RNase II),accession number D90766,Smith-Waterman Score=385.
tgcgcgccaatgaagtccgcccggtactggcatgccgcatgacgctctccgctgatggcaccattgaagataatatcgaattctttgccgccaccatcgaatccaaagcaaagctggtgtatgaccaggtttctgactggctggaaaataccggtgactggcagctggtgtttaaagatcgcccggattaccgctttattctcggtgaaaaaggtgaagtgctggatatcgtcgccgagcctcgtcgcattgccaaccgtatcgtcgaagaagcgatgattgccgctaacatttgtgcggcccgcgtactgcgcgataagctcggttttggcatctataacgtgcatatgggctttgatccggcgaatgccgacgcgctggcagcgttg

SEQ ID NO: 18287 - DNA, 2007 bp, Homo sapiens
  SIMILAR (1378)..(2007): 1001254mologous to Escherichia coli baiF homolog(PIR:F37844),accession number D10483,Smith-Waterman Score= 1121.
atgaacaaatttattaaagttgcactggtaggtgcagtactggctacgttaactgcatgtactggtcatattgaaaaccgtgataagaactgctcttacgactacctgctgcacccggcaatttctatttctaaaatcattggcggttgcggtcctactgcacacgcttccaccaaaccgcgcaagattgacggtctgggcatcaagcatgttcagttaagcggtgaaggctgggatgcggatcgctgctgggcattctggcaaggttacaaagccccgaaaggcacgcgtaaagtggtgtggccggatctggacgatgcccagcgccaggaactggataaccgcctgatgatcatcgactgggtgcgtgacaccatcaacgcaccggcagaagaattgggaccatcgcaactggcacagcgtgctgttgatctgatcagcaacgtcgcgggcgatcgtgtgacttatcggatcaccaaaggcgaagatctgcgtgacaaggttatatggggctgcacacagtcggacgcggttcagaacgttctccggtattgctggcgctggattacaacccaactggcgataaagaagcgccagtgtacgcgtgcctgcatcaaacagactgcgtttatggactcgatgaagtcggacatgggcggcgcggcaacggttaccggggcgctggcatttgccattacgcgcggactgaacaagcgcgtgaagctgttcctctgcttccgcccggtactggcatgccgcatgacgctctccgctgatggcaccattgaagataatatcgaattctttgccgccaccatcgaatccaaagcaaagctggtgtatgaccaggtttctgactggctggaaaataccggtgactggcagcctgaaagtgaagcaattgccgaacaagtccgtttgctagcgcaaatttgccaacgccgcggcgagtggcgtcataaccacgcactggtgtttaaagatcgcccggattaccgctttattctcggtgaaaaaggtgaagtgctggatatcgtcgccgagcctcgtcgcattgccaaccgtatcgtcgaagaagcgatgattgccgctaacatttgtgcggcccgcgtactgcgcgataagctcggttttggcatctataacgtgcatatgggctttgatccggcgaatgccgacgcgctggcagcgttgctgaaaacgcacggtctgcatgtcgatgccgaagaagtgctcacgctggacggtttctgcaaactgcgtcgtgaactggacgcgcaaccaactggtttcctcgacagccgcattcgtcgcttccagtcatttgctgaaattagcactgaacccggtcctcactttggcctcgcctcgtaccctatctggatcgagaacgtcgcctgggccgacaccattcgcgttcaaccgaactacccgcaactctcccgccgcaatttgcacgcgctgtcgttaaatattttcaaagatgaaggccgcgaagcgtttctgaaattaatggaaaccaccgatatcttcatcgaagccagtaaaggtccggcctttgcccgtcgtggcattaccgatgaagtactgtggcagcacaacccgaaactggttatcgctcacctgtccggttttggtcagtacggcaccgaggagtacaccaatcttccggcctataacactatcgcccaggcctttagtggttacctgattcagaacggtgatgttgaccagccaatgcctgccttcccgtataccgccgattacttttctggcctgaccgccaccacggcggcgctggcagcactgcataaagtgcgtgaaaccggtaaaggcgaaagtatcgacatcgccatgtatgaagtgatgctgcgtatgggccagtacttcatgatggattacttcaacggcggcgaaatgtgcccgcgcatgagcaaaggtaaagatccctactacgccggttgcggtctgtataaatgtgccgacggctacatcgtgatggaactg

SEQ ID NO: 18288 - DNA, 2178 bp, Homo sapiens
  SIMILAR (1593)..(2177): 981254mologous to Escherichia coli yehM,accession number U00007,Smith-Waterman Score=1022.
gtcgatagccagaatcgcccgatgtttacaaccggaagtgccgatgtcgaaccctatatgcgcgacattctgcgcgccattgcgcctgtactgaacggtattcccaaccgtattagcctttcaggtcataccgatgatttcccctacgccagcggtgagaaaggatatagcaactgggagctttctgccgatcgggccaatgcatcccgccgcgaactgatggtcggagggttggatagcggcaaagtgttacgtgtcgtcggcatggcggcaacgatgcgcttaagcgatcgcggacctgatgatgccgtcaaccgtcgcatcagcctgctggtactgaacaaacaagccgaacaggccattttgcatgaaaacgccgaaagccagaatgagccagtaagcgccctggaaaaacctgaggttgcaccacaggtcagtgttcccacaatgccatcagccgaaccgaggtgacagcgtgagcatggatataagcgatttttatcagacattttttgatgaagcggacgaactgttggctgacatggagcagcatttgctggttttgcagccggaagtgccagatgccgaacaattgaatgccatctttcgggctgcccactcgatcaaaggaggggcaggaacttttggcttcagcgttttgcaggaaaccacgcatctgatggaaaacctgctcgatgaagccagagaggacatcatgcaagaacagctcgacgcttataaacagtcgcaagagccggatgccgccagcttttattatatctgccaggccttgcgtcaactggcattagaagcgaaaggcgaaacgccatccgcagtgacccgattaagtgtggttgccaaaagtgaaccgcaagatgagcagagtcgcaccgcgtggattgctgaaggcagcaagctggacaaagccgcgaaaattcgcgcattcaccaactatctgcctggcttcaacatccctatgctgcctcgcgagctttctgacgatctctgctcactgcgcgccaatgaagtccgcccggtactggcatgccgcatgacgctctccgctgatggcaccattgaagataatatcgaattctttgccgccaccatcgaatccaaagcaaagctggtgtatgaccaggtttctgactggctggaaaataccggtcgactggcagcctgaaagtgaagcaattgccgaacaagtccgtttgctagcgcaaatttgccaacgccgcggcgagtggcgtcataaccacgcactggtgtttaaagatcgcccggattaccgctttattctcggtgaaaaaggtgaagtgctggataatcgtcgccgagcccttgtcgcattggccaaccgtatcgtcgaagaagcgatgattgccgctaacatttgtgcggcccgcgtactgcgcgataagctcggttttggcatctataacgtgcatatgggcttggatccggcgaatgccgacgcgcctgcagcgatgatgaaacacccagggctgcatgtcgatgccgaacaagtgctcacgctgggacggtttctgcacactgctaagcccgccaccgcctgccgtgaggaaagatgcatgagcgagccgttaattgtcggcatccggcatcatagtccggcctgcgcccggctggtgaaatcgttaatcgaaagccagcggccacgatacgtgttgattgaaggcccggctgattttaatgaccgggtagacgaactgtttttagcccaccagcttccggtagctatttacagttattgccagtatcaggacggtgcagcccccgggcgtggtgcctggacgccatttgctgaattttcgccggagtggcaggcgctacaagccgcacgtcgcattcaggcacaaacttacttcatcgatttgccttgctgggcgcagagtgaagaagaggacgattcgcctgatacgcaagatgaaagccaggccttactgctgcgtgccacccgcatggataacagcgataccctgtgggatcacttggtcaaagatgaaagccagcaaactgcattaccctctgcgctggcgcactattttgcccaactgcggggcgacgccttcggcgatgcgctcaatcgtcagcgcgaagcctttatggcccgctggattggatgggcgatgcagcaaaataatggcgacgtgttag

SEQ ID NO: 18289 - DNA, 672 bp, Homo sapiens
  SIMILAR (205)..(405): 1001254mologous to Escherichia coli ribonuclease II,accession number X67913,Smith-Waterman Score=345.
atgggttgtagtgaaagtgctaccggtggaggacctactgggactgtgaaaggatgcggcgggtacactgaccgtcattctgttgagcgcgctaccgttcaggcgatacaatggctgacccgagcacccgatcgctttagcgccgcccagttcagccctttactcgaacacgaaaaatcatcaacgcagattattaatctgctggacaacccgctgctagcgcagcttaaacagcaactgcattcccagacgccacgcgctgaaggggtggtaaaagccacagaaaaaggctttggcttcctggaagtcgacgcgcaaaaaagttatttcattccgccgccgcagatgaaaaaagtcatgcatggcgaccgaattatcgcggtgatccacagtgaaaaagaacgcccgtgttgtgtgtccgcggaaaatcaggcggggcccccgtgtctccacaacgtcgtcaagtgctgcaacaacagctgtcgcgagggggcggagcgttaccaggtggacttcgtgctggattgtgtcaaccacgtgccacgcgtacacctgtacaagcgtctctacgactactggagatcacacgtccagtgccacgcgtccaattatcataatatcgcctcacacagctgcaccccaagagccgccacagccacggagtacttctga

SEQ ID NO: 18290 - DNA, 1856 bp, Homo sapiens
  SIMILAR (1012)..(1563): 1001254mologous to Escherichia coli K12 putative oxidoreductase,accession number AE000227,Smith-Waterman Score=954.
  misc_feature (1)...(1856): n = a,t,c or g
atgcagccagccttgctgatagttctcaacaaagtgcgacaggaagcccgccgccgtgctcgcgcctgccggatacgccgcgcttccggtattgttcagttcggcaaagttagacggcagctggctgcggtggaactccgccagcggcagacgccagaacggttcgttctcctgcgcggcactcgccagcaagcgaccggccagcgcatcgtcaaaactgaacagcgcgtgataatcattacccagcgcagttttcgccgccccggtgagggtcgccgcatcaatgatcatttccggtttcctgcgcacttgccatcaatcagaccaatcggcaagcaccagacgcccttcggcatcagtggtcatcacttcaacttttttaccgttgcgataggtgatgatatcgcccagcttgaccgcattggcgctaatcagagtgtcctgaagggctttaacaagtttgttgttcagtacgctactgactcgatgacctcgcagggtaaagggctgtcgcagggttctggcgttgcatttgataacgaaaaatttgcctacaatattttttcaacggtcacatgctgcgtatcctcgaccacggatatcaactgggataacgacaacggcaccaagtggtggaccgtcggtattcgcccgatgtacaagtggacgccaatcatgagcaccgtgatggaaatcggctacgacaacgtcgaatcccagcgcaccggcgacaagaacaatcagtacaaaattaccctcgcacaacaatggcaggctggcgacagcatctggtcacgcccggctattcgtgtcttcgcaacctacgccaagtgggatgagaaatggngttacgactacaccggtaacgctgataacaacgcgaacttcggcaaagccgttcctgctgatttcaacggcggcagcttcgggtcgtggcgacagcgacgagtggaccttcggtgcccagatggaaatctggggcttatctcgggcatccggtacgctggttacccgggcctggagatacaaaactacgccgacgcgtcactgtttgctgatgaatcattacgctggcgaagcagctatgaggtggaaaaactacctgaagagcacacaaaaagttcaactgcagaactttgccaactggccgaaatactctctctccaccctatttcactttcccttctcgaaaagttgttaaacagcacacggggcaatacacagccggataatcagcttgcggcgttgttatgcgcgcgtataaatggcagtcctgcttgttttgccacctgtatggattcatcaaatgaatataaaaaaatcagcacccttatgcgcaagggcgaaaatgaaattaaccaatgggctgaccgtcattctgttgagcgcgctaccgttcaggcgatacaatggctgacccgagcacccgatcgctttagcgccgcccagttcagccctttactcgaacacgaaaaatcatcaacgcagattattaatctgctggtatggagcgggctgtgtggctggataaatcgcttaaaaatcgcgttgggtgagacatattaaccttgccgcgtcagacagattcgcgtaaaactgtcagccgctctaatggccaccaaaatagacaattatgtttcaggacaacccgctgctagcgcagcttaaacagcatctgcattcccagacgccacgcgctgaaggggtggtaaaagccacagaaaaaggctttggcttcctggaagtcgacgcgcaaaaaagttatttcattccgccgccgcatatgaaaaaagtcatgcatggcgaccgaattatcgcggtaatccccggtgttcgagttcaatttcttaaaagtt

SEQ ID NO: 18291 - DNA, 668 bp, Homo sapiens
  SIMILAR (263)..(667): 981254mologous to Escherichia coli flagellar motor switch complex component,accession number M26294,Smith-Waterman Score=662.
gcgataacctggtgcgccaggtgcagcattcacagctggagctggtcgccaactttgccgatatctcgctacgcctgtcgcagattttaaaactgaaccccggcgacgtcctgccgatagaaaaacccgatcgcatcatcgcccatgttgacggcgtcccggtgctgaccagtcagtatggcaccctcaacggtcagtatgcgttacggatagaacatttgattaacccgattttaaattctctgaacgaggaacagcccaaatgagtgacatgaataatccggccgatgacaacaacggcgcaatggacgatctgtgggctgaagcgttgagcgaacaaaaatcaaccagcagcaaaagcgctgccgagacggtgttccagcaatttggcggtggtgatgtcagcggaacgttgcaggatatcgacctgattatggatattccggtcaagctgaccgtcgagctgggccgtacgcggatgaccatcaaagagctgttgcgtctgacgcaagggtccgtcgtggcgctggacggtctggcgggcgaaccactggatattctgatcaacggttatttaatgccccagggcgaagtggtggtcgttgccgataaatatggcgtgcggatcaccgatatcattactccgtctgagcgaatgcgccgcctga

SEQ ID NO: 18292 - DNA, 3189 bp, Homo sapiens
  SIMILAR (2197)..(2829): 971254mologous to Escherichia coli K12 putative glycoprotein,accession number AE000239,Smith-Waterman Score=1075.
atgcgtccagcaggccgtagcaataatcaggtgcgtcccgttaccctgactcgtaactatacaaaacatgcagaaggctcggtgctggtcgaatttggcgataccaaagtgttgtgtaccgcctctattgaagaaggcgtgccgcgcttcctgaaaggtcagggccagggctggatcaccgcagagtacggcatgctgccacgttctacccacacccgtaacgctcgtgaagcggcgaaaggtaagcagggtggacgcacaatggaaatccagcgtctgatcgcccgtgctcttcgcgcggcagtagatttgaaagcgctgggtgagttcaccattacgctggactgcgacgtgcttcaggctgatggtggcacgcgtaccgcgtcgattacgggtgcctgcgtggcgctggtagatgcgctacagaagctggtggaaaacggcaagctgaaaacctatccgatgaaaggctccaaaacaagggtatcgaagccttgcaaacataatacttttcatcgcaaaggaaaaagggttgaccaaaagcagtgtcagcaatacgaaaatgaacttacgcatttaccagtgcactccaatggtgagaaacgcgttgttgcgctctccgttacgttgattaatcgccttaaaggtatgttgatactcgacgccgagactgactttgtgcggccaggcgtcgtagtgcgtctcgccggtccagatattccagcggaccccgactccgccaagctgcgcgccctgagtgcctttatcacgatagccgttgtcctgaacgtgagcgtaaggctcaatagtctgtccgttagctaccttctgatgccagctgacgcgataatctgccgtccacgcctgaatatcctggcggatatattgcgccgcatcgagacctcactagcaatttggtaccggctccaaaaatgtccttgtgaaaatccctcttcccctttggcgcggaaaagcactgcctttctacccttaagaatcggcaaagttgtgatcgaaaaattgcgtaatatcgccatcatcgcgcacgtagaccatggtaaaaccaccctggtagacaagctgctccaacaatccggtacgttcgactctcgtgccgaaacccaagagcgcgtgatggactccaacgatttggagaaagagcgtgggattaccatcctcgcgaaaaacaccgctatcaaatggaatgattaccgtatcaacatcgttgataccccggggcacgccgacttcggtggtgaagttgaacgtgtaatgtccatggtagactcagtgctgctggtggttgacgcatttgacggcccgatgccgcaaacgcgcttcgtattcgatctgttcgttaacctcgacgcgaccgacgagcagctggacttcccgatcgtttacgcttctgcgctgaacggtatcgcgggtctggaccccgaagatatggcggaagacactgaccccgctgtccaggcgattgttgaccacgttcctgcgccggacgttgaccttgacggtccgttccagatgcagatttctcagctcgattacaacagctatgttggcgttatcggcattggccgcatcaagcgcggtaaagtgaagccgaaccagcaggtcctatcatcgatgcgaagcaaaccgcaacgcgaaagtcgtgaaattaccaatatcaccacctcgccgaacgacattgtggttaacacgccgttccatgtggagattggcaacctgaccggcgaatttaatatctgcctgccattcagcatgatcgagccgctacgggaattgttggttaacccgccgctggaaaactcgcgtaatgaagatcagaactggcgcgataacctggtgcgccaggtgcagcattcacagctggagctggtcgccaactttgccgatatctcgctacgcctgtcgcagattttaaaactgaaccccggcgacgtcctgccgatagaaaaacccgatcgcatcatcgcccatgttgacggcgtcccggtgctgaccagtcagtatggcaccctcaacggaacagcccaaatgagtgacatgaataatccggccgatgacaacaacggcgcaatggacgatctgtgggctgaagcgttgagcgaacaaaaatcaaccagcagcaaaagcgctgccgagacggtgttccagcaatttggcggtggtgatcggaatgcgacgttacctgacacgctggcgacaatgacgccgcaggcttataccagtattcaatacgacgccgaaaaatcgctctggcataacgttgagaaccgtcaactggacgctcagttcttccatatgggaatgggattccgtcgccgcgttcgtatgttttctgtagatccagcaacacatctggcgcgtgaaattcactttcgcccggagttgttcaaatacaacgatgcaggtgttgatacaaaacaattagaagggcaaagcgatctcggctttgccggttttcgcgtgtttaaagcccccgaactggcgcgccgtgatgtagtatcatttctcggcgcgagttatttccgcgccgttgatgatacatatcaatacggtttgtcggcccgcggcctggcgatcgacacttacaccgacagtaaagaagagttccccgactttaccgccttctggtttgatacggtaaaaccgggggcaactacctttaccgtttatgcgttgctcgatagcgccagcattactggtgcctataagttcactatccattgtgagaaaagtcaggtgattatggatgtggaaaatcacctgtatgcgcgcaaagacattaaacagctggggttatatcgacaaagctctggtcaccgatccgcaccagcgctaccgaaaattacagtgttggttgggcacgactccaacattgcctctctgttaacggcgctggatttcaaaccgtatcagttgcatgaccagaacgaacgcacgccgattggcggcaaaatcgttttccagcgttggcatgacagcaaagccaatcgcgatttgatgaaaattgaatatgtgtatcagagtgcggaacagttacgtaatgccgatgcgttaaccctgcaggcacctgcgcagcgtgtgacgctggaattaagcggttgcccgatagacgctgatggtttctgcccgatggataagtttgatagcgtgttgaatgaagcggtgaaataa

SEQ ID NO: 18293 - DNA, 1283 bp, Homo sapiens
  SIMILAR (867)..(7): 961254mologous to Escherichia coli ketol-acid reductoisomerase,accession number M87049,Smith-Waterman Score=1429.
ttaaccgaagaacccctgctcgcggatttcgcctacatagtgcggcgcggtttcaaacgcggttttgccggcctcttcacgccaggtcaccagtttcttatcatcgttggcccagtccgccatcataccggaagagaattcgccggagatgatgtcgtccatatgtttctggaacaggggtgccatgatctctttcagctgttcagaaagcgcataagcacgcagtttcgccgggttagagagacggtccatcatcagggtgatgccgccctgtttcagtgcttcggtgatggtttcccaaccgaactgaatcagtttttctgcgtatgctgaatcggtaccttcttccaccagcttgtcgaagcacagcagagagccagcctgcaacataccgcacaggatggtttgctcgcccatcaggtcagatttcacttccgcaacgaaggacgattccagcacacccgcacggtgaccaccggttgcagccgcccaggctttggcaatcgccatgccttcgcctttcggatcgttttccgggtgaacggcaatcagcgtcggtacgccgaacccacgtttgtactcttcacgcacttcggtgcctgggcatttcggcgcaaccatcactacggtgatatctttacggatctgctcgcccacttcgacgatgttgaaaccgtgcgagtagcccagcgccgcgccgtctttcatcagtggctgtacggtgcgcactacatcagagtgctgcttgtccggcgtcaggttaatcaccagatccgcctgtgggatcagttcttcgtaagtacccactttaaaaccattttcggtcgctttacgccaggactcgcgcttgtgggcaatcgcttctttctcgcaaagcgccggatatcttgcagttttggaccagaccggcgctttgccttcgcgcagtttgttgagcaccatttcgtcgtccggcgtccagcgggtgccttcaacgacaaaaatcaccagctcaacatcgccaatagagctgctcgccgctttgttcatcaggcggttaatggcgcgtttttcttccatatgcaggcccggtgtatcgacgtagatcgcctgatacgcgccttcagtatggatccccacaatgcggtgacgagttgtctgcgccttgcgggaagtgatggagattttctgccccagcagtttgttcaacaatgtggatttgccaacgttcggacgtccgacgatggcaataaatccgcagtaacttttatcgatgctcattccagctccagttttttcaacgc

SEQ ID NO: 18294 - DNA, 1440 bp, Homo sapiens
  SIMILAR (484)..(1434): 901254mologous to Escherichia coli DnaA protein (gtg start codon),accession number J01602,Smith-Waterman Score=1432.
atgactgggccgagcaaacgcatcctgtgcggtatgttgcaggctggctctctgctgtgcttcgacaagctggtggaagaagataccacaggtttctggcatgacgattttaataacgccacgccgaacgatatttgcgtggcaattcgtagcgaagcggcggatgcggggatcgcgcaggcgattatgcagcagcttgaagaggcgctaaaacaactggcgcaggggtcaggcagcagccaggcgttgacgcagagagtaaagagagtatctgagtgtcggaaaataggctccattccttctggaatatttcgagggtatattactaaacaatctttatgtatagcactgggtggaagccttatgcaggcccagcagcacgctatccataaaagtaccgttcccgaacaacccaggccatttgcaccggtaaacatgatcgccagccaaacatccgaaccagttaaaaaaagatgcgccaccctgccggcattcacgaacgagtatgaagcatggatcaccaagcagatgcaaaaagacaatgcatttttagatcacgcagacgtccgggaaagtacccacgaccaagctaatgatgttgacaagtaccttaataatatcaatggactgctaaccagtttctgcggagcggatgccccacagctgcgttttgaagtcggcaccaaaccggtgacgcaaacgccacaagcggcagtgacgagcaacgtcgcggcccctgcacaggtggcgcaaacgcagccgcaacgtgctgcgccttctacgcgctcaggttgggataacgtcccggccccggcagaaccgacctatcgttctaacgtaaacgtcaaacacacgtttgataacttcgttgaaggtaaatctaaccaactggcgcgcgcggcggctcgccaggtggcggataaccctggcggtgcctataacccgttgttcctttatggcggcacgggtctgggtaaaactcacctgctgcatgcggtgggtaacggcattatggcgcgcaagccgaatgccaaagtggtttatatgcactccgagcgctttgttcaggacatggttaaagccctgcaaaacaacgcgatcgaagagtttaaacgctactaccgttccgtagatgcactgctgatcgacgatattcagttttttgctaataaagaacgatctcaggaagagtttttccacaccttcaacgccctgctggaaggtaatcaacagatcattctcacctcggatcgctatccgaaagagatcaacggcgttgaggatcgtttgaaatcccgcttcggttggggactgactgtggcgatcgaaccgtcagagctggaaacccgtgtggcgatcctgatgaaaaaggccgacgaaaacgacattcgtttgccgggcgaagtggcgttctttatcggcaagcgtctacgatactga

SEQ ID NO: 18295 - DNA, 728 bp, Homo sapiens
  SIMILAR (411)..(713): 981254mologous to Escherichia coli thioredoxin,accession number K02845,Smith-Waterman Score=527.
attttgttccttgaaaaaagcttttgtttctttaactgctttaaagtgctgtttgaaaaaaaatgaaggccaagcgggatgagtgcaccgtgcggtcgggcaatcgcaggatgaaaatgaagataatgaagacgttggcgtaagaaaagtccatcgttttcgcggtaccggtttgcgcctgcccggttacgtcacgacccgccagcgtcagcggaagggccagtgcctgaatgggcgtacagttatgaaacccttttttttcaagggcttctacaaccttcggatgcagggcgaagtcggaaaacttctgttctgttaaatgtgttttgctcatagtgtggtagaatatcagcttactattgctttacgaaagcgtatccggtgaaataaagtcaacctttagttggttaatgttacaccaacaacgaaaccaacacgccaggcttattcctgtggagttatatatgagcgataaaattattcacctgactgacgacagttttgacacggaagtactcaaagcggacggggcgatcctcgtcgatttctgggcagagtggtgcggtccgtgcaaaatgatcgccccgattctggatgaaatcgctgacgaatatcagggcaaactgaccgttgcaaaactgaacatcgatcaaaaccctggcactgcgccgaaatatggcatccgtggtatcccgactctgctgctccacaaaatatgcataggctag

SEQ ID NO: 18296 - DNA, 1043 bp, Homo sapiens
  SIMILAR (391)..(900): 971254mologous to Escherichia coli K12 putative fimbrial protein,accession number AE000322,Smith-Waterman Score=845.
gccaaaatcaaacaaacccaataccctgcaaatcgcgctgcaaacgcgtatcaagttgttctggcgaccaaaggcgctggaaaaggtcagtatgaaaagtccgtggcagcacaaggtgacgctcacccgcagcggtcaggcatttaccgtcaataacccaacgccgtactacgtgattatcagcaacgccagtgcgcagaaaaacggtaatccagctgcagggttctcgcctctggtcattgagccgaaaaccacggtaccgctgaatgtgaaaatggatagcgtaccggtgctgacttacgtcaacgactttggcgcacggatgccgctgttcttccagtgcaatggcaacagctgccaggtggatgaagagcagagccgcaaaggctgatgacggggggagttatgagtcaaaagtttgtagtgggcgcagggctgctggtatgcagtgtctgtagtttttctgatagggctggtagtaaccccgtggatttaattctgcgcgtgttggtcgatgctccgccaccctgttcaatcaagggcagccaggtagagttcggcaatatgattgctgataacgttgatggcaccaattatcggcaagatgcgaaatacacgttgaactgcacaaacagtcttgctaacgacttgcggatgcaacttaagggcaatacctcaacgattaacggcgaaacggtactcagtaccaatatcaccgggctgggcattcggatagaaaatagcgccgataactcattgtttgccgtcggtgaaaatagctggacgccatttaatatcaataaccagccacagttgaaggctgtacctgtgaaggcaagcggggcgcaacttgctgcgggcgagtttaacgccagtttgaccatggtggtggactatcaatgagaaagactttcttaaccctgctttgtgtcagtagcgccatagctcatgctgctgatgaagacatcacctttcacgggacattattgtcaccgccaacctgtagcatcagcggtggtaaaaccattgaagtcgaatttcgc

SEQ ID NO: 18297 - DNA, 2178 bp, Homo sapiens
atggtgcttgatgatgaagaccgtgaaaacgaaggtgatatgatcttcccggcagaaaccatgactgttgagcagatggcgctgaccattcgccacggtagcggtattgtttgcctgtgcattactgaagatcgccgtaaacaactcgatctgccaatgatggtagaaaataacaccagcgcctatggcaccggttttaccgtgaccattgaagcagctgaaggtgtgactaccggtgtttctgccgctgatttcccgccagccaatttggtggtgtcaacgtcgccgggcaatgtcaactttctgcgtccactgattaagttgctggcgatgctgagtaatggctttttccagcgtctggataaactgctgatagttgatccagcggttgctggttatcccggcactcatatcgctgttgaggttattgcgatattcattctgataatcaatcagcattttgagctgttcttccgcctgctgacatccgcgacgcatttcacccagcaggcgcgcggcatcctctacctctttttctgccagatctttcaggccctccagctgcggccacagggcgatggctttatcgagcatcggatcgctgcctttggcatacgcgccgacgctaaccagatcgcggttacgctgaaaactcgacaacagctgtttgaaggtgcgcactcgcgcgtaatgttgctcactgatcgggtaccgagcaagattcgaatcattaagccccttacttgtaggagccaggatcttattcgtaacgaactgaacgaagcggcggaaacgctggctaactttttaaaagatgacgccaatattcacgccattcagcgcgcggcggtcctgttagcagacagctttaaagcgggtggcaaagtgctttcctgcggcaacggcggttcccattgcgacgctatgcactttgccgaagagttgaccggtcgctaccgtgaaaaccgtccgggctacccggcgattgctatttctgacgttagtcatatttcctgcgtcggtaatgatttcggtttcaatgatattttctcccgctacgttgaagcggtaggtcgcgaaggcgatgtactgctggggatctccacctccgatgcgaaatacacgttgaactgcacaaacagtcttgctaacgacttgcggatgcaacttaagggcaatacctcaacgattaacggcgaaacggtactcagtaccaatatcaccgggctgggcattcggatagaaaatagcgccgataactcattcgccatagctcatgctgctgatgaagacatcacctttcacgggacattattgtcaccgccaacctgtagcatcagcggtggtaaaaccattgaagtcgaatttcgcgatctcattatcgacgacatcaacggcaactatggtcgtaaagaggtgccatatgaactcacttgtgactcgacgacccgtcatccagattgggagatgaccctcacctggactggtacacgaaccagttttaatgatgcagcaattgaaactgatgtacccggttttggtatcgagcttcagcacgatggtcagcgttttaaactcaatactccgcttgctatcaacgccactgattttacgcaaaagccgaagctggaggccgtaccgtccggtggttacgtcctgttagcggggctgatattggcaatgagtagcacgttattcgcggcagataataatctgcatttctccggtaatttattaagtaaatcctgtgcgctggtggtggatggccaatatctggcagaggtgcgctttcccacggtcagtcgtcaggatttgaacgttgcaggccagtccgctcgtgtacccgtagtctttaagctgaaagattgcaaagggccggcgggatacaacgtaaaagtcacgctcacgggggtagaagacagcgaacaacccggttttctggcactggatacgtcatcaaccgctcagggagtgggaattggcatggaaaaaaccgacggaatgcagttgccatcaacaatacaaacatccggcaacagatgcctgatgcgacgctaccgcgtcttatcaggcctacaaaatccgaaccgttggacggatcaggcgtttacgctacgtccagcacaagtatttccctgtctgtttgccgacagacgcatatgctctaaccctcattga

SEQ ID NO: 18298 - DNA, 1332 bp, Homo sapiens
  SIMILAR (358)..(690): 971254mologous to Escherichia coli K12 putative fimbrial protein,accession number AE000322,Smith-Waterman Score=555.
atggtggaagagtattccggcgttacgctggacaagagtgaatcgcgcaccgactggctggccagaccgctgaccgaacgtcagtgtgaatacgcagcggcggatgtctggtatctgttaccgatcaccgccagcagcggtcaggcatttaccgtcaataaccctacgccgtactacgtgattatcagcaacgccagtgcgcagaaaaacggtaatccagctgcagggttctcgcctctggtcattgagccgaaaaccacggtaccgctgaatgtgaaaatggatagcgtaccggtgctgacttacgtcaacgactttggcgcacggatgccgctgttcttccagtgcaatggcaacagctgccagggcagccaggtagagttcggcaatatgattgctgataacgttgatggcaccaattatcggcaagatgcgaaatacacgttgaactgcacaaacagtcttgctaacgacttgcggatgcaacttaagggcaatacctcaacgattaacggcgaaacggtactcagtaccaatatcaccgggctgggcattcggatagaaaatagcgccgataactcattgtttgccgtcggtgaaaatagctggacgccatttaatatcaataaccagccacagttgaaggctgtacctgtgaaggcaagcggggcgcaacttgctgcgggcgacgccatagctcatgctgctgatgaagacatcacctttcacgggacattattgtcaccgccaacctgtagcatcagcggtggtaaaaccattgaagtcgaatttcgcgatctcattatcgacgacatcaacggcaactatggtcgtaaagaggtgccatatgaactcacttgtgactcgacgacccgtcatccagattgggagatgaccctcacctggactggtacacaaaccagttttaatgatgcagcaattgaaactgatgtacccggttttggtatcgagcttcagcacgatggtcagcgttttaaactcaatactccgcttgctatcaacgccactgattttacgcaaaagccgaagctggaggcgtaccgtaaatcctgtgcgctggtggtggatggccaatatctggcagaggtgcgctttcccacggtcagtcgtcaggatttgaacgttgcaggccagtccgctcgtgtacccgtagtctttaagctgaaagattgcaaagggccggcgggatacaacgtaaaagtcacgctcacgggggtagaagacagcgaacaacccggttttctggcactggatacgtcatcaaccgctcagggagtgggaattggcatggaaaaaaccgacggaatgcag

SEQ ID NO: 18299 - DNA, 1569 bp, Homo sapiens
  SIMILAR (808)..(1188): 961254mologous to Escherichia coli K12 putative fimbrial protein,accession number AE000322,Smith-Waterman Score=623.
atggctgagggccaggaacaaggaagaggcagtgaggaggaggaggaggggcagagtcaggagagaaatcaatacaagcggacctacattcacgccctgactctagactgtgcctcaatccgctgctattttcagagcaacacagacccgatgtgtatactaaatcttaagcactcgattgcttgcacagcgcaggtagcctctcaaagcactgatcacctcattgcaccccagatgccatcgttcaaagcggcccacgatctccccatggggctgaacccaaccagacaccagaggcctgacgtgtggcagctgaggaggtgggagaaggaaaaaggaagaagaagaaagggtgcagagggaagaaaagaaagcatgagaaatggggagaggaaaagaaaaagggaaagagatcccagtgtcacagctatccgagattttcagattctcaggatgatgagatgcgctacctgtagtgtcactgtggccacacagaagaactcaagcatcggcatacggtgtcgacagacagatgcggagcaggcaaaggaactgtttgacaaccaagtgttggctcccgggtctttagataagtccccgctggatctgcaggtatggtctataaggctatctgtgccgagccccttagtaggccatgaccacttggtgcgggttcgggatagctcagtaatactgggactcagagggttacatcatgctgtaatgattgctacattgcctgagtctgatacaacaatgaaggtcttattaatctcttggtgtaagaacccgtggattaattcgggccttttggtcgatgctccgccacctggttcaatcaaggccagccagttagagttcgccaatatgattgctgataacgttgatggcaccaattatcggcaagatgcgaaatacacgttgaactgcacaaacagtcttgctaacgacttgcggatgcaacttaagggcaatacctcaacgattaacggcgaaacggtactcagtaccaatatcaccgggctgggcattcggatagaaaatagcgccgataactcattgtttgccgtcggtgaaaatagctggacgccatttaatatcaataaccagccacagttgaaggctgtacctgtgaaggcaagcggggcgcaacttgctgcgggcgagtttaacgccagtttgaccatgactttcttaaccctgctttgtgtcagtagcgccatagctcatgctgctgatgaagacatcacctttcacgggacattattgtcaccgccaacctgtagcatcagcggtggtaaaaccattgaagtcgaatttcgcgatctcattatcgacgacatcaacggcaactatggtcgtaaagaggtgccatatgaactcacttgtgactcgacgacccgtcatccagattgggagatgaccctcacctggactggtacacaaaccagttttaatgatgcagcaattgaaactgatgtacccggttttggtatcgagcttcagcacgatggtcagcgttttaaactcaatactccgcttgctatcaacgccactgatttgacttag

SEQ ID NO: 18300 - DNA, 921 bp, Homo sapiens
  SIMILAR (553)..(903): 831254mologous to Escherichia coli alternate gene name yibJ,accession number U00039,Smith-Waterman Score=519.
atgtcccggatagaagcggtatttttcgactgcgacggtacgctggtcgacagtgaagtcatttgctctcgcgcatatgtaacgatgtttcaggaatttggtattacgctcgatcctgaagaggtattcaaacgtttcaaaggtgtaaaactgtacgaaattatcgatattgtttccgttgacatggtgttaccgagacaggagattgcggcccatcccgacctgccacggcaagcccatcgcctgtacaacgacaaaagcgaagaacgcattcaggcccatagcgggtgccaggcaactggcaggttagcaaacagtcccatcataatactgccgaatgcagcgatcagacaggaatttggtattacgctcgatcctgaagaggtattcacgtttcaaggtgtaaaactgtacgaatatcgatattttcctgactgtgtacgtagcagaaacgaggccggcatcttggtggaacaaatcttatccaccctgttttccgtgggggagcatttctccttgaagagagcgcctttctttaaagttcccagtttgcggtcgttttacgcctttgggggtttaacaactggggtcgtgagaaggaatgggaaccacggtgtaaacacgccggcgcgaaaaatccacctgtaccactgcgaccatcgcggcctgccgctggcccttatcagcaaggaagggacaacagaatggtgcgcagaatacgatgaatggggcaacctgctgaatgaagagaacccgcatcagctgcagcagcttatccgcctgccggggcagcagtatgatgaggagtccggcctgtattacaaccgccaccgctattatgacccgctgcaggggcggtatatcactcaggatccgattgggctgaaggcggggatggaatttttatcaagtatccgttga

SEQ ID NO: 18301 - DNA, 2487 bp, Homo sapiens
  SIMILAR (1738)..(2256): 931254mologous to Escherichia coli RhsC protein precursor,accession number D90709,Smith-Waterman Score=921.
atgactgatctgaaagcaagcagcctgcgtgcactgaaattgatggacctgaccaccctgaatgacgacgacaccgacgagaaagtgatcgccctgtgtcatcaggccaaaactccggtcggcaataccgccgctatctgtatctatcctcgctttatcccgattgctcgcaaaactctgaaagagcagggcaccccggaaatccgtatcgctacggtaaccaacttcccacacggtaacgacgacatcgacatcgcgctggcagaaacccgtgcggcaatcgcctacggtgctgatgaagttgacgttgtgttcccgtaccgcgcgctgatggcgggtaacgagcaggttggttttgacctggtgaagcctgtaaagagcatgcgcggcagagtctccatgtactacggtgcgcattcacattatagaattcaggaacccttgggtgccgccagacctaaaggcacatctagtgccttggcagctcccagtacttcgggtcctcgatgtgatcaccccagacatgttatggactccgaggtcctcagatcgggatttaccagcaactccgtgaaattttcggtaactttcgtctccgggttggatcattctattcgaacgtccgaagtgatcatcccgaacaaagcgtttgttaccgagcgtctgatcaactggtcgttgactgacactactacgcgtctggtgatccgtctcggcgtggcctatggctccgatctggaaaaagtgcgtaaagtgttactgaaggcggcgactgagcacccaagggtgatgcacgaaccaatgccggaagtcttctttacggcatttggtgccagcacgttggatcatgagctgcgtctgtatgtgcgtgaactgcgtgaccgtagtcgtactgtcgatgagctgaaccgtactatcgatcagctgtgccgtgaaaacgacatcaacattgcctttaaccagcttgaagtgcatctgcacaacgagaagggcgatgaggtgacggaagtaaaacgcgactacaaaggcgatgacccgacgccagcggtagggggttatatcacagccaatgtaccttttcctgtgcatttcgcgaatagccgatctgcgaatattatcgacagactcatccattacgcttgtccactgtacgtatactcgcagatgaatccgttcaggatggatcatcacccggatgtttcacgtacctatgtcgaatatctggccgataaggttgcggatcgagaagaggatgcagaggaatatctggaagcaatcatggaggctcgtgttaccgttgctggcatggggctggtgatggaggtgcaggattacttcgatggcgaggccgatagactggcgaaggcgtggctggccgagtacacaccgcaaatcaagtcgttgaaagatgagcgtaaagaggcctatcgtcaaatcgtcgaaatgagtaccgaaccgcaggatgtggatctggtcaggccggcgaacaagtttgaaatgagccagggtatacgcccccggcaccggcgatatagttggcccctgcctaattcgcccgtgtgtcctggtgcattgacccgcacgccacatgacgtttgtcgaacagattgtccactccgccgcattgtttccccgtgtggcaatgtcgacgctggaaggaatctggtgaccggtgaggagaaatcgccgtggcggcatcgtcggcctgcggtggccaaatgcaaaccagagggcccgtatacacgcggcgcgaaaattcacctgtaccactgcaccatcgcgcctgccgctgcccttatcagcacggaagggacaacagcgtggtacgcagaatacgatgaatggggtaacctgctgaatgaagagaacccgcatcagctgcagcagcttatccgcctgccggggcagcagtatgatgaggagtccggcctgtattacaaccgccaccgctattatgacccgctgcaggggcgatatatcactcaggatccgattgggctgaaagggggatggaatttttatcagtatccgttgaatccgatctcaaatatagatccattaggattagaaacactaaaatgcattaagccactgcattcaatgggcggaactggtgaaagaagcggtccagatatatgggggaatccgttctatcatcaatatctttgtgtcccagatggtaaaggggactatacttgtggtggccaagaccaacggggagaatcaaaaggagatggtctatgggggccaggtcggataaggcgttcacgccgcatccgacatttgcacaagatgcctgatgcgacgctgtccgcgtcttatcaggcctacgtgcggcatcagacaaatgtcactgctttggttcttcgctccagtcatcgctttcggaaagatcgccactgctggggattcgtttttcttcagcagcccattctccgaggtcgatcagctgacaacgtttggagcaaaatggccgaaacgggctga

SEQ ID NO: 18302 - DNA, 2919 bp, Homo sapiens; identical to SEQ ID NO: 10698
  SIMILAR (1003)..(1521): 991254mologous to Escherichia coli ferrienterochelin receptor protein,accession number M13748,Smith-Waterman Score=924.

SEQ ID NO: 18303 - DNA, 2240 bp, Homo sapiens; identical to SEQ ID NO: 10697
  SIMILAR (886)..(1419): 991254mologous to Escherichia coli RhsB core protein with unique extension,accession number U00039,Smith-Waterman Score=933.

SEQ ID NO: 18304 - DNA, 3416 bp, Homo sapiens
  SIMILAR (2292)..(2813): 831254mologous to Salmonella typhimurium putative chaperonin,accession number AF093749,Smith-Waterman Score=730.
atggaggatttgataaaactacggaaaaatgccgttaccagtgtcaggcttatgcgcaatttgtcgccagtcaccgccgaatgctgtggcgaagggggaatcaaagcctgggattatgtccggatgggttttttaagccgaatgggcgtacttaataactggttgagcgaagaagaaagtctatggatccagtcgcgcattcatctacgcgtgctctacgttattatagtaactggcggcaatactttgccggttataccttatggtcggcaatattggcagtctcccgaagatgatcatctgcctttattacgcgaattcttagcgcgtaaagaatacgagcgattccaggcaaaaaccgatccgcagggttttaaacaacttcgtcaggcgtatgaggaggcgctacggatttgcgcagtcgcctgctaaatctgtttggcaaccagaagaatatgaggtagcagaacatgaaattctgcatcgcctatcgtgcgttacttgcctctgatagtgaacgttttctgccctccgcctggcagcgattcattcagcaattaaattattgctcgatggaggagattgatgaattacgctggtcgctgtgcacaatcgccatgaacactgcccatttatccttcgagtgcgtggtgttatttagccaggaaacggccgagacacaacgcccggatacaatcagctcagtaccagcccttcattatatattgatgacctggtggataccggtggggtacaacaagcgagatccccgtcctaccgttggggtaatctgggccttgaggacttcagaccggttcgtggacctgctgtgggactccttttgtcgtgccgggggcactttttatcccccccacgacgggacaaattctccttcccaaacgattcgcacaagagccacgggtagatttcggtggaacttacacgctggcaattgtgccggcacaacaggcgacacgaacacgagctctcccgcgagaacggtccccacgagttgttcctgtacccccctgttggtcgctgtcgccattttcgggggcgtacaccagtctagtgttccgacacactatgtgggcccgggcgtaattattgcctccgatccttgtaccaaacgggggcactgtaaccgctttgatccctactatgttcagcaaggtgtgtcagcgtgtctgccagctgaagagtatgcagaaatcgctgggatcaactggaagcgggtgacgttaacttcattaaagatttttactaccgtctggcgcatcgtgtggaacgctggaatttgggtgaagagtactggggctacgcgaaaaataaactctggtcgccgtttggctatccggttcaccatgccaatgaagcgtcagcgcaggcgggaattattgctcatcgaaagcaatggctgctcgcatggcggtagtagattgggcgctgtacgaatagaaacacgaacctcatcacttacccccgcgagttgggcgctaaaaaagttgtgcaattgcgatgtgagattgctcgccgtacttaacggactgaacagtatcgcgatgatcgccacgctacgttttattatcagcattttcgcccccagccatttctacaactggctgatggcttctgacgtggtggactacgaggagagccgcagcggtcgccgcctcgacgggctggtgttctccacctacctgttcagcctgaagattggcctggcgattggcggggcggtggtgggctggatcctggcgtacgtcaactattccgccagcagcagcgtgcagccggttgaggtgctcaccaccatcaaaattctgttctgcgtggtgccggtggtgctctacgcgggcatgttcatcatgctgtcgctctacaagctcaccgatgcccgcgtggaggccatcagccggcagctgattaagcaccgcgcggcgcagggctccgccgtcagccttggttctacgaatatgaccattttccatatacaccactcggctggcggttttacgcgccacttcaacttcgtgggtgacgatcacctgggtaatattcgtttctgccagctcacgaatgatgctgacgatttgtgccgtaatttccgggtccagtgcggcggtcggttcatcgaacagcagtacctgcggttccatcatcaacgcacgggcaatagcaacacgctgctgctgaccaccagaaagatgcagcgggtaacgatcgctataaggtttgagacgcagacgttccagcaggttttctgcacgggccagagcatgatctttaatcaacccccagtacacggcaggtcaatcgagctcggcggtttaaaagaagcggaactgaaaaccttaatactcgagcaatatcatgctgcgggtattgagccggaaagcgttgattctggtgccatcatcatcaccggtgaaagcgcgaaaacccgcaatgctcgcccggcggtgatggcgctctctcagtcgctgggcgattttgtcgttgccagcgccgggccgcacctcgaatccgtgatcgccggtcacggagccggggcacaaaccctttctgaacaacggctgtgtcgggtactgaatatcgacatcggcggtggcaccgcgaactacgccctgttcgatgccggaaaaatcagcggcactgcctgcctcaacgtcggtggtcgcctgctggaaaccgacagccacgggcgcgtggtttacgctcataaaccggggcagatgattgtggatgagtgcttcggtgcaggcaccgacgcccgttcgctgaccggcgcgcagctggtgcaggtgttacgcccgaaatcattacgctttctggcggcgtgggcgaatgttatcgccaccaggccggcgaaccgttctgtttgccgatattgggccgctgctggcactgggctggatgacattcgggcctggttaaatgacgtcagctccgagcaaacggtgcccccgcgaattggcgggggcaatcctttagcacggacgacaatggctaaggacacgtcagccaaatgcggggaacccatgtaccgctttggcgcgaggcgctcagtagacaagcacgccagcaatccctttcgaggtcaccatcagcgtcagcaccagaatgatttcctgccagatggacaggtcaatgccatacaactgcgcgatgaagatagcggcaatactttgatacagcgtcgaaccatcaagaattgtattcgtgtgcgtaatattgaaacaaaactcgtcactggaaaagtaggtactcaacacacacaactgcttggtaatacgcttactggaagcactgccgccaaaggcgttggcgtactccttgcaggtttagcaaccagtaacaatccgctaatgacattaaaacctaatgataacgaattcttcccgtctaagtgttaa

SEQ ID NO: 18305 - DNA, 2121 bp, Homo sapiens
  SIMILAR (646)..(1170): 901254mologous to Escherichia coli RhsC protein precursor,accession number D90709,Smith-Waterman Score=864.
  misc_feature (1)...(2121): n = a,t,c or g
atggtcgcagtggtacaggcgaatttttcgcgccggtgtgtataccgggtccatctggctttgcatctgcgccaccgccaggccggacgatgccagccagcggcgggtttcctcactcacccggtcagccaggatttcactttccagccggtcgagcatctgcaccagcaccggcgggaacaccacactgccaccgtcttcgccaccggactgctgaagggtatccgccaggctgcggcgctgcgttttcgccagctcaccggtggcggtttcaaccctgatgagtggcgtgaagctccccggctgataaatcgcctggatgcgggttctgtcgttctgtatcggggacaggcgggcgccgtcccagcccgacatccagcccgtgaggtcccgttcacgccgtcatacccgttttgccaccctgcggaccaacgggtcgtaaagatagcgactttcgaccagcggctctgcatattgggtccgcgtgtagtgcaccaaacggtgctgactgtcgtaatggtacccgtgggtgcgctcatcatccgtgcggataaccccttccgggatgagggtataaacggggttaggtcatataggccgagattgcccttttttcccgacgaattcgagctcggtacccgtcagacggtgcattatccgcagacgaatgaactgctctggcagcatgagaccagacatgcgtacaacgcacagggactggcgaaccgctgtataccggacagcctgcccgccgtggaatggctgacctacggcagcggctggctggcaggcatgaaactcgccgacacaccggtggtggagtacacccgcgaccgcctgtaccgggaaacgctgcgcagcttcggccgctatgaactcaccaccgcttatacccctgccgggcagatacagagccagcacctgaacagtctgctgtctgaccgcgagtacacctggaacgacaacggcgaactcatccgcatcagccgcccgcgccagacccggagttacaggtacagtaccaccggcaggctgaccggcgttcacaccaccgcagggaatatggatatccggatcccgaataccacagacccggcaggtaaccgtctgctcgacccggagctgcacccggacagcgccctcagcatagggccggataaccatatcgcnccttgacgcgcactatctttaccggtatgaccgtcacggcaggctgacaaagaaaaccgacctcatcccggaaggggttatcccgcacggatgatgagcggactcaccggtaccattacgacagtcagcaccggctggtgcactacacgcggacacaatatgaagagccgctggtcgaaagtcgctatctttacgacccgctggggccgcagggtggcaaaacgggtgtggcggcgtgaacgggacctgacgggctggatgtcgctgtcacggaaaccgcaagtgacctggtacggctgggacggcgaccggctgaccacaatacagaacgacagaacccgcatccagacgatttatcagccggggagcttcacgccactcatcagaaggatccccgtattgggcggtggcgatacgacaatggattgtttgcggacttccatccgcctcaatgccgccagcgtgacctgcgcgtatcgtcgtgatcaaatcagtatgccgggctcgcgcaaagaggtggttaatgcgcgcgaggaaggtgtcgagtttcagttcaattttcaaccgcaatatatcgcttgtgacgaagatgggcgtttaactgcggtgggcctgattcgtaccgccatgggtgagccggggccggatggtcgccgtcgtcctcctccggtagcgggttcagagtttgaattgcccgccgatgttctgattatggcctttggtttccaggcgcatgcaatgccgtggttgcagggcagcggaattaaactcgataaatggggcctgattcaaaccggtgacgtcgggtatttacctacccagacgcatctgaaaaaagtctttgctggtggtgatgcagttcatggcgcggatctggttgtcactgcaatggccgcaggaaggcaggcggcgcgcgatatgttaactctgtttgatacgaaggcatcgtga

SEQ ID NO: 18306 - DNA, 2880 bp, Homo sapiens
  SIMILAR (1529)..(255): 991254mologous to Escherichia coli RhsA protein,accession number D90709,Smith-Waterman Score=2319.
tgctgtgacgcctgctgaaacaggttttcccacatatcggtcaccagcgcctggtcacgcggcgacaattcaccagcaccaatggctttttccagactctggctaacggtcgtatgcaccgcctgagcggagtggtcatcaccactttccagttctgcgatggctaatgtcaggtggccacgcaaatacccactggcaaacaactcatggaacaaccccagtagtacatgatacaatcgagctcggtaccggcaatttgtctgtggcaggtaatcacttgctgtctttgtatccatccctggatactgggaatcatcctgtggcgtacaagtcagatttggttttacccacttcctgcaatacagtgtgtagtcgtaagggcttaatgctctgaagaatgttttgaaaacattaggcgcactactggcctggtcaataggatatggcagtcttaattgtttcgctatgtccggcaatttacttggatcgggcgtaggcggtttgttgggtctcgctccatatccgccattatttaagtgtccatattttgatgccagtcccattgaatctatatactgaaccggattcaacggatactgataaaaattccatccccccttcagcccaatcggatcctgagtgatataccgcccctgcagcgggtcataatagcggtggcggttgtaatacaggccggactcctcatcatactgctgccccggcaggcggataagctgctgcagctgatgcgggttctcttcattcagcaggttgccccattcatcgtattctgcgcaccattctgttgtcccttccttgctgataagggccagcggcaggccgcgatggtcgcagtggtacaggtggatttttcgcgccggcgtgtacaccgggtccatctggttttgcatctgctccaccgtcaggccgcacgatgccagccagcggcggctttcctcactcacccggtcagccaggatttcactttccagccggtcgagcatctgcaccagcaccggcgggaacaccacactgccaccgtcttcgccgccggactgctgaagggtatccgccaggctgcggcgctgcgttttcgccagctcaccggtggcggtttcaaccctgatgagtggcgtgaagctccccggctgataaatcgtctggatgcgggttctgtcgttctgtatcgtggtcaggcggtcgccgtcccagccgtaccaggtcacttgcggtttccgtgacagcgacatccagcccgtcaggtcccgttcacgtcgccacacccgttttgccaccctgcggcccagcgggtcgtaaagatagcggctttcgaccagcggctctgcatattgtgtccgcgtgtagtgcaccagccggtgctgactgtcgtaatggtaccggtgggtgcgctcatcatccgtgcggataaccccttccgggatgaggtcggttttctccgtcagcctgccgtgacggtcataccggtaaagatagtgcgcgtcacgggcgatacggttatccggccacatgctgagggtgctgtccgggtgcagctccgggtcgggcagcgttacctgccgggtctgtggcatacggatgcggatatccagattcgctgcgtggtgtgaacgccgtcagcctgccgtgtgctgtactgtactccggtgaccggtgaccgataactcttcggtgagtctcgctctggagtgctcttcctgggccccgcatttcttcccgctgtctttgtggggaccaccttcttgaatagagctgcacggtctttccggcacatggtaatccgccaatgccgcaaccatgcagcttgctgctgctggtgactctagaggatccccgttgttgcgcccagtcagccagcgtgaggtcaatacgcgtggaaggtggttgctggcgcagcatcgcttccgcttctgcctctttgccgctttctcgcaggcggttagcggtttccagcacctgatcgctttgcagtcgattaaccagctcctgaatattgctgttccactgcgcacgcggcaggctattgatatgcgccagcgccgctctgtcctggtcatgaccagagaggtacagcccgtaagcgtaaacctgctccgggtcgttcgacttctgctgcgccagattgcgcattaacgtatcggcctggctgcgttgtccggcctgccagagatcctgcgaaagtcggtaagtaatccatacgctgccggggtccagcgccagtcgttgccgctgaagtgctgccgcctgcgcccatttgccctggttttccagtgccacactgctccggcctaccacatcatcaacccgtgtaggccggataagacgcatttgcgtcgcatcccggcgtgatgtgcttgccaccgatcccaggcgcacgcggtcatcttcttcgcgacgcagagcgatgtacgcatcaattgcttcgtcagtgaacacgccaccggctttcaggaactcgcggtccagatccagttcgttcagtgcttcttccagagagcctgcaacctgtgggatctctttcgcttcttctggcggagtgacttcagccaactgccagcctacacgctccaggcaacggcgggtcgcatacaccggcgcaattcccatcaatgccggatctacaccaacgctggcaaatgcgcgaatgcgggccagcacgggtaaattcaacgctcgtgctttggcttcgctcatcatcattaccgcagctgcgccatcgtttatggatgatgcattacccgctgtcacagaaccgagactatcaaatgaaggatttaaacgggctaagccttctgcgctggcgtcagtgcgtggctgttcatcggtatcaacaaccaacgtctgcccgttactttgggtcat

SEQ ID NO: 18307 - DNA, 5057 bp, Homo sapiens
  SIMILAR (2457)..(3404): 981254mologous to Homo sapiens protocadherin gamma C4,accession number AF152338,Smith-Waterman Score=1587.
  misc_feature (1)...(5057): n = a,t,c or g
atgggcgtacttaataactggttgagcgaagaagaaagtctatggatccagtcgcgcattcatctacgggctctacgttattatagtaactggcggcaatactttgccggttatacctttggtcggcaatattggcagtctcccgaagatgatcatctgcctttattacgcgaattcttagcgcgatatgagcgacctatgaaaaattgctggaagatcctcgatatagaggaaacgactgacgtcgatattatccgccgcgcttatctggcgctgttaccgtcctttcatccagaaaccgatccgcaggattttaaacaacttcgtcaggcgtatgaggaggcgctacaggattgcgcaagcgcctgctaaatctgtttggcaaccagaagaatatgaggaagcagaacatgaaattctgctcgcctttcgtgcgttacttgcctctgatagtgaacgatttctgccctccgcctggcagcgattcattcagcaattaaattattgctcgatggaggagattgacgaattacgctggtcgctgtgcacaatcgccatgaacactgcccatttatccttcgagtgcgtggtgttattagcagaaagattgcggtggttacaggaggaaaataccggggaaatagacgaagaagaactgggatcctttttatatgccattgcgaaggggaatttagttaacgttccaggccattctgcatctgcccggtgccgtgcaaaatgccaccatcgatttttaccaaatgatcggtcggatttggtcatcgcatccacaatggctgacattgtatttagcgcaacatcgcgcagtgattatccccgatgatgcaaagctgcacagaaatttactccgctggtatagcgcaggtcgcctggatatccccgaacttctggattacgcccagtcatggcgggaaactgaacctgataatgaagatgcgccttattatgaatacgcgcaacgcgtctattgtggagaaggcgaaagcctgttggcagaactttgtgactactggcgcgagtatccctccacccaggcggatgctttaatgttgcaatggtgccgtcagcatcgggtcgattattacccattatctggtggcaaacgggtgtggcggcgtgaacgggacctgacgggctggatgtcgctgtcacggaaaccgcaagtgacctggtacggctgggacggcgaccggctgaccacgatacagaacgacaggagccgcatccagacgatttatcacgacggggacgccttacacgacccnaacgacacagacacgacacctgcgctggactgccacttcagacagatcccggctggcgaagacggtggcagtgtggtgttcccgccggtgctggtgcagatgctcgaccggctggaaagtgaaatcctggctgaccgggtgagtgaggaaagccgccgctggctggcatcgtgcggcctgacggtggcgcagatgcaaagccagatggacccggtatacacgccggcgcgaaaaattcacctgtaccactgcgaccatcgcggcctgccgctggcccttatcagcacggaagggacaacagcgtggtacgcagaatacgatgaatggggtaacctgctgaatgaagagaacccgcatcagctgcagcagcttatccgcctgccggggcagcagtatgatgaggagtccggcctgtattacaaccgccaccgctattatgacccgctgcaggggcgatatatcactcaggatccgattgggctgaaagggggatggaatttttatcagtatccgttgaatccgatctcaaatatagatccattaggattagaaacactaaaatgcattaagccactgcattcaatgggcggaactggtgaaagaagcggtccagatatatgggggaatccgttctatcatcaatatctttgtgtcccagactggtacaaggggacttatatcttgttgcgtttgcggccaaaaggaaaccaaacgggggggaagaaattcaaaaagggagatactactgaccatcgaccagaagaccctagtgctgtggtcctatgtgtcagggagcggatactgctgttgggaagacgtctccacatccccctggcacagcagctggtcggcgtcaaaagcggctttttgcagattatccaggtcacggcgacggcgatccggcatgtggcactcaatgcggattttcacaggcatagccaggccgatatccagcattgcgtttttaatgattcgggcgacgttatcgcgacggttgttgcagaatatgcaaggatgttgtttttcgttaacggagctgccatgaatctgcctgtaaaaatccgccgtgactggcactactatgcgttcgccattggccttatattcattcttaatggcgtggtggggttactgggatttgaagcaaaaggttggcagacctatgccgtcatcgtgcccctggagtttgtaaccgaagggcctttggaaatgtaccgagcggaggttgagatcgtagatgtgaatgatcacgccccccgatttccgcggcagcagttggacttggaaatcggggaagcagctccgccaggacagcgtttccccttggaaaaggctcaggatgcagatgttgggagcaattccattagcagctacagactaagctccaatgagcactttgccctggatgtcaagaagcgcagcgacggcagcctggtcccagagcttcttctggagaagcccttggatcgtgagaagcaatccgactaccgcctggtgctgactgctgtagatggagggaacccccctagatctggaaccgcagagctccgggtgtcagtgctggatgtgaatgacaacgccccagccttccagcaatccagttacaggatcagcgtgttggagagcgcgccagcgggcatggtgctcatccagctcaatgcctctgacccagacctgggacctagtggtaacgtcaccttttcttttagtggtcacacccctgaccgtgtgagaaacctctttagccttcatcccactactggaaagcttacccttcaggggcctctagactttgagagtgagaattattacgaatttgatgtaagggctcgtgatgggggttctccagctatggagcaacactgcagccttagggtggatcttctagatgtgaacgacaacgccccccatatcacagtgacctctgagcttggaactctaccagagagtgcagaacctggcactgtggtagcactaatcagtgtgcaggaccctgactcggggtcaaatggggatgtgagcctacggattcccgaccacttaccatttgccctcaagtctggcttcaggaaccagttctccctcgtgacagcaggacccttggaccgagagggccagatccagttacgacctcatggaggtcgctacagtgtcgtcctgacaaacacgccccagggacgtgtggtcctgcagcctctgccacatctggctaagcgcatcccaccccttacgccaacggctacgctcctatttgaccgagggggtgtacactccaaccccactggggactggcccctagacggtatcacagacggattgtctcgctctcatcttnntgtttataactcccgcgagccgcgcgacatgacagccagagacaggacagcagacacgcgacacacagtacaggcaaatgcgcctgccttcaatcagtctttgtatcgggcgcgcgtccgggaggatgcacccccaggcacgcgcgtcgcccaggttcttgcaactgacctggatgagggcctcaacggagaaatcgtttactccttcggcagccacaatcgtgctggggtgcgggaactattcgctttagacctcgtaaccggggtgctgacaatcaagggtcgcctggacttcgaagacaccaaactccatgagatttacatccaggccaaagacaaaggtgccaatcccgaaggagcgcattgcaaagtacttgtagaggttgtagacgtaaatgacaatgccccggaaatcacagtcacctctgtatacagccctgtccctgaggatgctcctctggggactgtcattgctttgctcagtgtgactgatctggatgctggagagaacgggttggtgacctgcgaggttccacccggtctcccctttagcctgacttcttccctcaagaattacttcactttgaaaaccagtgcagccctggatcgtgagaccatgccagaatacaatctcagcatcacagctcgagactcgggaatcccctctctctcagctcttacaacagtgaaggtccaagtgtccgacatcaacgacaatcctcctcagtcgtcccaatcctcctacgacgtttatgttgaggaaaataacctacccggcgttcctatattaaacctaagtgtctgggaccccgacgccccgcccaatgcccgcctttccttctttctcttggaaccaggagcggaaactgggctcgtgagtcgctatttcacaataaatcgtgacaatggagtcttgactaccttagtacccctggactatgaggatcagagagagttccaactaacagctcatataaacgacggagccaccaacatcagcgtgaacgtatttgtcactgactgcaatgacaaggcccccaaggtcctgtatcccgggctgggcagagtccggggggatgtgctcgaggtcagtgcgggcacgtggtccccgcgggtagctggacccaatctgggccagctgggtccaaaagcttgggagcccacaaagtgttgcgggggatcacgggtacatatagcagcaaagagaaataacgcgaatacacagtctaaggacattttacacaccctggtaatagatacaaggactattatccagaaacacctctttgttcgtcgggattatggacatatgctgagccacatgagtgcctggtgcccatggagttcagaagatgacaatggatccctggaactggagataaggatagttgtgagctctgttgaggaccgtcggatgtggaggcaggagatctga

SEQ ID NO: 18308 - DNA, 271 bp, Homo sapiens
  SIMILAR (138)..(1): 1001254mologous to Escherichia coli K12 putative tRNA synthetase,accession number AE000169,Smith-Waterman Score=234.
ttccggatggctattgagcagcaaggcaacgttagtttgcggtccggtagacacaatggtgacaggttccgcactttcacgcagcgttttcgccatcagctctaccgccgtacagttttgcggtgcgaatgtcggttccgatcacccgattcgccactttacggcaaagcccatttcgtgggtcaccaccatcatggtcattccttcgttcgccagttccaccatcacgtccagtactcgttgatcatctccggatccagcgccgatgtcg

SEQ ID NO: 18309 - DNA, 591 bp, Homo sapiens
  SIMILAR (115)..(297): 1001254mologous to Escherichia coli NikA,accession number X73143,Smith-Waterman Score=336.
gccccggaggcccagctggccgtccgcccgtgcggacacccgggagccaacactgacccgaagacagcatcacccgcaaagggcttcgggaggagcaaagagtccgccatatctatcgtccatgccgctgcaccagatgaaatcaccaccgcctggccggtgaatgtcgggccactaaacccgcacctttacacgcctaaccagatgttcgcccagagcatggtttatgaaccattggtgaaatatcaggcagacggttcggtgatcccgtggctggcaaaaagctggactcattcaatcacttccaacatgatgtacaagccgactcaggaagtgacggatggctgtggtttctccatcggtcaccagcagcagtttgcatcatggattgcctataaagtcgcgccgttcctcggcaaaaaagaggagagcgttgaagacctcaaattgattatgggtggcgctatggggctgggtaactggacgcctgcggctgaatttaatatttacgttgacccggaagcggcagaaattgtcttccagtcagggatcccggtggtgatggccggtctggatgttactcacgagtag

SEQ ID NO: 18310 - DNA, 2469 bp, Homo sapiens
  SIMILAR (903)..(10): 991254mologous to Escherichia coli sn-glycerol-3-phosphate acyltransferase,accession number K00127,Smith-Waterman Score=1553.
ctaaataacccccagacggcggaaaatcggcccggcaggccagaaattcaggttgatcccggcggcgatatgcggcggcaccagcccctggtgatacagcacgtaagaaagcagcaggtagtccatgtgactgcggtggcaaggcacatataccagctcatgaccgtcgtgggccagctggcgaacgcgctcagcgttatggacgttgatgccctggtaaagtcggttccaggtgaagcccagaatacggtcagtcaggcgaatcatctcgtaagagaaattcgccgcaatctcttccatcagtgcaatcgcgttctgctgcgctttttcatgggagatttttttgctgcgcgcttcatcttctaccgctttggcaatggcgcgggaggcgagcagcttattaaacagatcctgacgagcaggcaaacgtgggcctacggcagccagacgttgacgggcaaagtgcatacgcgccacgcgcgccagtttctgagcgatagttttatccgtgccgtgttcatccgccatacggcgcagcgaaactgacggcgagaaacgcacaaaactgtcgcgaccgagccacagtacagcgaaaaatttctgtacgccgttaagcatacgcagcggcgggttcacttcgcctttttcacgccccggcgcgcgaccaaacatcaccgacactggcaccatctgcacatccagatttgggttgctacggtgcaaatcgagatagtcgtggaacagcttaatagactcttctttcggcgtgtaataggtgaacacacgcggcccgccgtgaatgaacacatagcgcggcagtagcgtgccgtcgatttccagcggctctaacgggtcaggcaagtcatgtgccagacactgggcgcgcaacgtcagcaaatatgcatatgcgccgatgctgacaccagggtcgcactttgcgcaaccagtcgcgatcgtgcccgcatcaaggcaaagttgttgtttaatcgccggattaacaaaaatgcgcgtgacgtctttgtcctgggcggcgagtttgatcaagctgaaaatttctggcttccacagcgtggagacaacgtgtttaccgtcgcgggaaactaagtccagtgcttgcgggcgcaagagctgcgcggaggtccagcgagttttcggcagttgcagaaagatatcgacatccagtccggtctggtggctggcatgaccgccgttgaaacgcccaccagcgggcatccccatatcgccaatcagcaccgtacccatgcccagattgctcacctggctactcagacgctggataaacatcaccagatccgggtgaccgaaatagcgacgctgatcggtacgcatgacctgataatgttcggactgtatcggcagcgtgtcagcgccgacaatacagccattagaaaaactgcctatcgattgtgcgcagcgtggaatatcagtcttcacatcggcattttgcgcccgttgccgtaacaggtgatccattaaaacgatcgccagcatcgcttctgcgatcggcactgcgcggatcccgacacagggatcgtgacggcctttggtgatcatctcaacttcttcgccaaagcggttaatggtacgacccggcacgtcaatgctggaggtcggtttcagcgccatatgggcaatgatttgctgcccgctgctgataccgccgagaatgccgcccgcatggttgctctggaaaccgtctttggtgatttcatcgcggttctggctgccgcgcagccaccacgtcaaagccgtcgccaatttcacgctttcaccgcgttgatgctcatcagcgcatgggcatgtcagcatccaggcggtcaagagccgctcgtaagtccgcagaacgccactcgtagagtcaccaggcagtgcgcctttattgttgatggtgccgagagtgttagtcagttttacgccaaagccgagtgatttttcttttgccagtgccatcaggcgttccagcatttccagtgcttgcgtcagcttgaggtcgtgatcaaatgactcttcttttaagcctatgtaaccgaaaccgcagacatcgaggatctcacgaacacgcgcgtaccccagtaaggtcgggttaagtttcacaaaggtgttgagccctttttcttccagcatgtagcggcaaatggcttcgatttcatgcggaggacagccgtgcatggtggagagggtgacgccatgcaccatactggtggggatgcgagcgggtaaggcttgcaagctttcgcgtttttcctgcaatccgtggcgagctaaaaatgcgtcatcctggagtaatttattcagcgtatcgcgatattgagcgaatttcggatggtcagatgcgtccatcatattgtcgatgaactgttgcatcggcggttgcttaataccttcgaggttgtaaccgacgctcatattaaagatgaacgatttaccggaatcagaaggctggaacat

SEQ ID NO: 18311 - DNA, 345 bp, Homo sapiens
  SIMILAR (345)..(175): 1001254mologous to Escherichia coli HyfI,accession number M63654,Smith-Waterman Score=300.
ctggaagagctcggagtcatcggggctgtactggttgggttcagtctctgagttctctgggcaccactgcagctccccaaagcaggtggccgagtcaaagtcgctggcatccagctgggagaggtcgagttctggaaagtcagcatagagttgctcctccccggaccctccacctggtgtaatggcagcaaaaatttcgatttcacaggcgttgcagccgccgcaatcgacgcgataaacgtaagccgagcgacggatatcctgtagcaaatgccgcttcatcttttgcgtttgctcgtccagcgtgatgggctggctgacatgttgtgtaagcactggactcat

SEQ ID NO: 18312 - DNA, 2721 bp, Homo sapiens
  SIMILAR (679)..(1785): 971254mologous to Escherichia coli was o492p and o826p before splice,accession number U28375,Smith-Waterman Score=1875.
atggtggcgctcggctgtaaatatctacgtatttgccatctgaacaactgcgcaacgggtgtagcaactcaggatgacaaactgcgtaagaaccactatcacggcctgccattcaaggtgacgaattactttgagtttatcgcccgtgaaacccgcgagctgatggcacagcttggcgtaacacgtctggtggatctgattggtcgcaccgacctgctgaaagagctggacggtttcaccgccaaacagcagaagctggcgctgtcgaagctgctggagactgccgaaccgcatccaggtaaggcactctactgcaccgaaaacaacccgccgtttgataacggcctgctgaacgcgcagttgctgcaacaggcgaaaccgtttgtcgatgagcgccagagcaaaaccttctggttcgatattcgcaacaccgaccgttctgtcggcgcgtcgctttcaggctatatcgcccagacgcacggcgatcaggggctggcagccgatcctatcaaagcgtacttcaacggcaccgcaggccagagcttcggcgtgtggaacgcgggcggcgtggaactgtacctgaccggtgatgccaacgactatgtcggtaaaggcatggcgggcggcttaatcgccattcgtcctccggttggttccgccttccgcagccatgaagcaagcattatcggcaacacctgcctgtatgggcggaccgggtgccaatacaactgtacccgcctggattacgacagtgcgctgaatatccgcgaactgaaaaaagtcgcgctggaaaaaggttgggatgaatataagcaacgctggcacaaaccagccggttctggttcacgccatccggttgccgtgattggtgcaggtccggcgggtctggcagcaggttacttccttgccagagcgggccatccggttacgctgtttgaacgcgaagccaatgcgggcggcgtggtgaaaaatatcgttcctcagttccgtattcctgcagagttaattcagcacgatatcgattttgttgccgctcacggcgtgaaatttgagtatggctgctcacccgatttaaccattgagcagttaaaaaatcagggcttccactatgttctgattgccaccggcactgataaaaatagcggtgtgaaactggcgggcgacaaccaaaatgtctggaaatcactccccttcctgcgtgaatacaacaagggtacagcgctcaagctgggcaaacatgtggtcgttgtcggggcgggtaacaccgcaatggactgcgctcgtgcggcgttacgcgttccaggcgtagaaaaagcaacgatcgtttaccgtcgttcactacaagagatgcccgcatggcgcgaagagtatgaagaagcgttgcacgacggcgtagagttccgtttcctgaataatccggaacgtttcgatgctgatggcaccttaaccttgcgcgttatgtcgcttggcgaaccggatgagaaaggtcgtcgtcgtccggttgaaaccaatgaaacagtaacactgcttgtagacagcctgatcaccgccattggtgaacagcaggatactgaagccctgaatgcgatgggcgtgccgctggacaaaaacggctggccagacgtcgaccataatggcgaaactcgtctgactgacgtctttatgatcggcgacgtacagcgcggaccatcctccattgtcgctgctgtcggaaccgcgcgtcgggcgaccgatgccatccttagtcgggaaaatatccgttcccaccagaacgataaatactggacaacgtctatccagcgaaaggtccgagcctatgatagtggtgatggtaaagtacagacgctgggcgcggtagagcatagcccgttgtatacctcggtagatccgctgcaaagcatgagccgtgaagagaagctggatatcctgcgtcgcgtcgataaggttgcccgcgaagcggacaagcgcgtacaggaagtgactgccagcctcagtggtgtctatgaattaattttggttgcggccaccgacggcacgctagcggcggatgtccgtccgctggtgcgtctttccgtgagcgttctcgtcgaagaagatggcaaacgcgaacgcggtgccagtggcggcggcggtcgttttggttatgaattcttccttgccgatctcgacggcgaagtccgtgcggatgcatgggcaaaagaagcagtgcgtatggcgctggtcaatctttctgccgttgctgcaccagcgggcaccatgccggtagtacttggcgcaggcgattttttcgatagtgtcagctttcgtggtgtgcagctggcgtcagatgacaacatgctgccagacagcctgaaagggtttgcgcctgtggtgcgtggtatcgccaaaagcaatgcccagataacgattaagcaaaatggttacaccatttaccaaacttatgtatcgcctggtgcttttgaaattagtgatctctattccacgtcgtcgagcggtgatttgttagttgaaatcaaagaagcggacggcagcgtcaatagctacagcgtaccgttctccagtgtgccattactccagcgtcaggggcgaatcaaatacgcggtgacactggcgaaatacagaaccaatagtaatgaacagcaggagagcaaatttgcccaggccacgttgcagtggggcggaacgtggggaacgaactgtatggtggtgactatatgctga

SEQ ID NO: 18313 - DNA, 1031 bp, Homo sapiens
  SIMILAR (602)..(126): 991254mologous to Escherichia coli K12 putative RNA polymerase beta,accession number AE000324,Smith-Waterman Score=814.
ccctgcatcccagtacggccatcaccatccccactttgttgcgcaactctgccagcacgcagcgtataatgccgcggcaggtatcttccttctttgaactttcgatcgactctagctcggtacccgcctgctctggaaataaatttcaccgggtcctggttataaccggcacaagctatatagccaacatttgcactgccgggagtgtaatcctgagtcgcaaatacccgcggacatctattcggaaatgcaatcggaaaataggttactgtgtcctgagacgtcagcggaacatcaattggcccccattgaataattaaaccggatggcaatttttgatatccaggaactgaagcagaaagcataaaactacccatatcaggtatctgattcgcccctgtccctacatttcttttagccgcttctcccaaaccaaggttttcgagagccttttgcaccgtgccgtccaatttgatatcgccaaacggattcttgcggcttaacagcagcgcacgaagcgcggtaagcagctggtcatgccgccccttctccaggctggcaccggaggcctccacaacgctgcaaagctcctcctgcaacatgtcaaagtagtcatcatccagatcggtggcaggcgtgccggtctgggggttaccacgggtacgggggattaccaaaggcagcacctttaagctccgcaagacgttctgaccagtcatgcgccagcgcggtgtctttcgcagtgtaatactaataaaaatacgctcagctcgttgctgccagatgatccaaccgagagtcatatcccatgccatgtattcgttatcgccgttttttgctctccgacgatctactaagtcaccgaaacgcttttccatgaataattcataggcttcgcgttcatctggctctacttccagagatacgagtgcgatttcataagcacggcgctcaatatcgtctcgaacctctaggctgctgattcgttctttgatttctttaatcagttctttattggtaaatgtggtcat

SEQ ID NO: 18314 - DNA, 1782 bp, Homo sapiens
  SIMILAR (1045)..(1779): 991254mologous to Escherichia coli HyfI,accession number M63654,Smith-Waterman Score=1304.
atgattcgtgttgcttgtgtaggtataaccgtgatggatcgcatctattacgtggaagggttaccgacggagagcggtaaatacgtggcgagaaattatacggaagttggtggcgggccagcggcgacggcagcggttgcggcggcaaggctgggggcgcaggtcgattttattggtcgcgtaggtgatgacgacacgggcaacagcctgctggcagagctggaatcctggggcgttaacacccgttacaccaaacggtataaccaggcgaaatcttcgcaatccgccatcatggtggataccaaaggcgagcggataatcattaactaccccagcccggatctgctgcctgacgcagagtggttggaggaaattgatttctctcagtgggatgttgtgctggcagatgtacgctggcacgacggcgctaaaaaagccttcacctggcccgtcaggcggcgtctcatccgcgttgaactgcaggcgctgaccaccagcgacttcgagcgtattctgaccgagccgaatgcctctatcccgtgcagtacaagcctgatggcgactgaaggcgtaaatatcgagtttaccgactccggtattaaacgcatcgcggaagcggcatggcaggtgaacgaatctaccgaaaacatcggtgctcgtcgtttacacactgttctggagcgtttaatggaagagatttcctacgacgccagcgatttaagcggtcaaaatatcactattgacgcagattatatcctttctaacctcgccaatgattacggcgatgcggtaaaaggcagcgataaacctgaccgcattgggccgctacgcggcatgcaaaaaggggtcattacccagcaagagatgaaacgggcgctcattattaccgtcgtgctcatctgtctctccgggctggcactggttgcagtggcatgccatacgctggccgattttgtcggtttcctgattcttggcgggttgtcgatcatgccgctatcacctacaccgtggcaatcatccttatgtgaggatccctgcttaccaaatgtcagccagcccatcacgctggacgagcaaacgcaaaagatgaagcggcatttgctacaggatatccgtcgctcggcttacgtttatcgcgtcgattgcggcggctgcaacgcctgtgaaatcgaaatttttgctgccattacaccagtattcgacgcagaacgttttggcattaaggttgtttcatcaccgcgtcacgccgatattttgttatttactggcgcagtcacccgggcgatgcgtatgcctgcacttcgggcgtatgagtctgcccccgatcataaaatttgtgtttcctacggcgcgtgcggtgtcggcggcggtattttccacgatctctacagcgtctggggcggtagcgacaccattgtccccattgatgtttggatccccggctgcccgccaacaccggccgccaccattcacggtttcgccgtggcgctcggtttgctgcaacagaagattcacgctgtggattatcgcgatcccaccggggtgactatgcaaccgttgtggccgcagatcccgccatcacagcgtatcgccattgagcgagaagcgcggcggctggcgggctatcgtcaggggcgagaaatttgcgatcggctcctgcgccatttaagcgacgatcctacaggaaatcgggttaacacctggttgcgcgatgccgacgatccacgtctcaatagtatcgttcagcaactctttcgcgtactccgggggttacatgactga

SEQ ID NO: 18315 - DNA, 921 bp, Homo sapiens
ttgatgcctgtgcggcgctctagtaggatccctgactggttacaatttctgccgcttccgggctaatagtaaatattaaattcagccgccgtgccagttacccagccccatagcgccacccataatcacgatacgggcaattttgctatgccgttccggatgcctattgagcagcaaagcaacgttagtttgcggaccgttagacacaatggtgacaggttccgcactttcacgcagcgttttcgccatcagctctaccgccgtacagttttgcggtgcgaatgtcggttccggtaatgccgggccgtcgagaccgctttcgccgtgcacattgtccgcgataatcaactcacgcattaacggttttaccgcgcccgcctgctaccggaatatcggtgcgattaagcaaggtcagcatacgcagaacattgcgtaaggttttttctggtgtctggtttccggcggaagacgtaattgctttgacatcaagctctggtgaggcgagggcgagaactattgcgatagcgtcgtcatgacctgggtcgcaatctaacagaattggcagtgccattgttgctccttgttgtgtgcttctttgcgacaagggtaacgccaggatgtaacagatacgaggggcgaaacgataaagcgtgagatggcgcgcaattgggtatgcgcgccagagtgattaatgcaggattttcgcgaggaagtcttttgcgcggtccgatttcggatcatcgaagaaagcgtctttcggcgagtcttcgacaattttaccctcgtccataaagatcacccgattcgccactttacgggcaaagcccatttcgtgggtcaccaccatcatggtcattccttcgttcgccagttccaccatcacgtccagtacttcgttgatcatctccggatccccgggtc

SEQ ID NO: 18316 - DNA, 3657 bp, Homo sapiens
  SIMILAR (3627)..(3046): 961254mologous to Escherichia coli K12 putative membrane / transport protein,accession number AE000448,Smith-Waterman Score= 923.
ttacgcagagaatcgccatttcctcaagccctgggagccagtgcgcggcacgatcccactggcgaggatcgtttcatcgaaagcctgtaactgatccgccgaacgaacatgaaggagaactcgatcggctcggtgataccggtccaggaacgaggtcagcgccgcggagatcataataccgcccactttcgcgcggttttctggtttagcagagtgccagatagcaattgcggcagctggcagaccgtacattttgaacaggaagccaccagacagtttacccgcagtcgggtcacccgccatataacgcggaatgtcgccgtggaaaacctgaatctcgaacagcgagtgcaggaaggtaagttccgtgaggatctgttccaccgcctgaacgttatccgcgttcatctgccgccgctgcggaacgtcgggaagatattccccgtctggcgcgccattttttacaggttgccgcgcgcgaactgggcgatgcagggcatgagcgaccagttctttaccggtgccggattcgccgttaatcagcacgctaatagaagaacgcgaaagccgaccgataatacggaacacgtcctgcatggctggcgcttcgccgatgatatcggtcgttgggccgttaagctgaacattacgcggctgctgctgttcctggtaatgactgatagcgcgctcaaccagcgccactgcttcgtcgatatcaaacggtttgggcagataatcaaacgccccttgttgataggcgctgacggcagcatccagatcggaatgtgcggtcataatgatgaccggaaggacctcttgttgtgacattgttgaaaaatggataccagctcgttgctgccagatgatccaaccgagagtcatatcccatgccatgtattcgttatcgccgttttttgctctccgacgatctactaagtcaccgaaacgcttttccatgaataattcataggcttcgcgttcatctggctctacttccagagatacgagtgcgatttcataagcacggcgctcaatatcgtctcgaacctctaggctgctgattggctggcgttctctctggtacactatcttgataaacagcatcccgcccacgaacagagcgaagtcgatgaagccggaaccctcaccgaacgcgtgttcaaaagtaaagagatgctgctgatcaatcttgtgcctgttaccgctgggaaagaacagccacctttggctcattccttcctgaagatttgcaaaaacctcctggccttccaataaggcgtcagtagctgaacaggagggacagctggttagaatcggcgtattcctgacgcacggccgcttagccgacatgaaccgctttgtgatgccggaaagcttaacatcaactttgaaggccggttgatgtttttcacggcgctttggcggtggcgctggcaacaagtgggatttagcggagctcatgaatgccccgcaggtgacaaccaccagcaggatcaccaccgctttgaggatggtcagcaggatctcaaggactcgttccgcgaggcgcaccatattgttggtgaagcggtggtggaagccattcgtcaggcaaaccgctggaagatctgccgctgactcatagaggatcccacgggtacgcgcgcatgacccgctattaactctgtcaggaagcggaatttttgagttctgcctcgagtttatcgatagccccacaaaaggtgtcatattcacgactgccaatacggctttcatcatcgccaccggatggtcagactggaaaatattacgccccatatccacaccagaagcgccctgatcgatagcctgccagcacatttccagcgcctcgcgctccggtaattttttaccgccagcaataacaatgggtaccggacatccggcaacaatccgttcaaaacctttttcgacataataggttttgataatttgcgcccccatttcagcggcgattcgagtcgcgagcgagaaagtaacgctgatcgcgcaccatatgccagtcacggccatggtcggcattcccactttcattccggcatcaaccagctgaataatatttttgatcgactgatgttcatattcgctgccgatataaacctgcgccgccacggcgcagctgttcgggcgcacgggggagctgcaggcatggcagcttggcgcctggcctcgttttccaaggtcggggctgggggaaaccagcgacaccagctcatgactttttaaatcttcatgctgctcgatcgtaaaagtcaggccgctgtcctgatacgtttcccgtacataggcaatgtcgttagcgataatcgataatacgtcgcgcaaattaccttcataacgtggataaaaacgtacggacgatgccccagttttcaacgcgatggcgacggcttcgtcaatagatgccttatctgaggcgctggtttcaatatgaatatcaaggttcagacggcgggctttatccccaaaggcagagagttctttatcgtccatattaccaagagaaaaacgctcgccatcgagaacatggattttgacgccacgtagattattttcacttgcgatatcaagtaaatcagcaggcaacactctttccagccgcatatttaaatgaaaggcataagcatgtaaataaagaggaagagtgtcgacacgttgtagaatctgtcttgcggacgtacaggtcagtacctgactaaggaactggctaaagcgtccgtatctcgtatcgttatcgagcgtccggggagacggccagctcggttcgccctctttcgacatcttccacagaacgaagtccattgggttgcgtttgtcgtcgaccacgtcaacgcgcgcgcctgcctgcagctggtcgagatcctgacgcgacagcacgccataagttggatcggtcgggacgtcgagcaccttttcttccggcaataacgtcatgccatttaccaaaccgaatattgtgatcaaacccaatgccaatagccgccgaccgggataccacgactctagagatccccggaaccggatgagtatactcatcacgcagtagtagataaagcccagcgcgataccttcggtaatcgagaaggcgaccggcatcatcacggcggtaataaacgccgaaccagattcagtaagatcctgccagttcacgcgtgccagactggaagtcatcagcacgccaacgtaaatcagcgcaccagctgcagcgtagcctggcaccatccccgccagcggcgacagaaagataaccagcaggaacagcagaccaacaaccactgccgtcagaccggtacgaccgccaaccgatacgccggaagaggactcaatataagccgtaacggaagaagtaccgataaacgaaccggtcacggaagagatactgtcgacatacagcgcctgcttcatgcgcgggaatttccccttctcatccgccagacctgctttatcggtcacgccaatcagcgtaccggaggagtcaaacaagttgaccaacatgaaagagaaaatcacccctgccagcccgaggttaaacgacccggctaaatctacatgacccacaactgtcattacgctcggcggcgcagaaacgatgccattgtagtgcacatcatgccggcatcgattacacctgccagacat

SEQ ID NO: 18317 - DNA, 708 bp, Homo sapiens; identical to SEQ ID NO: 17687
  SIMILAR (196)..(450): 971254mologous to Escherichia coli glutathione transferase,accession number D38497,Smith-Waterman Score=426.

SEQ ID NO: 18318 - DNA, 2439 bp, Homo sapiens
  SIMILAR (1042)..(1734): 821254mologous to Escherichia coli FimD protein,accession number D90732,Smith-Waterman Score=984.
tcgcactctagaggatccccgggaaaagccgtcgattttactctcgtcagccatgctgcctggttcggtctgccacatttttccactcctgcttttaatggtcaggcaatgatgctgattgcgcccgtggcggtgattctggtggcggaaaacttaggtcatctcaaggcagtcgccgggatgaccggacgcaatatggacccgtatatggggcgggcattcgtaggcgatggtctggcaacgatgctttccggctctgtcggcggtagcggcgtgaccacctatgctgaaaatatcggtgtgatggccgtgaccaaagtctactcgacgctggtgtttgttgctgctgccgtcatcgccatgctgttgggcttttcaccgaaatttggtgcgctgattcataccattccggccgcggttattggtggtgcatcaattgttgtgttcgggctgattgccgtcgcaggcgcaaggatatgggtacaaaaccgtgtcgatttaagccagaacgggtgtaatcctgcatacgcggagcatcatcaacatccgggttatagcgataaattgaaaactcgagtctcattttcctgtctccgcattataagtacgaatcttcggcgggaatgccgggcgcagtttcggttccatgttgacgcttcggcgcgtcatggattccgactctggcagatacagggagtggcacagccagttttcatcatcacgatccgggaagtcgaagcggctatgcgcgccacggctttcggtacggaagttggcagaaacagccgttgcatacgccgtttccatcaggttatccagttccaggcactcaacgcgctgggtgttgaactcgctggaatcgactctagagatccccgtcttaaggtgctggaggaaatgaagcgtacatttcactggggaagacagacaataagtaaacacattaaaatctggcttggcttgatgttggggagggccatgacgccgctcatgctggatgccacttctggcaagctgaccgtctgggatggtgctcatgctggcgcggcaatgggcatcctggctgtaaccgcagaccagaacagcgcggaactggcatattacaaatctggctctttccgtattgaagatgtcctctggccatctgccgtcaccgacgacaacattaaacgtaacgcgttcgccgcggacggcagcgtcaatagctacagcgtaccgttctccagtgtgccattactccagcgtcaggggcgaatcaaatacgcggtgacactggcgaaatacagaaccaatagtaatgaacagcaggagagcaaatttgcccaggccacgttgcagtggggcggaccgtggggaacgacctggtatggtggtggacaatatgctgaatattaccgtgccgccatgtttggtctgggatttaacctcggcgatttcggagcaatttcgttcgatgcgacccaggcgaagagtacgctagcagatcaaagcgaacataaaggtcagtcatatcgttttctgtatgccaaaacgctcaaccacttgggcactaactttcaattgatgggctatcgctattcgacgtcgggtttctacaccctttccgacaccatgtataaacatatggatggctacgaatttaatgacggtgatgatgaagatacgccgatgtggtcgcgttattacaatttgctttacaccaaacgtggcaaactgcagtcattaatcagtaaaacccgactgctcagcgagaatcgtcgaaaaggacgagtagttcaggcggaaacgctggaagcagcgggccatgtgctattgctaacatcattaccggaagatgaatattcagcagagcaagtggctgattgttaccgtctgcgatggcaaattgaactggcttttaagcggctcaaaagtttgctgcacctggatgctttgcgtgcaaaggaacctgaactcgcgaaagcgtggatatttgctaatctactcgccgcatttttaattgacgacataatccagccatcgctggatttcccccccagaaaggatcccctctgcgcggaaatggacgaacagtggggctatgtcggggctaaatcgcgccagcgctggctgttttacgcgtatgacagtctccggaagacggttgttgcgcacgtattcggtgaacgcactatggcgacgctggggcgtcttatgagcctgctgtcaccctttgacgtggtgatatggatgacggatggctggccgctgtatgaatcccgcctgaagggaaagctgcacgtaatcagcaagcgatatacgcagcgaattgagcggcataacctgaatctgaggcagcacctggcacggctgggacggaagtcgctgtcgttctcaaaatcggtggagctgcatgacaaagtcatcgggcattatctgaacataaaacactatcaataa

SEQ ID NO: 18319 - DNA, 3021 bp, Homo sapiens
  SIMILAR (759)..(28): 1001254mologous to Escherichia coli K12 putative lyase/synthase,accession number AE000500,Smith-Waterman Score=1257.
ttattcagcgtcgcagcggtcgccagaatcgccttcacgccaggcgcggtagatgccgacggagagttccggagcaaagttagcgctggcggttatcgcaccgtcgccgcccagcagcatcgtattcagcaaatgatcatcgtaaccgcagaataccgaaaacgacgggcgtaccgacttaactgtgttgatcatcgtacgcaagtgaccaacgctgtcgatggtgtctttgatgccaacgatattctcgttttgcagagccagacgcgtcacggtttccggggttaagtcctgacccgtcagatccggaaagttgtacaggatcaccggtagggtgacgctacgggcgatctgctggtaatagtcgtcaagatttcgtggtgcgactttccagtagtaggggttgatggcgacgataccatcagcgccgtaggcttgcgcatgctgcgccagtttgaccgcttcgtcagtggaaggggaaccgacgccaatcaataccggcactcgcccgtcgacaatggttacagcttcttcggcgagtgccatgcgctgggctgtattcatttggctaaattcaccaccggtacccagataaaacagcccgtcgacccctttattaatcaggaagtcggcaacttcgcgcattgcctttttatcaagggttccgtcacgatgaaacgtgctggataccggtggaataatgccgctgaattttttcattacctcagtttccttttcgtaagtgctcattttcgtttccgcgtaatagttgccgccaaccggaacacgaccgtagcgcggattatggtactgtttcagttcgtcgatattagggtcaacaggggcccggccggtttttgccttaggggcggtgcagcttgctgctgtggtcactctagaggatcccccgaagctgggatggtcgacgtaggcgtcgcccgtgacgatgatgacgtcgcagctgtcccagccgagctgctccatctccgcccggctcatgggcaggaagggtgcggggccgaaacgcttggcccagaaggggcggtaagcggtcagggccttcggggcggcaacgggcagtgcggacataagaggtggattgtcgacggcaggcccagaaagcacaaagcccgcgcagggcgcgggctgggcgccttcggccagagtgcggaagccgccgttgttcttgatttcgctgtgatgggcgaacaggtccttgccgccgtcggcgggggtgatgaagccgaagcccttgccgtcgtcaaaccacttgacgatgccggattgcatggtgctcatgaaaatttcccaacaatcttctcgctgggcattaagaatctcggccaggacaccaaatatggttcgtccttcatcgttatgaccattattggcggcggtattgtcactccggtcatgggttttgtcagtgacgcggcgggcaacatccccactgctgaatttttcttcgcaagcagcggcttcagccatacccgcgatacaggtatcggaaatgacacactcgacggcagctccgcaggcatggcgcagtttctcggtcagctcggtaccatttctcgtttgctctgagtatatttccgggtggaaaatatggggaatactatgctgtgctacagagtcaatagctaagaccagtaatatctcttcgtgtagaaacattcctttgtcagatgtcgtgcgtttcatctctactagggttgaaacattcatgtcattgagcagtttggaaagtcttatttgtagaataccgcttctcaacccggtacgcaccagaaaatcattgatatggccatgaatggcgttggatgccgggcaaccgcccgatccttccagcacatccagactgcggttgattttctcccgctggcgtaacaattcatcttcagactgctgcgccgctggacgcgcctgttcacgcaccgataccagcccggcatccataatgccatccgccagtgcctcaattttgcgcacccgcaacgactccagcggatcgcgcggcaacatcgccggagcgacattcattaattcaatatattcagcgatgatcggcgaatcaaaccagcattcgccctcttcggtcaccagcaccggcacttttcctaacgggttaaattgcgccacgccgttgtccgcgttatagggcagttcattaataaattcgaaagttatgcccttttctaacaacagaatagaaagtttgcgtacaaacgggctggtgtagctaccgacgagtttcatgccgagtcctttgtgcgaggtcgtgctccaatgaaaagaaaactttaactctttatgcagctcggtggcgatgtaattcagccattcgatggttttatagcgggaaatactgtttaccggtgccagcaactggcggtcggggacgctgtcggcaagatactgcataatcgctacgccttccgtcagcaaagtaccgtcatccagcagcaatgcaggcacctgcccctttaattcgtacaagatgatgcgctggcgcagccgcacgtggacgtccccgcagagaccgaagtcccaggccgagaacacccggtggctgtagctggtcagagcctcggactccgccagcagtgtctgcttcagcccagacaccgagcagcttttggtactgagcctgtatatagttgaattagtaatgtgatcctccagcttgttctttggctcaggattacttcgcgatgcggctcctttttggttccatatgaactttaaagtagttttttccaattctttgaagaaagtcattggtagcttgatggggatggcattgaatctataaattaccttggccagtatggccattttcacgatattgattcttcctaaccatgagcatggaatgtacttccatttgtttgtatcctcttttatttccttgagcagtggtttgtagttctccttgaagaggtccttcacatcccttgtaagttggattcctaggtattttattctctttgaagcaattgtgaatgggagttcactcat

SEQ ID NO: 18320 - DNA, 2502 bp, Homo sapiens
  SIMILAR (1287)..(514): 911254mologous to Escherichia coli YbaU,accession number D82943,Smith-Waterman Score=1183.
tcagaactgcatcagttctgcttctttgtctgccagcgccgcttcaattttcttgattgcagcatcagtcagtttctgtacatcgtcctgagaacggcgatcgtcgtcttcgctgatctctttatctttcaacagtgctttcactttgtcgttcgcgtcacgacgcacgttacgtactgcaacacgcgcttgttctgcttcaccacgaacgattttggtcagatctttacgacgttcttccgtcagcggcggcagcggaacacggatgtcgctacccgcagagttcgggttcaggccaagatcggacgccataatcgctttttcaacggccggagacattgaacgatcaaacacgttgattttcagtgtacgggaatcttctaccgttacgcttgccagctgacgcagcggcgtcggcgtgccgtaatattccacgacaatgccatccagcaggctgggagaagcacgacccgtgcgtattttgctgatttgggttttgaacgcttctacgcatttgtccatgcgtacttcagcatcttttctgatatcgctaatcacgttacgaatccttgaaaagctgcggctggtgaattgatcctgatgctggtcgtagtagttctggatatccgcatcgctaaccggttgctgcatcgttgcggcatccagcttgatgtaactcacgcggaattgttccggcgtcatgaaattgtttttgttttgttcgtagtagctggcaatctcctgttcggtcacaggctgcttcgccgccagcgcgttaacatcgatagtcgcctcacgcaccacgtgttgttgcgcgaccagtgccgccagctcgtcggtttcacctttcagcataaaatcggtaccggcaacgccgttaatcagctgttgggtagtgagctggttacgcagcgcctgggcgtactgatcggcggtcatccccatctggttgaggataccgttatagcggctgttatcaaatttgccgtcaacctggaaggctggggtcgcgaaaatcgcctgtttaacctgctcatcgctgatacccagtttcagctcacgtgcgtactgatccagcagcgcctcgtcgatcagacgattcagcacctgttgacgcagggttttcatatagccttcgttcgctgccagctcggagtattgatcgcccagctgttgctgcatgcgattacgctcgctgttgaaggcgttctcgaattgcccacggctgatttcctggtcattcacttttgcggcgtagttattgcctccgccaatcaggtaaccacttggtacattggggatcctgtacaggggccgcgcttctcgctcaatggcgatacgctgtgatggcgggatctgcggccacaacggttgcatagtcaccccggtgggatcgcgataatccacagcgtgaatcttctgttgcagcaaaccgagcgccacggcgaaaccgtgaatggtggcggccggtgttggcgggcagccggggatccaaacatcaatggggacaatggtgtcgctaccgccccagacgctgtagagatcgtggaaaataccgccgccgacaccgcacgcgccgtaggaaacacaaattttatgatcgggggcagactcatacgcccgaagtgcaggcatacgcatcgcccgggtgactgcgccagtaaataacaaaatatcggcgtgacgcggtgatgaaacaaccttaatgccaaaacgttctgcgtcgaatactggtgtaatggcagcaaaaatttcgatttcacaggcgttgcagccgccgcaatcgacgcgataaacgtaagccgagcgacggatatcctgtagcaaatgccgcttcatcttttgcgtttgctcgtccagcgtgatgggcagcagtacatctgtatcgtcgttgatcggcgtcgcgcgttgtttgcattcccggggacctgcaggcatgatatcttcgccgccacagtccggcatacgacagatataggggaaaaaatcggcatccccgataacatatgagaaataatagatggcaaagccgttaataatgttgcgggctacattataagcaagagccatacccaagaggcatgaaagctgatcgtttttataaattagggcaacgatggctttaagtgtcagatggcttccttcagcagacggttgattgtctgacgaaaagacttcatgcacattgcgcagagtgatgatggttgaaacaataaaaaaggcgatcagtaccagagtgaacatctgaaagccaaatccccgatcgccaccgccgacataattaacaaatggtagcgtcacacctgccgtaacaaagcctgccagactggcaaaaaaacgcggataaggaaccagttgttcgcgctcacgtttatcgagcgtgatggttggaaccagcgaccagaagggaatatccataatggtgtaagtcatgccccagaggatgtaggtcacgcaaacaaagacaatctgagtagtaccttcaaacagatgcgcacccat

SEQ ID NO: 18321 - DNA, 2154 bp, Homo sapiens; identical to SEQ ID NO: 17800
  SIMILAR (472)..(1410): 981254mologous to Escherichia coli tyrosyl-tRNA synthetase (tyrS),accession number J01719,Smith-Waterman Score=1605.

SEQ ID NO: 18322 - DNA, 3273 bp, Homo sapiens; identical to SEQ ID NO: 10827
  SIMILAR (1318)..(1974): 981254mologous to Escherichia coli FimD protein,accession number D90732,Smith-Waterman Score=1115.

SEQ ID NO: 18323 - DNA, 1131 bp, Homo sapiens
  SIMILAR (403)..(1038): 971254mologous to Escherichia coli similar to M. jannaschii amino acid transporter,accession number U82664,Smith-Waterman Score =1007.
atgaaaacatgttggcaaatcctcgaaattgaaagcacgacgcaaatagacattatccgccaggcttatcttgctcgcttaccgttgtgtcatcccgaaaccgatccgcaagggtttaaagcattacgccaggcctatgaagaggccctgcgactggcggtaaatcctgtcgaggaagcagatgatgaagaaaaagatgctgccgctgaacatgaaatactacgtgcattcaggacattactggattcagaaagtgatcgttttcagccttccgcctggcagaaatttattcagcaattaaatacctggaacatggaggatgtcgatcaattacgctggccgctgtgtgcaatcgccatagaagcgcgatatagagcccttttttgcttacgcgtggggatcatgcgccaccatgcggtagggcggctgaaagtgatcctcgtcggcattaaaatgatgatcctgttattgctgattattgccggtgtttggtcgctgcaaccggggcatatttcagtctatgcgccccccagctccggtgcgttcttctcatgtattgggataactttccttgcctatgcgggctttggcatgatggcgaacgcggcggataaagtgaaagatccgcaggtcattatgccacgggcgtttctggtggcgattggcgttaccacgttgctttatatctcgctggcactggttttgcttagcgatgtatcggcattagagttagaaaaatatgccgataccgccgtagcgcaggctgcttctccgctgctcgggcatgtgggttatgtgatcgtcgtcatcggcgctttactggcgacggcttcagccattaacgcgaacctgttcgccgtgtttaacatcatggacaacatgggcagcgaacgcgaactgccgaagctaatgaataaatccctgtggcggcagagtacgtggggcaacattattgtcgtggtgttgattatgctgatgacggcggcactgaatttaggctcactcgccagcgttgccagcgccacctttttgatttgcgactctagaggatcctggcttcagaaaacgccacgagtgtatgatcatgattattatctggttgtggttctagcttacaacgtaaaaatgtaa

SEQ ID NO: 18324 - DNA, 1275 bp, Homo sapiens
  SIMILAR (121)..(1020): 991254mologous to Escherichia coli Respiratory nitrate reductase 1 beta chain (EC 1.7.99.4),accession number D90758,Smith- Waterman Score=1586.
tgctgggattacaatacccgctatttaatattactgattatttttattgttaccgccgttaactacgccgatcgtgcaacgctgtctattgctggtaatgtgtggcgacctgcccgagcgcgtgaagaagatggcatcgtcctgatcgaccaggataaatgccgtggctggcgtatgtgcatcactggatgcccgtacaaaaaaatctacttcaactggaagagcggtaagtctgagaagtgcatcttctgctatccgcgtattgaagcgggtcagccgaccgtgtgctcagaaacctgtgtcggtcgtatccgttatcttggcgtgctgttgtacgatgccgacgctattgaacgtgcagccagcaccgagaacgagaaagatctttaccagcgtcagctggacgtgttcctcgatccgaacgatccgaaagtcatcgagcaggcgattaaagacggtattccgctgagcgttattgaagccgcacagcagtcgccggtttataaaatggcaatggaatggaaactggcgctgccgctgcatccggaatatcgcacactgccgatggtctggtacgtgccgcctctgtctccgattcagtctgcagcagacgcgggtgagctgggtagcaacggcattctgccagacgtcgaaagcctgcgtattccggtacagtatctggcgaatctgctgaccgccggtgataccaaaccggtactgcgcgcactgaaacgtatgctggcgatgcgtcattaccaacgtgctgaaaccgttgacggtaaagttgatacccgtgcgctggaagaggtcggtctgaccgaagcccaggcacaggagatgtaccgttatctggcgattgctaactacgaagatcgctttgtggtgccgagtagtcatcgtgaactggcacgggaagccttcccggagaaaaatggctgcggctttacctttggtgatggctgccacggttcagataccaaattcaatctgttcaacagccgtcgtatcgatgccatcgatcatcaacaagagatgtttgaggcgattgccgcgtcgaaaaatctgccaaaagaggatgcccatgcgctgggcattttcctgcgcgatttaacgacgatggatccgctcgatgcccaggcgcagtacagcgaactgttcgaccgtggccgcgccacgtcactgttgctgtttgaacatgtgcacggcgaatcccgcgaccgcggccaggcgatggtggacctgctggcgcagtacgagcagcacggcttgcagtaa

SEQ ID NO: 18325 - DNA, 883 bp, Homo sapiens
  SIMILAR (287)..(391): 1001254mologous to Escherichia coli K12 putative DNA binding protein,accession number AE000116,Smith-Waterman Score=183.
gtggccgctcaggcggtcaccgtattcgataataaatgggtctggaaaaagtgcagcatctggcagcgtaatgcaggtagcccagttcaactctcactaccagtatgatcccaagttcgagcgcggaatgtatctgtatgagcatcgtcgctgtttcaataacatcatcgactactgtaactcactttgctatcacgcatggctggtggcacataaggatgatatagagcgcaattaccggggaccactggtacaagttgttgggtggtgtgacgccattttcggcgcagaagaattagggatctcccgcgctcagtttgaccagtttttgcgcatgatgcagggcggtgcacagtttggcggcggttatcagcagcaaactggcggtggtggccgccctggcggtcacttctttgagaaaaggcgtttactcagaatggtggacaggctcaatgcacggtttacgggaggggttctggtttcctttaagggtccattattggaaggatttgggccctggcaagggcttagcccttgggtcattggcccggatttgggtctacccggggtctgggggcctggggggccgtttccgtgtgtcactgtccgtgggtgtgtaaaaccggttccccatttcggtgggttccacatcggcggtttcaccctcccccgggttgaaaatttccggaaaattggatggggttttgctcttcccgcacttgttcgggccttttttcccatccacattccccaaccatggcgtttaaaaacttcgaattgggtcacgggacccccccccgaggtacccggaatcgacccaccatgtcatcgaacacctatcgcccacaccgtttccaataatatgccgaagccagaatattaa

SEQ ID NO: 18326 - DNA, 2586 bp, Homo sapiens
  SIMILAR (619)..(1365): 931254mologous to Escherichia coli K12 putative frameshift suppressor,accession number AE000501,Smith-Waterman Score=1188.
atgacaaccgaaacgcgttccctctatagtcaacttccggctattgatcgcttattgcgcgatagctccttcctttctttgcgtgatacttatggtcacacccgcgtggtggaattgttgcgtcagatgctcgacgaagcgcgagaagtgattcgtggcagccagacgctgcctgcgtggtgtgaaaactgggcgcaagaagtcgatgcccggttgacgaaagaacggcagagcgcgctgcgtccggtgatcaacctgacgggaaccgtgctgcataccaaccttgggcgagctttacaggcggaagccgcggtggaagccgttgcgcaggctatgcgttcgccagtgaccctcgagtatgatctggacgacgccggacgcggacatcgcgatcgggacgtggcgcagctgctgtgccgtattacgggggcggaagatgcctgtatcgtcaataacaatgcggcggcggtgttattgatgttggcggccactgccagcggaaaagaggtggtggtatctcgcggcgaactggtggagattggcggcgcgtttcgtattcccgatgttatgcgtcaggcaggctgcaccctacacgaagtagggaccaccaaccgcacgcacgcgaatgattatcgtcaggcggtgaatgaaaataccgcactgttgatgaaaggggcggaaagggcgattgttctcttttctcctgtctactcaaaacatgaagatggcaggtttcttgatagcaacagcactatcctcaatgttgctgtctcacgcgctaaagatagttttctggtatttggcgatatggaccttatcgagatgcagcccgcattttcgccgcgagggttattggcaaaatatctcttttcttcagataataatgcgttgcaatttgagtttcagaaacgacaggatttaatttccgcacatacacaaatttcaacgctgcatggtgtggagcagcatgatgaatttttgaacaagactcttgccggagctcaaaagaaaataacgattatttccccttggttatcctggcaaaaagtggagcaaacgggatttctggcatcaatggctttggcccgttcccggggcattgatattaccgtggtgacggataaaaactgcaatatagcgcatgtcgatgatgataagcgtcaggagaaacaacatctgctgaatgatgctgttgaaaagctcaataagatgggtatcgctacgaaattggttaatcgtgttcacagcaaaattgtgattgaggatgaagaactgctgtgtgtcggatcttttaactggttcagtgctacacgggaagataagtatcaacgatacgatacgtctttggtgtaccgtggtgaaggcaatccgtcgacttataatcgccagaacggcatatcaggacggtgctgcgaacgctgtggcccaaaacgttccagtaaactgtgtagatgttcaccgaaccggtcgatggatgcacatttaaagcgatatggtaaacctgtgtacgactatttggcatccgaccgtgatctgccgtccgtttacgccgcgtttgaaagtacgataagcaatccggaagtcttacaggcgaaacctcagcgaagagagatgcgagtttggcgtcacattaacgacacgctggtttcttccatcaaaatcattgcgatgatgctgttgatcatcggtggtggcggtgcgttcaagcaggtgctggtagacagcggcgtggacaaatacattgcttccatgatgcacgaaaccaacatttctccgctgctgatggcctggtcgattgctgccgtactgcgtatcgcgctgggttccgcaaccgttgcggcaatcactgcgggtggtatcgcggcaccgctgattgcaacgacgggtgttagcccggagctgatggttattgcggttggttccggtagtgtgattttctctcatgtgaacgatccgggcttctggctgttcaaagagtactttaacctgactatcggcgagaccatcaaatcctggtcgatgctggaaaccattatctcggtgtgcggtctggaaattgacagcaaccgccccattgctgtgccagtcgttggtgatattgcatccagtatgcaaggtatgctggcagaactgaaacaaaacacatttacgactccactggtatggcgcgatattttaaatatccacaagcagcaaaatgcacaaaaaatgcatgaaaaattaagtacagatactcaaccattaaattactttaatgcattaagtgctgtgcgcgacgtattgcgcgagaaccaggatatttatttagttaatgaaggtgcaaataccctggataatgcacgaaatattattgatatgtataaaccacgtcgtcgtctggattgtggtacctggggtgtcatgggcatcggtatgggctatgccatcggtgctagcgtgacttctggttctccggttgtcgccattgaaggtgatagtgcttttggtttcagtgggatggaaattgaaacgatttgtcgatataacctgccggtgacgatcgttatttttaataatggcggcatctacagaggagacggtcgttga

SEQ ID NO: 18327 - DNA, 831 bp, Homo sapiens
  SIMILAR (418)..(828): 921254mologous to Escherichia coli ORF-a1,accession number U16247,Smith-Waterman Score=638.
atggatgagaaaaagaatcctaacttgggagtggtggtggacacctttaatcgcagcatgggatgtgagcgacctatgaaaacatgttggcaaatcctcgaaattgaaagcacgacgcaaatagacattatccgccaggcttatcttgctcgcttaccgttgtgtcatcccgaaaccgatccgcaagggtttaaagcattacgccaggcctatgaagaggccctgcgactggcggtaaatcctgtcgaggaagcagatgatgaagaaaaagatgctgccgctgaacatgaaatactacgtgcattcaggacattactggattcagaaagtgatcgttttcagccttccgcctggcagaaatttattcagcaattaaatacctggaacatggaggatgtcgatcaattacgctggccgctccgtcttccagcagctgctactttctgtgatatcgatgataaagccacgattccactattgattaatctgttaaaagatccaaatggagatgtcagaaactgggccgcatttgcaataaatatcaataaatatgataatagtgatattagggattgttttgtggagatgcttcaggataaaaatgaggaagtccgtattgaagcaataatcggactttcctacagaaaagataaaagggttttatctgttttatgcgatgagttaaaaaaaaatactgtttatgatgatatcattgaagctgcgggtgaattaggtgataaaacgctacttcctgttttagatactatgttgtacaagtttgatgacaatgaaattataacttccgctattgataagctgaagcgttcatag

SEQ ID NO: 18328 - DNA, 1092 bp, Homo sapiens
gttcgaaggttgaaccgattccgcaaaatggaccgtgcggtgacaacagcctggtggcgcttaaattgcttagcccggatggtgataatgcatggtcggtgatgtataaactaagccaggcgttaagcgacatcgaagttccatgttcggtgctggagtgtgaaggatgtgagcgacctatgaaaacatgttggcaaatcctcgaaattgaaagcacgacgcaaatagacattatccgccaggcttatcttgctcgcttaccgttgtgtcatcccgaaaccgatccgcaagggtttaaagcattaccgccaggccttgaagaagcccctgcgactgccggtaaatcctgtcgaggaagcagatgatgaagaaaaagatcttcccgctgaccatgaaatactacgtgcattcaggacattactggattcagaaagtgatcgttttcagccttccgcctggcagaaatttattcagcaattaaatacctggaacatggaggatgtcgatcaattacgctggccgctgtgtgcaatcgccatagaagcgcgatatctttcattaaattgtgcttctttgctggcagagcgtttgaactggcattcatttaatgacagcgaaggaatggatgaggaagaaagggaggcttttcttgaggccattcaggctggtgattgtttcgatttccttagccttctggaatatcccattgcgttgcagaaccagactgttgagtattacttcgcgctggaacgttgctgccgttaccatcctgactatgtcactgcgtttttggcgatggaaagtccgtggttaattcctgatgatgcaaagttacatcgcaaactgttgcgctggtacagctcggtgcaaacaggtatggcggaactcattcctgtcgctcaacagtggcaaacggaagaaccagaaagcgaagatgcccggtattacttgtgtgcacaacgtttgtactgcggcgagggggaaagcctgcttgccgatctctgcgcgtactgggaaagttacccatctacacaagctgataatttgttgttgcagtggagcaagcgtcattgccggattattcgcgtataa

SEQ ID NO: 18329 - DNA, 1737 bp, Homo sapiens
  SIMILAR (487)..(1365): 791254mologous to Escherichia coli Respiratory nitrate reductase 1 beta chain (EC 1.7.99.4),accession number D90758,Smith- Waterman Score=1203.
atgaagccaaatggagggagccgtcataaccctcttgaagctgaaacaatagcagcatggctggtggcacataaggatgatatagagcgccattacggggaaccactgtacaaagttgttggtgttgtgacgccattttcggcgcaggttaatgctatcaaaatgtcattgcgtaacgtggaaattaatggcaaagacgagcagggtttactgacagtggggactgtgcactccttgcagggggcggaaagggcgattgttctcttttctcctgtctactcaaaacatgaagatggcaggtttcttgatagcaacagcactatcctcaatgttgctgtctcacgcgctaaagatagtttcctggtatttggcgatatggacttatcgagatgcacccgcattttcgccagcgagaacgacagatttatttcgcacatcacaatttcacgctcatggtgtgagcacatgatgatttcagaggatcccggctggatccgtaaaatcaacggcaaactgcagccgcgcatgggtaaccgtgccatgctgctgggtaaaatcttcgctaacccgcatctgccggggatcgacgattattacgagccgttcgattttgactatcagaacctgcataccgcgccggaaggcagcaaatcgcagccgattgcccgtccgcgttcgctgattaccggggaacggatggcgaaaatcgaaaaagggccgaactgggaagatgacctgggcggtgagtttgacaaactggcgaaagacaagtacttcgacaacatccagaaggcgatgtatagccagttcgaaaacaccttcatgatgtatttgccgcgcctgtgcgaacactgcctgaacccggcatgtgtggcgacctgcccgagcggtgcgatttacaagcgtgaagaagatggcatcgtcctgatcgaccaggataaatgccgtggctggcgtatgtgcatcactggatgcccgtacaaaaaaatctacttcaactggaagagcggtaagtctgagaagtgcatcttctgctatccgcgtattgaagcgggtcagccgaccgtgtgctcagaaacctgtgtcggtcgtatccgttatcttggcgtgctgttgtacgatgccgacgctattgaacgacgtctctactggcaatcttctcagtgcgaagacaacacttcgctacgcgaggcgctaaccctgtacaaatacgatagcgccgggagtcgtatgttcgaagagctggcagcgggaagcgatcgtttctatgccacgcttccctggcagccattaactgtccagtctgaatgcccggtaacgcttaaggatgcttatcttgctcgcttaccgttgtgtcatcccgaaaccgatccgcaagggtttaaagcattacgccaggcctatgaagaggccctgcgactggcggtaaatcctgtcgaggaagcagatgatgaagaaaaagatgctgccgctgaacatgaaatactacgtgcattcaggacattactggattcagaaagtgatcgttttcagccttccgcctggcagaaatttattcagcaattaaatacctggaacatggaggatgtcgatcaattacgcttggcgctgtgttgcatcgccatagaagcgcgatatctttcattagattgtgcttctttgcgtgcagaccgtttgaactggcattcatttaatgacagcgaagaatggattaggaaaaaggaaggtttttcttga

SEQ ID NO: 18330 - DNA, 2205 bp, Homo sapiens
  SIMILAR (1)..(936): 1001254mologous to Escherichia coli glycerol-3-phosphate dehydrogenase (EC 1.1.99.5) chain A, anaerobic,accession number D90855,Smith-Waterman Score=1586.
atgaaaactcgcgactcgcaatcaagtgacgtgattatcattggcggcggcgcaacgggagccgggattgcccgcgactgtgccctgcgcgggctgcgcgtgattttggttgagcgccacgacatcgcaaccggtgccaccgggcgtaaccacggcctgctgcacagcggtgcgcgctatgcggtaaccgatgcggaatcggcccgcgaatgcattagtgaaaaccagatcctgaaacgcattgcacgtcactgcgttgaaccaaccaacggcctgtttatcaccctgccggaagatgacctctccttccaggccacttttattcgcgcctgcgaagaagcagggatcagcgcagaagctatagacccgcagcaagcgcgcattatcgaacctgccgttaacccggcactgattggcgcggtgaaagttccggatggcaccgttgatccatttcgtctgaccgcagcaaacatgctggatgccaaagaacacggtgccgttatccttaccgctcatgaagtcacggggctgattcgtgaaggcgcgacggtgtgcggtgttcgtgtacgtaaccatctcaccggcgaaactcaggcccttcatgcacctgtcgtggttaatgccgctgggatctgggggcaacacattgccgaatatgccgatctgcgcattcgcatgttcccggcgaaaggatcgctgctgatcatggatcaccgcattaaccagcatgtgatcaaccgctgccgtaaaccttccgacgccgatattctggtgcctggcgataccatttcgctgattggtaccacctctttacgtattgattacaacgagattgacgataatcgagtgacggcagaagaggttgatattctgctgcgtgaaggggaaaaactggcccccgtgatggcgaaaacgcgcattttgcgggcctattctgcgtgcgcccgctggttgccagcgatgacgacccgagcggacgtaacgtcagccgtggcatcgtgctgctcgaccatgctgaacgcgatgaacccgctgaagttaccttgcgtaaagtcatctccctgcctgccccgctgcggttctgcggtttatcgtcatggcgatcgcacgcctgcctggctgagcgaaggccgtctgcaccgtagcctggtatgtgagtgcgaagcggtaactgcgggtgaagtgcagtacgcggtagaaaatttaaacgttaatagcctgctggatttacgccgtcgtacccgtgtggggatgggcacctgccagggcgaactctgcgcctgccgcgctgccggactgctgcaacgttttaacgtcacgacgtccgcgcaatctatcgagcaactttccaccttccttaacgaacgctggaaaggcgtgcaacccatcgcctggggagatgcactgcgcgaaagcgaatttacccgctgggtttatcagggattgtgtgaaatagagctgccggaactggatgtgctgcgcaataacgccaccgaatttcgcgcggtgaatatcgcccgtttccttgataatgaagaaaactggccgctgttacttgatgcgcttattcctgtcgccaatacctgcgaaatgatcctgatgcccgcctgcttcggtctggccgatgacaaactgtggcgttggttgaatgaaaaactaccttgttcactgatgcttttgccaacgctgccgccttccgtgctgggcattcgtctgcaaaaccagttacagcgccagtttgtgcgccagggtggcgtgtggatgccgggcgatgaagtgaaaaaagtgacctgtaaaaatggcgtagtgaacgaaatctggacccgcaatcacgccgatattccgctacgtccacgtttcgcggttctcgccagcggcagtttctttagtggcggactggtagcggaacgtaacggcattcgagagccgattctcggccttgatgtgctacaaaccgccacgcggggtgaatggtataagggagatttttttgcgccgcaaccgtggcagcagttcggtgtaaccactgatgagacgtacgcccgtcacaggcagggcaaaccattgaaaacctgtttgccatcggttcggtgctgggcggatttgatcccatcgcccagggatgcggcggcggtgtttgtgccgtcagtgctttacatgccgctcaacagattgcccaacgcgcaggaggccaacaatgaatga

SEQ ID NO: 18331 - DNA, 5301 bp, Homo sapiens
  SIMILAR (853)..(1695): 921254mologous to Escherichia coli CG Site No. 946,accession number U00006,Smith-Waterman Score=1394.
atggcctggctgttgattatttacattctgccgttagtcggaattattgcctatcttgccgttggcgagctccatttaggcaaacgccgcgctgaggcccatttgcgattgtggccttccaccgcaaaatggcttaacgaccttaaagcctgtaagcatatcttcgccgaagaaaatagcagtgtcgctgcgccattattcaagctttgcattgcgtcgtcaggggattcgctggaggtcaaagggaatcagctacaactgatgaccgagtcagatgatgtgatgcaggcgttaatccgcgacatccagctcgcgcgccataatattgagatggtgttttatatctggcagcccggcggcatgggcggaccagttcgaataccgcgtctgtcgtggtgctatgtacggcaccagatgaagcgacagccaggatttagccgccaaagtgctggcggaaaaactggcggcctgcgcgaccttgatccccggcgctacctctctctattactgggaagtctcatcatccatatcaaaccccggaacttctggttttacctgttacacacggagacacagattacctctcatggctcaacgcatctttacgctgatcctgctactttgcagcacttccgtttttgccggattattcgacgcgccgggacgttcacaatttgtccccgcgatcaagcctttgcttttgattttcagcaaaaccaacatgaccttaatctgacctggcagatcaaagacggttactacctctaccgtaaacagatccgcattacgccggaacacgcgaaaattgccgacgtgcagctgccgcaacgtcctggcatgaagatgagttttacgcaaaagcaagatttacccgcatcggctgacgcttcccgtcaccatcaaccaggcaatgccggagcacgttttttaagtaaaacgctttatggcgcgctggagcataactttactgatgcctggagcggctttgtgcgcggctatggctatgataaccgtaccaattatgacgcgtattattctcccggttcaccgttgctcgatacccgtaaactctatagccaaagttgggacgccgggctgcgctataacggcgaactgattaaatcacaactcattaccagctatagccatagcaaagattacaactacgatccccattatggtcgttatgattcgtcggcgacgctcgatgagatgaagcaatacaccgtccagtgggcaaacaatgtcatcgttggtcacggtagtattggtgcgggtgtcgactggcagaaacagactacgacgccgggtacaggttatgttgaggatggatatgatcaacgtaataccggcatctatctgaccgggctgcaacaagtcggcgattttacctttgaatgcgcagcacgcagtgacgataactcacagtttggtcgtcatggaacctggcaaaccagcgccggttgggaattcatcgaaggttatcgcttcattgcttcctacgggacatcttataaggcaccaaatctggggcaactgtatggcttctacggaaatccgaatctggacccggagaaaagcaaacagttggaaggcgcgtttgaatgcttaaccgctggggtgaactggcgtatttccggatatcgtaacgatgtcagtgacttgatcgattatgatgatcacaccctggaatatttacaactaagaactcaccccggaagggtttctacggtcaaggttttttactgtcggaactttgaaaaaaactgcgcggaccttacgaacatcatccgaaaaggaggaactatgaaggctgcagttgttacgaaggatcatcatgttgacgttacgtataaaacactgcgctcactgaaacatggcgaagccctgctgaaaatgcagtgttgtggtgtatgtcataccgatcttcatgttaagaatggcgattttggtgacaaaaccggcgtaattctgggccatgaaggcataggtgtggtggcagaagtgggtccaggtgtcacctcattaaaaccaggcgatcgtgccagcgtggcgtggttctacgaaggatgcggtcattgcgaatactgtaacagtggtaacgaaacgctctgccgttcagttaaaaatgccggatacagcgttgatggcgggatggcggaagagtgcatcgtggtcgccgattacgcggtaaaagtgccagatggtctggactcggcggcggccagcagcattacctgtgcgggagtcaccacctacaaagccgttaagctgtcaaaaattcgtccagggcagtggattgctatctacggtcttggcggtctgggtaacctcgccctgcaatacgcgaagaatgtctttaacgccaaagtgatcgccattgatgtcaatgatgagcagttaaaactggcaaccgaaatgggcgcagatttagcgattaactcacacaccgaagacgccgccaaaattgtgcaggagaaaactggtggcgctcacgctgcggtggtaacagcgttgatgctgtccgtgcaggcggtcgtgttgtggctgtcggtcaccgccggagtctatgagcctggatatccacgtcttgtgctggactgtattgaagtcgtcggtctaattctatgcaatatgatgtctatacccagacggaggtctgtaatggcaaaccatcgaggcggttccggcaattttgcagaagaccgcgaaagagcatcagaagcaggtaaaaaaggtggacagcacagcgtgggtaatttcaagaatgacccgcagcgcgcatctgaagcagctcgtcaaaaagccatcaccgccggttacccggtggttgatactgatgacaaatgtgtcaggcgttacgccacaaaccggaaacacctttccaaacatcacttcaatcccgcccttttcggtcctatgcttccgtatccgggattcttaaattcccattttcagcttacatgcctgcagtacaaaaatgattatccggacgactataacgaaaaagcggaacaggagctgacggcgaacgaaatcttcatgcagtacgtactgccgaacaaactgctgtggtatatcgccatcgccaacgtgttcgtttatctgctgcgttacggcatcctcgactggtcaccgacttatctgaaagaggttaagcatttcgcgctagataaatcctcctgggcctacttcctttatgaatatgcaggtattccgggcactctgcttcttccgtggcaaccgtggggcaaccggcgttttctttatgacactggtgaccatcgcgactatcgtttactggatgaacccggcagtaacccaaccgtcgatatgatttgtatgattgttatcggcttcctgatcaacggtcctgtgatgctgatcggtctgcatgcgctggaactggcaccgaaaaaagcggcaggtacggcagccggctttaccgggctgtttggttacctgggccgttcggtggcgccagcccgatttgttggctacacgtggacttcttcggccgggatggccgctttatggtccatttacaacgtgccgctggttaccatcatcattatgggctttttcttcccgcgcatcccggcgctggcggcaaaagtagcgatggggattggcataatcagctacatcaccatcaactatctggtgaagttcgacttccatttcctctatgtgctggcctgtacgttctgcatcaacgtggtcgtgatgctggtgatcggttttatcaaaccgcgcgccacgccgttcaccttcaaagatgcgtttgcggtggacatgaaaccgtggaaaaacgtcaagatcgcgtcaattggcatcctgttcgcgatgattggcgtctatgccgggctggctgaattcggcggctacggtacgcgctgcggtaaaccgcggaatacgcaaaatattgataatctggccgccgaaggtattcgcttaattccgcctacaccgttcaccggttgtacgcctgaacgggccggactattaccggtatcaagcctaacagttccgcccctggacaacaacttcgcgcagcaaaaacatccccatatggggccctatttaagaaggccgactgaccatcctgcgctggaaaacgtcaatttcgccctgaaacccggtcagatgctgggtatctgcgggccgactggttccggcaaaagtaccctgttgtcgctcattcagcgtcatttcgacgtcagcgagggggatattcgctttcatgatattcctctgacgaagttacaactcgatagctggcgtagcgcctggcggtatgttagccagacgccattccttttttctgacactgtggcgaataacatcgcgctgggttgcccgaatgccacccagcaagagattgagcatgtcgcgcggttagccagcgtacatgacgatattttgcgtctaccgcaagttacggatacagaggtgggcgagcgcggtgtgatgccttccggcgggcaaaaacagcgtatctccattgctcgtgcgttattagtcaacgcggaaatcctcatccttgatgatgcgctttcggcggtggacggacgcactgagcaccagatcctgcataacctgcgtcagtgggggcaaggaagaacggtaatcatcagtgcccatcgcctttctgcactgacggaagccagtgaaattattgtgatgcagcacggacatatcgcccagctggcaatcatgatgtgctggacaacaaagcggctgttccggatggctattgagcagcaaggcaacgttagtttgcggtccggtagacacaatggtgacaggttccgcactttcacgcagcgttttcgccatcagctctaccgccgtacagttttgcggtgcgaatgtcggttccgatcacccgattcgccactttacggcaaagcccatttcgtgggtcaccaccatcatggtcattccttcgttcgccagttccaccatcacgtccagtactcgttgatcatctccggatccagcgccgatgtcgtgcgccggaaacttattggcgtgagcagaaagcccgacacgctccagcagtttcagggctttttcacgagccggcgctttatcgcgtttaagcactttcacctgcgccagggtcaggttttcgataatcgacagatgagggaacagctcgaaatgctggaataccatcccgacgcgggaacgcagctttgccagatcggttttcttgtcgttaaccacgataccatcgacggtgatttcaccttgctgcaccggttcgaggccgttgacggttttaatcagcgttga

SEQ ID NO: 18332 - DNA, 990 bp, Homo sapiens
  SIMILAR (190)..(954): 991254mologous to Escherichia coli valyl-tRNA synthetase,accession number X05891,Smith-Waterman Score=1360.
cgggccacccggcggcaaattaggaataagatggggaaccaactctcccaaatttgtcccccccggttttaaaaaaagggggaaaccttccttccctaaaaaaaaattcctcaaaaacaactggcgcccaaaccctataaaggcgtcggcggggcctggtttcaccctgaatccgccaccctggaaataatggaaaagccatataacccacaagatatcgaacagccgctttacgagcactgggaaaagcagggctactttaagcctaatggcgatgaaagccaggaaagtttctgcatcatgatcccgccgccgaacgtcaccggcagtttgcatatgggtcacgccttccagcaaaccatcatggataccatgatccgctatcagcgcatgcagggcaaaaacaccctgtggcaggtcggtactgaccacgccgggatcgctacccagatggtcgttgagcgcaagattgccgcagaagaaggtaaaacccgtcacgactacggccgcgaagctttcatcgacaaaatctgggaatggaaagcggaatctggcggcaccattacccgtcagatgcgccgtctcggcaactccgtcgactgggagcgtgaacgcttcaccatggacgaaggcctgtccaatgcggtgaaagaagttttcgttcgtctgtataaagaagacctgatttaccgtggcaaacgcctggtaaactgggatccgaaactgcgcaccgctatctctgacctggaagtcgaaaaccgcgaatcgaaaggttcgatgtggcacatccgctatccgctggctgacggtgcgaaaaccgcagacggtaaagattatctggtggtcgcgactacccgtccagaaaccctgctgggcgatactggcgtagccgttaacccggaagatccgcgttacaaagatctgattggcaaatatgtcattctgccgctggtaaccgtcgtattccgatcgtggcgacggaccgagtga

SEQ ID NO: 18333 - DNA, 2617 bp, Homo sapiens
atgttcctggactattttgcactgggagtgcttatttttgtatttctggtgatcttctatgggatcattattttacatgatattccctacctgattgccaaaaaacgtaatcatcctcatgccgacgccattcatgttgctggttgggtgactggtgtggtgattgaagtgacggataagaaaaatacgctgattaaaaaagatagaactcgagcttgtacccttctggacaatgacaccaccgtcgatggcttaagcgccgttgagcaactggtgtgtgaaattgccgcagaacattggcgcagcggtaagcgcgtgctcatcgcctgtgaagatgaaaagcaggcttaccggctggatgaagccctgtgggcgcgtccggcagaaagctttgttccgcataatttagcgggagaaggaccgcgcggcggtgcaccggtggagatcgcctggccgcaaaagcgtagcagcagccggcgcgatatattgattagtctgcgaacaagctttgcagattttgccaccgctttcacagaagtggtagacttcgttccttatgaagattctctgaaacaactggcgcgcgaacgctataaagcctaccgcgtggctgatatcgaacagccgctttacgagcactgggaaaagcagggctactttaagcctaatggcgatgaaagccaggaaagtttctgcatcatgatcccggcgacgaacgtcaccggcagtttgcatatgggtcacgccttccagcagaccatcatggataccatgatacgcgaatgcaagggcttttacaccctgtggcaggtcggtactgaccacgccgggatcgctacccagatggtcgttgagcgcaagatggccgcagaagaaggtatatacccgtcacgactacgcccgcgaagcttgcatcgacaaattctgggaatggaaagcggaatctggcggcaccattacccgtcagatgcgcccgtctcggcaactccgtcgactgggagcgtgaacgcttcaccatggacgaaggcctgtccaaatgcggtgaaagttcgatgtgggcacatccgctatccgctggctgacggtgcgaaaacctcagacggtaaagattatctggtggtcgcgactacccgtccagaaaccctgctgggcgatactggccgtagccgtttaacccggaagatccgcgttacaaaggagctgattggcaaatatgtcattctgccagctggtaccgcgccaggtgtgcgccagggtcctgtgtggatgccgggcgatgaagtgaaaaaagtgacctgtaaaaatggcgtagtgaacgaaatctggacccgcaatcacgccgatattccgctacgtccacgtttcgcggttctcgccagcggcagtttctttagtgtcggactggtagcggaacattgcccaacgcgcaggaggccaacaatgaatgacaccagcttcgaaaactgcattaagtgcaccgtctgcaccaccgcctgcccggtgagccgggtgaatcccggttatccagggccaaaacaagccgggccggatggcgagcgtctgcgtttgaaagatggcgcactgtatgacgaggcgctgaaatatggcatcaactgcataacgttgtgaagtcgcctgcccgtccgatgtgaagattggcgatattatccagcgcgcgcgggcgaaatatgacaccacgcgcccgtcgctgcgtaattttgtgttgagtcataccgacctgatgggtagcgtttccacgccgttcgcaccaatcgtcaacaccgctacctcgctgaaaccggtgcggcagctgcttgatgcggcgttaaaaatcgatcatcgccgcacgctaccgaaatactccttcggcacgttccgtcgctggtatcgcagcgtggcggctcagcaagcacaatataaagaccaggtcgctttctttcacggctgcttcgttaaaaacaaccatccgcagttagcggaacaggagctgccggcgaagcaaatcttcatgcagtacgtactgccgaacaaactgctgtggtatatcgccatcgccaacgtgttcgtttatctgttgcgttacggcatcctcgactggtcaccgacttatctgaaagaggttaagcatttcgcgctagataaatcctcatgggcctacttcctttatgaatatgcaggtattccgggcactctgctgtgcggctggatgtcggataaagtcttccgtggcaaccgtggggcaaccggcgttttctttatgacactggtgaccatcgcgactatcgtttactggatgaacccggcaggtaacccaaccgtcgatatgatttgtatgattgttatcggcttcctgatatacggtcctgtgatgctgatcggtctgcatgcgctggaactggcaccgaaaaaagcggcaggtacggcagcgggctttaccggactgtttggttacctgggcggttcggtggcggcgagcgcgattgttgggtacaccgtggacttcttcggctgggatgtcggctttatgctatcacatgaattatgggagtctgagttcactaaactaaaatacgaatataataattcttgtcctgccagcgtctcaggatggttgtga

SEQ ID NO: 18334 - DNA, 1309 bp, Homo sapiens
  SIMILAR (568)..(1188): 991254mologous to Escherichia coli PutA,accession number U05212,Smith-Waterman Score=1031.
atgaacgacgtttccttcatgatttctggagatgcaatgaagattattacttgctataagtgcgtgcctgatgaacaggatattgcggtcaataatgctgatggttcattagacttcagcaaagccgatgccaaaataagccaatacgatctcaacgctattgaagcggcttgccagctaaagcaacaggcagcagaggcgcaggtgacagccttaagtgtgggcgtgatctctagctcagacagcacgcagggctgtcagcacccaattttcggcatcttcttgcatgaggtcgcgatgatgtcgcatctcccagtcgccaaaaaacatttcgttgagttcaggtatgatttgcacggggagctggcggtcactgagaaccagtcgcgcgataaattttaccggcaggctgaaggtgaagatcttccgggttatgtgtcaaatgatcttccagccattgctggtattgcggttgcgccatttcaagtgggtaacctggacgccgacagacgatcaaatgtgcattgtcgagtatcgtttcgtattcgtaccaggtcggaaaggtcatctctgccggagctacctgcgctgctttctggcgcggccaatgagagcgatgaagcaccgactccggcagaggaaccacaccagccattcctcgactttgccgagcaaatattgccccagtcggtttcccgcgccgcgatcaccgcggcctatcgccgcccggaaaccgaagcggtttctatgctgctggaacaagcccgcctgccgcagccagttgctgaacaggcgcacaaactggcgtatcagctggccgataaactgcgtaatcaaaaaaatgccagtggtcgcgcaggtatggtccaggggttattgcaggagttttcgctgtcatcgcaggaaggcgtggcgctgatgtgtctggcggaagcgttgttgcgtattcccgacaaagccacccgcgacgcgttaattcgcgacaaaatcagcaacggtaactggcagtcacacattggtcgtagcccgtcactgtttgttaatgccgccacctgggggctgctgtttactggcaaactggtttccacccataacgaagccagcctctcccgctcgctgaaccgcattatcggtaaaagcggtgaaccgctgatccgcaaaggtgtggatatggcgatgcgcctgatggagattaagtacctaattctgcgccatggattcggagaaatgctgagaaagctggtgaccgatatctgcgagttcatgacaattacagcccacttgatgcgaaaatacgataccatggtcg

SEQ ID NO: 18335 - DNA, 371 bp, Homo sapiens
  SIMILAR (202)..(351): 701254mologous to Escherichia coli glutathione transferase,accession number D38497,Smith-Waterman Score=172.
cctcgtcagtgtggatttatgaaaaaacgtctcgaaaacggtgacgattactttgccgttaaccctaggggcaggtgcctgcattgctgctggatgacggtactttgctgacggaagcgtagcgattatgcagtatcttgccgacagcgtccccgaccgccagttctggcaccggtaaacagtatttcccgctctgtttcgccctatacaccggaagagtacaaaccgacagttcgcgcgcagctggagaagaactgcaatatgtgaacgaggcactgaaggattgagcactgggatctgcggcaaagatttacaattgctgatgcctatctgtttacggttctgcgctgggatacgcggtgaaactgaat

SEQ ID NO: 18336 - DNA, 489 bp, Homo sapiens
  SIMILAR (256)..(453): 591254mologous to Escherichia coli glutathione transferase,accession number D38497,Smith-Waterman Score=164.
gcggtcgttcccgtacggagctttgctggatccgaaaactggtacgctgtcgatgaccattcaggcgatgtgcgtggcggcaccgttccgagttacgctgattccgatctatatcggtttgagcacgtcatggaagtgggtacttacgccaaaggaactgcgcggcgcacgaaagagaaagagagcctgccgcagatgctgcgcgggtttaagcaacgtccccgaccgccagttgctggcaccggtaaacagtattcccgctataaaaccatcgaatggctgaattacatcgccaccgagctgctaaaggtttcacacctctgtttcgccctgatacaccggaagagtacaaacgacagttcgcgcgcagctggagaagaagctgcaatatgtgaacgaggcctgaaggatgagcactggatctgcgggcaaagatttacaattgctgatgctatctgtttacggttctgcgctgggcatacgcggtga

SEQ ID NO: 18337 - DNA, 3810 bp, Homo sapiens
  SIMILAR (766)..(1479): 911254mologous to Escherichia coli K12 putative cellulose synthase,accession number AE000430,Smith-Waterman Score=1146.
atgacctaccggaacaaccaccagactggtgtagcctttctctttcagaccaaattctgcatcgaggatggcggcgtcaaaaccttcgatgggtaccgcgtccagacccagagccgccacgccgagcaggaagttaccgacgttgagataaacctgttttgccatccactctgcatcatcatgcagatctttacggtgcatatcagcgaagaacttgcgacctttatcgttcgcggctttcgcttccggcgtggcaaagcggccatcggcatcttcctggtcaacaaccagcttcagccagacatcgtccatcgcggtttttgcacagaacaccacgacgtgcgaggcatcaagcattttacgctcgttgaacacgtaattaccggcagcggatttggcaacacgcgctttaccttcttccgtgctggcaacaataaaatgccacggctgggagttggtgctggatgggctgtattgcaaggcgtcccggtgcgcttcggggtatggcctttgccggaatatccagcgtacgcctgcggaaaattcaatggcgccatacgggcaggcgatgccgcacagcttgcagcttacgcacaggctttcattcaactgcacggccccatcgacgcgggtgatggcgttaaccgggcagaccaccgcgcaggcgattttttcgagatagtgttccagaacctgttcgcgatcgcggatgttgaccttgccatcaatcatgccgtcaatgctcagttgcgcctgcgcaatccgctgtttgtcttcgccatcttttgtttcgacgtaatactcgatggtgtggctgttaaagccatccgccagggtgacccgtttaacccgctggcgcagtttatcttcctgatgctgctgtggggggtagcgctgatcgtacggcggatgccggggcgcttctcggcgctaatgttgattgtgctgtcgctgaccgtttcttgccgttatatctggtggcgttacacctctacgctgaactgggacgatccggtcagcctggtgtgcgggcttattctgctcttcgctgaaacgtacgcgtggattgtgctggtgctcggctacttccaggtagtatggccgctgaatcgtcagccggtgccattgccgaaagatatgtcgctgtggccgtcggtggatatctttgtcccgacttacaacgaagatctcaacgtggtgaaaaataccatttacgcctcgctgggtatcgactggccgaaagataagctgaatatctggatccttgatgacggcggcagggaagagtttcgccagtttgcgcaaaacgtgggggtgaaatatatcgcccgcaccactcatgaacatgcgaaagcaggcaacatcaacaatgcgctgaaatatgccaaaggcgagttcgtgtcgattttcgactgcgaccacgtaccaacgcgatcgttcttgcaaatgaccatgggctggttcctgaaacgaaaggagggcgggggaaaaaggaagcagaagaagcgccaactgggccccgggactcgggcgaatgcctccgaaagcgcgttacgccgtgtactacacccgcgcatccaactcgtggaggggcgtccgaacatagcactcgaagagcgacccgaaaggcacaccgcgacctgcaagagccggaatgatgcgaaacgcccggacgattttataaggcacgattgcggacagatcgcccaggagatgcagaaaaacggtggcttgatcactaaagaagatttagcagcctataaagcggtcgaacgcactccgataagcggcgattatcgcgggtatcaggtttactccatgccaccgccatcctccggcgggatccatatcgtacaaatcctcaatattctggaaaacttcgatatgaagaaatacggctttggcagcgccgatgcgatgcaaatcatggcagaagcggagaaatacgcctacgccgaccgctcggaatatcttggcgacccggattttgtcaaagtaccgtggcaggcgctgaccaataaagcctatgccaaatctattgccgatcaaattgatatcaataaagcgaagccatccagcgaaattcgccccggcaagcttgcgccttatgagagtaatcaaactacccattactcagtggtggataaagatggtaacgcggtggcggtgacctatacgctgaacaccaccttcggtacgggcattgtcgcgggcgagagcggtattctgcttaataaccagatggatgatttctccgccaaaccgggcgtaccgaacgtttacgggctggtgggcggtgatgccaacgccgctcgggccgaacaaacgcccgctgtcgtcgatgtcgccgaccattgtggtgaaagacggccaggtccagcgcttgatgatactttcgcgcggcggcgtaatggtgcccgcccagaccgtctcaatgctgccaacaatcgtcgctccgaccagaatctgcgccattgggccaaattcggtatcgaaaaggcaaatcacgcgttcgttacgggcaaacagattcggcacgttctgagccgtgagatggttaacggagaagagatcgcccggcacgtagatcatctcacgcagaataccgttgcacggcatgtgtacgcggtggtagtcacgcggggagaggtaagtggtcacaaacgtaccgttgcggaacaggtccgccatcagatagttgcctgccagcagggcttcgaggctgtagttgtggcctttggcttgcaggattttatcttcttcgattttacccaactggctgataacgccatcggcaggcatgaccagtacattcggatcggtatcgattgggcgtacttcgtcacgcagcggacggacaaagaattcgttaaaggtgcggtagctggcggtgtccggcttttgcgcctctttcatgtcgaccttgtagtatttaacgaacagatcgataaccagttttgtcagccatcctgcccgcttgcttgcgccccaacccgccaggcgagtaagccattgcgtctggataaaattaccagctttagccacccggaaatcggtacggtggtgcgttttctgccagacaaaacttacgccattctcaccttcagccacaccttcttgcgtcacaaatacccctgccgccgcaatcagcgtttcgccataaaacagcagtggtcgctttcataccctccaattgaccagatgttaaaacatcgttatgcaaatacggaagtgaaagttactcacagcacattgaataaacgaaattgcaaacaacacaacaaggagccacgcatggaaatgctcgaagagcaccgctgttttgaaggctggcagcaacgctggcgacacgactccagtaccttaaactgcccgatgacgttcagtatctttctccctccacctcgtgatcacactccgccaccagtgctgtactggctttccggattaacctgcaatgacgagaacttcaccaccaaggcgggtgcccagcgggtagcggcggaactggggattgtactggtgatgccagacaccagcccgcgcggcgaaaaggttgccaacgacgatggctacgatttaggccagggcgcaggcttttatcttaatgccacgcaaccgccgtgggcgacgcattaccggatgtatgattatctgcgcgatgaattaccggcgctggttcagtcgcaatttaatgtcagcgaccgctgcgccattagcggtcactcaatgggtggtcacggtgcgctgattatggcgctgaaaaatccgggtaaatacaccagcgtttcggccttgcgccaattgtga

SEQ ID NO: 18338 - DNA, 2196 bp, Homo sapiens
  SIMILAR (88)..(1263): 991254mologous to Escherichia coli K12 putative cellulose synthase,accession number AE000430,Smith-Waterman Score=2104.
atggataaaggcatcgacgccctctttcatcgagatagagttaacaatgcctttgccctggatacacttcagacctttttcaatgatgcgttggctttcagcgcgacgctcggctgtttctggatgatcctggcctggatttttattccgctggagcacccgcgctggcagcgtattcgcgcagaacataaaaacctgtatccgcatatcaacgcctcgcgtccgcgtccgctggacccggtccgttatctcattcaaacatgctggttattgatcggtgcatcgcgcaaagaaacgccgaaaccgcgcaggcgggcattttcaggtctgcaaaatattcgtggacgttaccatcaatggatgaacgagctgcctgagcgcgttagccataaaacacagcatctggatgagaaaaaagagctcggtcatttgagtgccggggcgcggcggttgatcctcggtatcatcgtcaccttctcgctgattctggcgttaatctgcgttactcagccgtttaacccgctggcgcagtttatcttcctgatgctgctgtggggggtagcgctgatcgtacggcggatgccggggcgcttctcggcgctaatgttgattgtgctgtcgctgaccgtttcttgccgttatatctggtggcgttacacctctacgctgaactgggacgatccggtcagcctggtgtgcgggcttattctgctcttcgctgaaacgtacgcgtggattgtgctggtgctcggctacttccaggtagtatggccgctgaatcgtcagccggtgccattgccgaaagatatgtcgctgtggccgtcggtggatatctttgtcccgacttacaacgaagatctcaacgtggtgaaaaataccatttacgcctcgctgggtatcgactggccgaaagataagctgaatatctggatccttgatgacggcggcagggaagagtttcgccagtttgcgcaaaacgtgggggtgaaatatatcgcccgcaccactcatgaacatgcgaaagcaggcaacatcaacaatgcgctgaaatatgccaaaggcgagttcgtgtcgattttcgactgcgaccacgtacctacgcgatcgttcttgcaaatgaccatgggctggttcctgaaagaaaaacagctggcgatgatgcagacgccgcaccacttcttctcaccggacccgtttgaacgcaacctggggcgtttccgtaaaacgccgaacgaaggcacgctgttctatggtctgcgccagtcgtgggagttcaatgcgcgtggcctggagctggtgaaagaaggtcgagcgcaagcctgtgtcagtgccggtaataccggggcgctgatggggctggcaaaattattactcaagcccctggaggggcaaaatcaccgcatgttgctgcgttgggaagcgaagctggcggcacttgtacggttgcaggaaaacaccgcgcagccagtgcctttcgcaccaaataatgcgcgtccgctgacgctggaagacgatcgtttgagctgcaccgttcgcggctacaacttcgcgatcaccttctcaaaaatgagtggcaaaccgacatcctggcagctggttgccagtgcgctagccaccaaaatcgcccatgaggttaacccgcaaaatcaggtgggctgtatgctggcgggcggtaacttctacccttacagttgcaagccggaagatgtctgggcggcgctggagaaagaccgggaaaacctgttttttatcgatgtgcaggcgcggggcacgtatccggcttactctgcccgcgtattccgcgaaaaaggggtaaccatcaacaaagcaccgggcgatgatgaaatcctgaaaaacaccgtcgattttgtctctttcagctattacgcctcgcgctgcgcctcggcggagatgaacgccaacaacagcagtgcggcgaacgtggtgaaatcgctgcgtaatccgtatctacaggtgagcgactggggctggggaattgatccactcggtctgcgtatcaccatgaatatgatgtacgatcgttatcagaagccgctgtttctggtggaaaacggcctgggcgcaaaagatgaatttgctgccaatggcgagattaacgacgactatcgcatcagctacttacgcgaacatatccgctgcaatgggcgaagcgattgcagacaggcattccgctga

SEQ ID NO: 18339 - DNA, 1878 bp, Homo sapiens
  SIMILAR (1710)..(757): 991254mologous to Escherichia coli outer pore protein E precursor,accession number U70214,Smith-Waterman Score=1662.
tcaaaggcagttggccgagagcacggaggcgcccaggcacagcacccgcggagtggccaacagagggccagggcagaagcgccaaagcttaagtccccctggaactcgctgcctgcggtcatctttgaggattttcacatcacgggtggtggacatgccgctaccgtagctggaggcggtcataaagtcgacttcatgagatacctgaacttcacggcacaggtccgccataaacataaatgagccacgcagcagacccaccagcaccatatcgctgccgctgtctttgtaacgctcagtaatctgacgacccagttcggcgatacgcgctttaatctccgcttcggggatcattacttctacagtatgtttcatatctctaaccatatgatttaaaaacaaatcacttcgcacgggcaggttttggcaccgcaacaaagcgcaagacacgcagtataccagtaaaagcttcgagaaggtgcaggcaaaccaggctttgaggtatacatcccaggctttaagcagggtaaactcggtagaccattcggtgttaaagcactcgtcttcggcatcgatacagggcttttccagctccaggcggtcaagaatttggacggtttttagttcgatgaagcgtccgccagtcagccaggaagtgacaatattttgcgcgagctgatccgaagattctctaggcagatcagcattggacaggtactggccttttcgacctttttttagcccttgatgaaatattttgttgaaataatacgtagcaccgacgtcgatataattgaccagatcttcatcaccgataccttcaatatctttccctttcgataagacataacccagcgatggacgcagaccaaagtcaaactggtattgagcgaccgcttcaaagttctgtgtcttattggcaaagccgccagttattggcgtcattttgcgtgtttcagaatagaaagttgccagataaatattattggcatcgtatttcagacctgttgcccatgcttctgcacgcttgcctgtgccacggctttgcaggttctgctcgttggtgcgatctgagttggtataggccccactaatggcgaaatcgctgccgccaaagtcatatgtcaatgacgtgccgaagccatcgccgttttgctttttaacgtcgcggttttcgtttttcccttgatattgcagggttaagttcaggccatcgataacgccgaagaagtcggtgttccgatacgtcgccagaccgctggcgcgtttggtcataaagttgtcggtctgcgccgaggaatcgccaccaaattccgggaacatatcggtccaggcttccacgtcatacaacgcccccaggttacgaccataatcgaaagaacccaaatctttatatttcaacccggcaaaagcgagacgcgttttttgctgtgcagtatcactctctgctttattaccggcaaactctgcttcccaacgaccataaccagtcagttgatcgttaatttgtgtttcgcctttgaaaccaaaacggatataactctggtcgccatctttactggcgttatcactcatataatgcatggctttaactttgccatagacatccagtttattaccgtctttattatatatttctgcagcctgtacagatgcagatgccacaatgcccatcgccactaatgccagagtgctctttttcattttcattcctgattttaattaacgcgcgaatattcagcgggagagtcccgttgaaaacaggaaagtttttaacctgagattgttaaagatatattacagattaataatattcttaaaatgtggtaatttattaaatctgtaataaaagcgtaaacaactgccgctaggcttgct

SEQ ID NO: 18340 - DNA, 2106 bp, Homo sapiens
  SIMILAR (1168)..(1734): 821254mologous to Escherichia coli K12 putative cellulose synthase,accession number AE000430,Smith-Waterman Score=784.
atgggcattgtggcatctgcatctgtacaggctgcagaaatatataataaagacggtaataaactggatgtctatggcaaagttaaagccatgcattatatgagtgataacgccagtaaagatggcgaccagagttatatccgttttggtttcaaaggcgaaacacaaattaacgatcaactgactggttatggtcgttgggaagcagagtttgccgcctggaccgatatgttcccggaatttggtggcgattcctcggcgcagaccgacaactttatgaccaaacgcgccagcggtctggcgacgtatcggaaaacgacttcttcggcgtatcgatggcctgaacttaacctgcaatatcacagatgcacatctgcggcgcgcgccatgctgctctccgggcgaccggtgatgcagattaacgagaggacagcagtgcgccgacagatgactgtgtatctgcgcgtagagcggatccacgagatagatccgttagtatctttgtcacacagcatgagtgtgatccccatagatgtggagcggccaatcgccgccgccccctgcacccccgggctctggcgaacaaaaacgccgctgcgcgtgccctcgacttatcccttacggctaccgggtcgggcgcgagtagtgtgtcatcgcacatttcgacttcatctttgcaaggactgggttttcatgttttctgggctgttaatcattctggttccactgattgtgggttacctcattccgcttcgccaacaagctgcgttaaaagttattaatcagctattaagctggatggtttaccttattctcttttttatgggtatcagtctggcgtttctcgataaccctcggccatatcttgccgacagcgtccccgaccgccagttgctggcaccggtaaacagtatttcccgctataaaaccatcgaatggctgaattacatcgccaccgagctgcataaaggtttcacacctctgtttcgccctgatacaccggaagagtacaaaccgacagttcgcgcgcactcggagaagaagctgcaatatgtgaacgaggcactgaaggatgagcactggatctgcgggcaaagatttacaattgctgatgcctatctgtttacggttctgcgctgggcatacgcggtgaaactgaatctggaagggttagagcacattgcagcatttatgcaacgtatggctgaacgtccggaagtacaagacgcgctgtcagcggaaggcttaaaaggatcccgtcatttgagtgccggggcgcggcggttgatcctcggtatcatcgtcaccttctcgctgattctggcgttaatctgcgttactcagccgtttaacccgctggcgcagtttatcttcctgatgctgctgtggggggtagcgctgatcgtacggcggatgccggggcgcttctcggcgctaatgttgattgtgctgtcgctgaccgtttcttgccgttatatctggtggcgttacacctctacgctgaactgggacgatccggtcagcctggtgtgcgggcttattctgctcttcgctgaaacgtacgcgtggattgtgctggtgctcggctacttccaggtagtatggccgctgaatcgtcagccggtgccattgccgaaagatatgtcgctgtggccgtcggtggatatctttgtcccgacttacaacgaagatctcaacgtgacgccagatgaactgaaacaagtactggacgttgccgcagcattaaaagcactgcgtgctgaaaacatctcaaccaaagtctttaatagtggattaggtatttccgtattccgcgacaactccacccgtacccgcttctcttatgcttccgcgcttaacctgctcggccttgcacaacaagatctcgacgaaggcaaatcacaaatcgctcacggcgaaaccgtgcgtgaaaccgccaatatgatctccttctgcgccgacgctattggtattcgcgacgatatgtatctgggcgcaggcaacgcctatatgcgtgaagttggcgctgcacttgatgacggttacaagcagggtgtactggcacaacggcccggctttagggaacctggaatggcggaattgacc

SEQ ID NO: 18341 - DNA, 1401 bp, Homo sapiens
  SIMILAR (315)..(61): 961254mologous to bacteriophage lambda Rz (cell lysis;153),accession number J02459,Smith-Waterman Score=420.
tcagcctctctctgagggtgaaataatcccgttcagcggtgtctgccagtcggggggaggtgactgacagactgctttgatgtgcaaccgacgacgaccagcggcaacatcatcacgcagagcatcattttcagctttcgcatcagctaactccttcgtgtattttgcatcgagcgcagcaacatcacgctgacgcatctgcatgtcagtaattgccgcgttcgccagcttcagttctctggcatttttgtcgcgctggactttgtaggcgattgcgttatcacggtaatgattgaccgcccatgacaggcagagcggagataccgatgctgctttcggctctgctggtaaattatcgcccggtatgcagtaacgaaatttaccgccctgatttacgcgaatcagacgacctttgctgattgccattgccagcgttgaagccactttgcgtgatgtggtaccaaacaatgtagccagctcatcagccgtttgtggtcctcgttgttcaatcgtcgcggttaaataggggagactattatccgaaggatctgatgatgacatcgaagaatgcgtaaaattttgtgaagatgcctctatgctgttctggtgcctgagcttgggctggtgctccttaagccgggccgtgaatccatacagatatttcataatcctcgagtgctggtggaaccggaaccaaaaagcatgcgtaatctgccatccggagtcgttcctgccgttcgccagccgctggcggaagacaaaacattgctgccgttttttagtaacgaacgggtgattcgtgctgctggcggcgttggcgcattgtccgactggcagtaaatgttcgcgcagggaagtatcgccagccagggatcggtgagcttccagaatcgcgctggtagcaccgtcgctatccagcagacgaaactcaatgtttttcagtaccagcgtcaggccgttttccagtgcggattgctcggcgtcaacgcctttggctgcgggaagattacccagcgcattgagatctaaagaagagatcggcgtcagaatgccgcctgcactaccgctgcacacggtgcgggcgcggataatttgcggattcagattggtcagtgaaaccggcagtggttccagttcgtcagatttaacttccgccagcggcgcatcgcagtgggggaattcatcgcgcagccattggcttaaacgctggtgcgcttcctgttcgtcggccccggaaatcagtaactggcagttatcgcccgccagcgtatcggtgccaatcagcgcaagggcgcttttggcgttgcccttgcggtcagtgcgcaggttatgccactcaatttgtgatgggatcctcatattcccggcatgctgcagcagtctccccccgaaggcagtcat

SEQ ID NO: 18342 - DNA, 1608 bp, Homo sapiens
  SIMILAR (895)..(1605): 1001254mologous to Escherichia coli Flagellar hook-associated protein 1 (hap1) ,accession number D90744,Smith-Waterman Score= 1189.
atgatgggctttgacggtacggtccaatatatggcctcgttgggcgcgccaatgccgatgctggcagcgattattgcggtagttatggaagtgcccgccgcgatattaatcgtgcttggctttttcacccgtccgctggcggtgctgtttattttctacacgctgggtacggcggtgattggtcaccattactgggatatgaccggcgatgcggttgggccaaatatgattaatttctggaagaatcgcaatgagatcacccccttccgggcgatgatgatcatccggcgcatggctcatcggttccagacagaagaaatcaaacgcatatcctttatcaaacgcagggtcggaaacaaagatgaaataacacggtgcaggtggcgtcgtttccatgatgatggcattaacttcctgcggctgctcgatgcggcgctggacatatcagtccgggaaaccatgtgtaaccaatggggcggaaaagggcggggtgacgcacgatgcctttttgacgccaaagcccggccaacggagcgctggcacacgattgacgccgtgctggaaaaacagggcagcaataaatcgagcattctggatgccaccattttcctggccgataaaaacgacttcgcggcgatgaataaagcgtgggatgcttgggttgtcgcgggtcatgcgccggtgcgctgcacggtacaagcgggtttgatgaacccgaagtataaagttgaaattaagattgtggctgcggtgatttcacaggatactggtacgcatgttccactgagacggttgaacgtcgccatgccagctgcatcctcagtgaacttagagatcccgaccaacgcgtatcgcttggacaactggcgctggcatttgccgaggctttcaacgacccaacacaaagccggatttgatgctaacggcgatgccggtgaagatttctttgctatcggtaagcccgcggttctgcaaaacacgaaaaacaaaggtgacgttgcgatcggtgccacggtaactgatgcctccgcggtactggcgacagattacaaaatctcgttcgataataatcagtggcaggtcacccgccttgccagcaataccacttttacggtgacgccggatgccaacggtaaagtggcatttgatggtctggagttgacgtttacaggaacgcctgccgttaacgacagcttcacgctgaaaccagtaagtgacgccatcgtcaacatggatgtattaatcaccgacgaagcgaaaatagcgatggcgagcgaagaagatgcgggtgatagcgataaccgcaacggtcaggccctgctggatctgcaaagcaacagtaaaacggtgggcggtgcgaaatcctttaacgacgcttatgcctcgttagtgagtgatatcggtaataaaaccgcgacgttgaaaaccagtagcgccacgcaaggtaatgtggtgacgcagctttccaatcagcagcagtcgatttccggtgtcaatctcgatgaggagtacggaaatctgcaacgttttcagcagtattacctggcgaatgcgcaggttctgcagacggcaaacgcgatttttgatgcgctgattaacattcgctaa

SEQ ID NO: 18343 - DNA, 2155 bp, Homo sapiens
  SIMILAR (1279)..(1806): 861254mologous to Escherichia coli glycolate oxidase subunit, (Fe-S)protein,accession number L43490,Smith-Waterman Score=779.
atggacaaccccacgggggatcaacacctcttctcgaagcgtcaaaccccccaacggaagaatttacacaggtttggcaagttaagctgtggcaccagcacgcacatttacggcctggtcaataatcctttcgggatcaaaattaccacgttgaaaattatttcagtcaacaactggtgtaactggcaaaggaagctgcccagcacctcattgttccattcgagcccaaacccccccaattcctccttacacgcaactacaattacgcctcaatttttgaaagtccctatagtggcaaggccggtaggtggaagctacgagatatggccagttcgtgggtccaccgtaagcggaaattaccaagcccggtacgtgtacgtcaaagtagtccgtggtgtgtggtcacggttagggcataaaacgaaggtctgtggagataacgatggcagtatgtgtacgtcaagggctatccccaacaccgggtaccccacggacaaccgccgtatccccctaacggtgccccacggaaccccgcaccgggctaaacaccggagcccccagcgcaccgccatgcccactggtgaccccggagaccccgcttggccaacggctccccggcacccgcacggccaacgcgcctccaccacgccgacggacacccagggccacgacaacaccaggcctacgcgacccgcccgcagagacaccccagcacccacccgacagcacccatcaacaacccccatcctctcatttgtcaaacctggaggctttcgcacttctttgctgttgagcacggtcgcgtggtctccaccaccatcccaccatggcgaagctccgcggctggggcccgccaaagaaagggttagcgcggaaccgggcgatccccggtttggtttacaatcaccacagttcatgttaaacccggcaaatttaccgcagaatgtgggggcggtgcaccgcggtagccccgcgctataccgcatacactccccggcaccacgctacaggaagcgatggcccatggcagcacacatcgcctatgttacgcgtgtgcgcgcgcatcctcggtacacgtgctatcaatgtgcaatccgtcctatcatcgcgcacatcgtgccgctaccccttatccgctcatcggcaccttcatcttcttattgccgctatagggcctggtcacacgtatgcgttcaggtcacacgcctacgcacccaatgcagctcccctgtatactggtctttccatacacgcgtcttttttgtatttaagaccagcctgtcccgcaataagcatattacggtgaacagtggtagcgcccctttacacagcatgcgtctcacgtgctctacggtatataactgtctggggatcagcgtcatgccagctaacgaagcaggctgttgtggcgcggtggactatcatcttaatgcgcaggagaaagggctggcacgggcgcgcaataatattgatgcctggtggcccgcgattgaagcaggtgccgaggcaattttgcaaaccgccagcggctgcggcgcgtttgtcaaagagtatgggcagatgctgaaaaacgatgcgttatatgccgataaagcacgtcaggtcagtgaactggcggtcgatttagtcgaacttctgcgcgaggaaccgctggaaaaactggcaattcgcggcgataaaaagctggccttccactgtccgtgtaccctacaacatgcgcaaaagctgaacggcgaagtggaaaaagtgttgcttcgtcttggatttaccttaacggacgttcccgacagccatctgtgctgcggtcaggaagaggcgcagaaaaataactggtctgtttccattgctgttgccgatgacggcggtcatctgctggcgttaagtcgcatggacgattgcgcgccgattgcggcttatatctccccaggagaaagcgcgtaccgccgcgctggggcgtcgtgaaactaagggctatgaagagatggtgaacaacggacgtaccgcgttcgtgactgcgccgttattaacgtcgctggaaggcggcgtaccggttgttgtggatgggcaaattattggtcccgtgggcgtttctggtttaaccggagcacaggatgcgcaggtcgcgaaagcggcagcagcggtgttggcgaaataa

SEQ ID NO: 18344 - DNA, 1866 bp, Homo sapiens
  SIMILAR (670)..(1317): 981254mologous to Escherichia coli glycolate oxidase subunit, (Fe-S)protein,accession number L43490,Smith-Waterman Score=1109.
atgcgcaagggtttccctctcctgcgcgatgctggtatcgacggtaaagtggtgatgcccaaaggtgcgccaaaatccaaagtagcggcaacgtgcgactactccgcagaagtcgttctgcatggtgataacttcaacgacactatcgctaaagtgagcgaaattgtcgaaatggaaggccgtatttttatcccaccttacgatgatccgaaagtgattgctggccagggaacgattggtctggaaattatggaagatctctatgatgtcgataacgtgattgtgccaattggtggtggcggtttaattgctggtattgcggtggcaattaaatctattaacccgaccattcgtgttattggcgtacagtctgaaaacgttcacggcatggcggcttctttccactccggagaaataaccacgcaccgaactaccggcaccctggcggatggttgtgatgtctcccgcccgggtaatttaacttacgaaatcgttcgtgaattagtcgatgacatcgtgctggtcagcgaagacgaaatcagaaacagtatgattgccttaattcagcgcaataaagtcgtcaccgaaggcgcaggcgctctggcatgtgctgcattattaagcggtaaattagaccaatatattcaaaacagaaaaacccattttcaatcgcggcaaacgctttcgcccaacaccaacgcggcaactgcgcgagtgctggatcgtctggggatcagcgtcatgccagctaacgaagcaggctgttgtggcgcggtggactatcatcttaatgcgcaggagaaagggctggcacgggcgcgcaataatattgatgcctggtggcccgcgattgaagcaggtgccgaggcaattttgcaaaccgccagcggctgcggcgcgtttgtcaaagagtatgggcagatgctgaaaaacgatgcgttatatgccgataaagcacgtcaggtcagtgaactggcggtcgatttagtcgaacttctgcgcgaggaaccgctggaaaaactggcaattcgcggcgataaaaagctggccttccactgtccgtgtaccctacaacatgcgcaaaagctgaacggcgaagtggaaaaagtgttgcttcgtcttggatttaccttaacggacgttcccgacagccatctgtgctgcggttcagcgggaacatatgcgttaacgcatcccgatctggcacgccagctgcgggataacaaaatgaatgcgctggaaagcggcaaaccggaaatgatcgtcaccgccaacattggttgccagacgcatctggcgagcgccggtcgtacctctaacaagcccttgaaaaggaataacaaaatgaaaactaaagtcattcttagccagcaaatggcgagtgcaattattgccgcaggtcaggaagaggcgcagaaaaataactggtctgtttccattgctgttgccgatgacggcggtcatctgctggcgttaagtcgcatggacgattgcgcgccgattgcggcttatatctcccaggagaaagcgcgtaccgccgcgctggggcgtcgtgaaactaagggctatgaagagatggtgaacaacggacgtaccgcaacactgaactcgcacccggtacctccgggccttatacgagaaagacggcgtggcatgaaaccagcggaccgacgcggcctcaagacgctgaaacgggagtccttgaggcggaaccttaaaacacgtttaccctaccccaattgcctacactcacgtattgccctgccctacaccttgttgcccttgccgtcgcccacgccgcccccgcctgatgttatgcctgtggcgacgagcccctgctgggctgtatttgatgttgcggagtga

SEQ ID NO: 18345 - DNA, 831 bp, Homo sapiens
  SIMILAR (442)..(636): 1001254mologous to Escherichia coli 4-(2'-carboxyphenyl)-4- oxybutyric acid synthase,accession number L07256,Smith-Waterman Score=315.
atgccccgggctgccctgcaggacgccccccgcgcagtgcatggcgacaaatacgcaggtcaggaagaggcgcagaaaaataactggtctgtttccattgctgttgccgatgacggcggtcatctgctggcgttaagtcgcatggacgattgcgcgccgattgcggcttatatctcccaggagaaagcgcgtaccgccgcgctggggcgtcgtgaaactaagggctatgataatgacatgatacaatcgatgctcgatcgcattgaactaaccgtgtttgtcgataacgccccggcaattaaggtctataaaaaatacggctttgaaattgaagggactggtaagaagtacgcattgcgtaatggtgaatatgtcgatgcatattatatggcgcgggtgaacaaaatcagactccacggacatgtaattttgataacgaacaaacccacgctcacgggcagtctggaaaaagtacgcgagcaggtacaggcggcgcacgcgctggggctgacggcggtgatcagttcttccattgaatcgagcttaggcttaacgcaactggcgcggattgccgcctggttaacgccggacaccattccagggctggacacgctggatctgatgcaggcgcagcaggccatgtgtctcctgatctgtgccgagatgtaccaagtgtccagactgcagcacatctgtgagctgttcatcattacccagctgcagagcatgccaagcagggaactggcatccatgaaccttgatatagttgacctgcttaaaaaggccaaggtcttcaagacaggggaccttatcatgggcatgcatgactga

SEQ ID NO: 18346 - DNA, 3024 bp, Homo sapiens
  SIMILAR (76)..(720): 1001254mologous to Escherichia coli Adhesin AIDA-I precursor,accession number D90809,Smith-Waterman Score=1097.
atgatgcaaaagcctgctactgtagatgaggaagagagtcccagggaaacgcaccgctacagtgttagacggcgaggcgagttgattgttgaagctggcggaagagccgaaaataccgtggtcacgggggctggctggttgaaagtggcaaccggtgggatcgccaaatgcacacagtacggtaacaatggcacgctatcggtcagcgatggtgccattgccacagatattgttcagtccgagggaggcgcaattagtctctctacgctcgctacggttaatggccgccatcccgaaggtgaattcagcgttgataaaggttatgcctgcggtttgttgctggaaaatggcggtaacctgcgtgtactggaaggacatcgcgcggaaaaaatcattctcgatcaagagggcggcctgttggttaatgggacaacctcagcggtcgtggtagatgaaggtggtgaattgttggtgtatccaggtggggaagccagcaattgtgagattaatcagggcggcgtttttatgctggccgggaaagccagtgatacgttgcttgctggtggcaccatgaataatctcggtggtgaagactctgacactattgttgagaatggatccatttatcgtctggggacggatggccttcagctctacagttccggtaagacgcaaaacctgtccgtgaatgtgggtggtcgggctgaagtgcatgccggggaagttaccggggatatacacgttgagataacagatgccagtcggcaaactctgtgtaacgctctgaaattacagccagacgaagggggatcctctagagtcattcccacgtgcaaagcgagccgtttacgcattgacgccaattttaaacgttttgtggatgaagaagttttaccgggaacagggctggacgctgcggcgttctggcgcaattttgatgagatcgttcatgatctggcaccagaaaatcgtcagttgctggcagaacgcgatcgcattcaggcagcgcttgatgagtggcatcgcagcaatccggggccggtaaaagataaagcggcctataaatctttcctgcgtgaactgggctacctggtgccgcaaccggagcgcgtgacggtggaaaccacgggcattgacagcgaaatcaccagccaggcggggccgcagctggtggttccggcaatgaacgcccgctacgcgctgaacgcggcgaacgctcgctggggctcactgtacgatgcgttatacggcagcgacatcatcccgccaggaaggggcgatggtcagcggctacgatccgcaacgcgaagcgatggagtgcccgtgagatgcataagcgccggtgttagacagaacatccagactataacctttcaatgttccgtcacggttcacgcccatttgcccgtcaatggtaaaagcgtgccgggtacgggttgcgaggaaacactcttcacggctaagggaaactttcaccggaatgcccccaagcttgtctggtcaggaatgccgccattggctcattccagtacatcactgtttattaccaaaaccgccaccgacaaatggtttgatgacgtcgtacgcatgaccagcgtgcgctgcccgatggaactttccacctattttcgcattaacgcagaaaaaaccgggcagtttgagcgcaccattctggtggccgacgaagacagctacgtcagctacattgaaggctgttccgctccggtgcgtgacagctatcagttacacgcggcagtggtggaagtcatcatccataaaaacgccgaggtgaaatattccacggtacaaaactggtttcctggcgataacaacaccggcggtattctcaacttcgtcaccaagcgtgctttgtgcgaaggcgaaaacagcaaaatgtcatggacgcaatcagaaaccggcgtgacagcgggcctgggcttcacctacaacgttggcgcattgggcggtgcactggccccaatcatcggcgcgttgatcgctcaacgtctggatctgggtactgcgctggcatcgctctcgttcagtctgacgttcgtggtgatcctgctgattgggctggatatgccttctcgcgttcagcgttggtcgcgcccggaagcgttgcgtactcatgacgctatcgacggtaaaccattcagcggtgccgtgccgtttggcagcgccaaaaacgatttaggaagatgtatgtcgttacttgcacaactggatcaaaaaatcgctgctaacggtggcctgattgtctcctgccagccggttccggacagcccgctcgataaacccgaaatcgtcgccgccatggcattagcggcagaacagcgggcgcggttgccattcgcattgaaggtgtggcaaatctgcaagccacgcgtgcggtgtttgtctggattttggttgccggttttcggccgcatcgtgcgccgggccttcgctgccgtggcagcttccgttatctcgttttctccttgtcctctgtctgcggtcagctctggttcttctgctggtcgccctcggtttgatcttttccgctttattccagcgacagctgcatttctggtcgttgcctgcagttctcctacgccgccgcgtggcgtgaccgtagtaaataatttcgacgccaaacgttatctcggtacctggtatgagattgcccgttttgatcaccgctttgaacgtggactggaaaaagtcaccgcaacatacagcctgcgtgatgacggcggcctgaatgtcattaataaaggctataaccctgacagaggaatgtggcagcagagtgaagggaaagcgtactttaccggcgcaccaactcgcgctgcgctgaaagtgtcattctttggtcctttctatggcggttataacgttattgcactcgatcgggaataccgccatgcgctggtttccggcccggaccgcgactacctgtggatactctcccgcacgccaaccatttctgacgaagtgaaacaggagatgctggcagtcgcagacccgggaaggctttga

SEQ ID NO: 18347 - DNA, 4995 bp, Homo sapiens
  SIMILAR (349)..(1605): 991254mologous to Escherichia coli Probable ATP-dependent helicase dinG homolog,accession number D90825,Smith-Waterman Score= 2135.
ttacaccgcagccacaatcttaatttcaactttatacttcgggttcatcaaacccgcttgtaccgtgcagcgcaccggcgcatgacccgcgacaacccaagcatcccacgctttattcatcgccgcgaagtcgtttttatcggccaggaaaatggtggcatccagaatgctcgatttattgctgccctgtttttccagcacggcgtcaatctgtgccagcgtgttggcggtttgctcaaaggcatcggcgtcgaggttttccggtacaccagtgtagtagagcgtgttgttgtggattactacatcagaccagcgggcttcagcatcgatacgaacgataggggtagtgtgacggacgattttgcaccagacggtcagctggcgaaagcgataccaggctttaagccgcgagaaccacagcgacagatggcggtagccgtcacccaggcgatagaaaaaggccagccgctggtggtggaagcaggaaccggtacgggcaaaacctacgcttacctggctcctgcgctgcgggcgaaaaagaaagtcattatctcgaccggctcaaaagcgttgcaggatcagctctacagccgcgatttgccaacagtctcaaaggcattgaaatatacgggcaacgtggcgctgctgaaagggcgctcaaactacctctgcctcgaacgtctcgaacagcaggcgctggcggggggcgatctgccggtacaaatcttaagcgatgtgatcctgctgcgctcctggtctaatcaaacagtcgatggtgatatcagcacctgcgtcagcgtggcggaagattcacaggcgtggccgctggtcaccagcaccaacgacaactgtcttggcagcgactgcccgatgtataaagattgctttgtggtcaaagcacgtaaaaaagcgatggacgccgatgtggtggtggtaaaccatcatctctttctggcggatatggtggttaaagagagtggatttggcgaactgatcccggaagcggacgtcatgatcttcgacgaagcccaccagctaccggacattgccagccagtattttggtcagtcactctccagtcgacaactgctcgacctggcaaaagacatcaccatcgcctaccgcaccgaattaaaagacacccagcagttacaaaagtgcgctgatcgtcttgcccagagtgcgcaggattttcgtctgcaactcggtgagccaggttatcgcggtaacctgcgtgagctgttagctaatccgcaaattcagcgggcatttttactgctcgatgacaccctggaactttgttatgacgtggcgaaactgtcactggggcgttccgccttgctggatgcggcatttgagcgcgccacgttgtatcgcacacggctgaagcggctaaaagagatcaatcagccgggctacagctactggtacgaatgcacttcgcgccattttactctggctctcacgccgctcagcgtggcggataaattcaaagagttaatggcgcaaaaacccggtagctggatcttcacctcagcaacgctgtcggtgaacgacgatctgcatcatttcacctcgcggcttggcatcgaacaggccgatagctgttctataggaaacagctatgtttttagactagtcattggagaacagatgattgatgtcttagggccggagaaacgcagacggcgtaccacacaggaaaagatcgcaattgttcagcagagctttgaaccggggatgacggtctccctcgttgcccggcaacatggtgtagcagccagccagttatttctctggcgtaagcaataccaggaaggaagtcttactgctgtcgccgccggagaacaggttgttcctgcctctgaacttgctgccgccatgaagcagattaaagaactccagcgcctgctcggcaagaaaacgatggaaaatgaactcctcaaagaagccgttgaatatggacgggcaaaaaagtggatagcgcacgcgcccttattgcccggggatggggaacgaaccgatgaaagtcgccatttttgctccatgtgtgggccgaaattctgctcgatgaaaatcagccaggaagtgcgtgattacgccgccacgcaaactattgaaatgggaatggcggatatgtcggagaacttccgtgccagaggcggagaaatctacctgcgactgtacccggtggtggacagcgtacagtggatcgaacgtctgttggatgcaggcgtacgtactctccagctacgcatcaaagatcggcgcgatgaagaggtggaagccgatgtcgtggcggcaattgcgctgggccgccgctataacgcgcgattgtttatcaacgattactggcggctggcgatcaagcatcaggcgtatggcgtccatttggggcaggaagatttgcaagccaccgatctcaatgccatccgcgcggcaggcctgcggctgggcgtttcgacacatgacgatatggaaatcgacgtcgcgctggcagcacgcccctcttatatcgcgctgggacatgtgttcccgacgcaaaccaaacagatgccttctgcaccgcagggctggaacagctggcacggcatgttgagcgactggcggattatcccaccgtggcgattggcgccgccaaatcctgctcgacgatatcgctctggacgggcagcaaaactgctcgacagccaggagaaaagcggtaccgccgcgctggagcgtcgtgaaactaagggctatgaagagatggtgaacaacggacgtaccgcgttcgtgactgcgccgttattaacgtcgctggaaggcggcgtaccggttgttgtggatgggcaaattattggtgccgtgggcgtttctggtttaaccggagcacaggatgcgcagagccgtttacgcattgacgccaattttaaacgttttgtggatgaagaagttttaccgggaacagggctggacgctgcggcgttctggcgcaattttgatgagatcgttcatgatctggcaccagaaaatcgtcagttgctggcagaacgcgatcgcattcaggcagcgcttgatgagtggcatcgcagcaatccggggccggtaaaagataaagcggcctataaatctttcctgcgtgaactgggctacctggtgccgcaaccggagcgcgtgacggtggaaaccacgggcattgacagcgaaatcaccagccaggcggggccgcagctggtggttccggcaatgaacgcccgctacgcgctgaacgcggcgaacgctcgctggggctcactgtacgatgcgttatacggcagcgacatcatcccgcaggaaggggcgatggtcagcggctacgatccgcaacgcggtgagcaggttatcgcctgggttcggcgtttcctcgatgaatctctaccgctggaaaacggcagctatcaggatgtggtggcgtttaagctgcaaatcgatgccaatgggcggattggcaaaaacgatccggcgcacatcaacgatgttatcgtcgaagctgctatcagtaccattctcgactgcgaaaattccggtcgcgcggttaatccggagataaaatctgttgtaccgcacctgctgggcctaatcaagggactcttcaagagaaatggggaaaaacgttcgccaatcgtcggtaaactgattacgatcgccataaacataacttgccgtagcttccaaaattgctctggcttcgcaactatgatccgttcatggtctttcggtgaagttaaaaagccggaaaccatcaactaccgtacgttcaaaccagaacgtgacggccttttctgcgcccgtatctttgggccggtaaaagattacgagtgcctgtgcggtaagtacaagcgcctgaaacaccgtggcgtcatctgtgagaagtgcggcgttgaagtgacccagactaaagtacgccgtgagcgtatgggccacatcgaactggcttccccgactgcgcacatctggttcctgaaatcgctgccgtcccgtatcggtctgctgctcgatatgccgctgcgcgatatcgaacgcgtactgtactttgaatcctatgtggttatcgaaggcggtatgaccaacctggaacgtcagcagatcctgactgaagagcagtatctggacgcgctggaagagttcgatgggggcggaacaatccaggctctgctgaagagcatggatctggagcaagagtgcgaacagctgcgtgaagagctgaacgaaaccaactccgaaaccaagcgtaaaaagctgaccaagcgtatcaaactgctggaagcgttcgttcagtctggtaacaaaccagagtggatgatcctgaccgttctgccggtactgccgccagatctgcgtccgctggttccgctggatggtggtcgtttcgcgacttctgacctgaacgatctgtatcgtcgcgtcattaaccgtaacaaccgtctgaaacgtctgctggatctggctgcgccggacatcatcgtacgtaacgaaaaacgtatgctgcaggaagcggtagacgccctgctggataacggtcgtcgcggtcgtgcgatcaccggttctaacaagcgtcctctgaaatctttggccgacatgatcaaaggtaaacagggtcgtttccgtcagaacctgctcggtccatacctgcgtctgcatcagtgcggtctgccgaagaaaatggcactggagctgttcaaaccgttcatctacggcaagctggaactgcgtggtcttgctaccaccattaaagctgcgaagaaaatggcatttgaaccggtaatgatcgaaggtaaagctatccagctgcacccgctggtttgtgcggcatataacgccgacttcgatggtgaccagatggctgttcacgtaccgctgacgctggaagcccagctggaagcgcgtgcgctgatgatgtctaccaacacaacttgggggccagagctagatcctgacttcaaaccaaccaaccaaccaaccaattatccataa

SEQ ID NO: 18348 - DNA, 3574 bp, Homo sapiens
  SIMILAR (556)..(1149): 971254mologous to Escherichia coli malate synthase (isoenzyme G),accession number X74547,Smith-Waterman Score=1001.
atggccagaaaacgcaaatcaagaaataacagtaaaattggtcacggagcgattagtcgcattggtagaccgaataatccttttgaaccgtgccgcaatcgctacgcacaaaaatacttaacgttggcgctaatgggcggtgccgcttttttcgtattgaaaggttgtagcgatagtagcgatgtcgataacgacggcgacggaacgttttacgcgacagtgcaggattgtattgatgacggtaataatgccgacatttgcgcgcgtggctggaacaacgccaaaacggcattttatgccgatgttccgaagaatatgactcagcagaactgtcagtctaagtacgaaaattgctactacgacaatgttgaacagagttggatcccggtcgtttctggatttttgttaagccgggttattcgtaaagatcgcgatgagccgtttgtttataacagcggcggttcctcttttgcttcgcgcccagtctgggtaccgagctcgattgtaatcatgtcatacggtttagcctcgtatgtgatcgccgtggccttcctggaacgcgatcgcattcaggcagcgcttgatgagtggcatcgcagcaatccggggccggtaaaagataaagcggcctataaatcgttcctgcgtgaactgggctacctggtgccgcaaccggagcgcgtgacggtggaaaccacgggcattgacagcgaaatcaccagccaggcggggccgcagctggtggttccggcaatgaacgcccgctacgcgctgaacgcggcgaacgctcgctggggctcactgtacgatgcgttatacggcagcgacatcatcccgcaggaaggggcgatggtcagcggctacgatccgcaacgcggtgagcaggttatcgcctgggttcggcgtttcctcgatgaatctctaccgctggaaaacggcagctatcaggatgtggtggcgtttaaggtggttgataaacaattacgcatccagttgaaaaatggtaaagaaaccacgttacgtactccagcacagtttgtcggttaccgtggcgatgccgctgcgccgacctgcattttggtgaaaaataacggcctgcatattggagtgcaaatcgatgccaatggccgaattgtcaaacaagatccggggccacataaacgatggtatcgttgaaaccgctatcagtaccattctcgactgcgaagattcggtcgcggcggttgatgcggaagataaaatcctgctgtaccgcaacctgctgggcctgatgcaggggactctgcaagagaaaatggagaaaaacggtcggcaaatcgtgcgtaaactgaatgacgatcgtcattacaccgccgccgatggctctgaaatttctctgcacggacgctcgctgctgtttatccgcaacgtgggtcatttgatgaccattcctgtgatttgggacagcgaaggcaatgaaatcccggaaggcattcttgatggcgtcatgactggcgcgattgccctctatgatttaaaagtgcagaaaaactcgcgcactggcagcgtctatattgtgaaaccgaaaatgcacggtccgcaggaagtggcgttcgccaacaaactgtttacccgcattgagacaatgctcgggatccgggatctctttctgttccagccattgcccaaacagcattgtcttcccgcggacctcgggagcaattgcggtaacctgagcaatatgttccgactccattgccagaatcagatcgtaatttcgtgccatctcagcagtgagcttacgtccggcatgtccttcaagagatacgccatgattagcggcaacatctgccgctgtcgcatctgcagggtgttttaccagaccatgaacacctgccgatttgacttttacgcccggcagacgtttacgcagcaagcgctcgccaatgggcgaacggcaaatgttgccggtcatgcaccccggaaatcgtcggtaccagcagagaaatcacacggttccaacgagccagcggcgcggaatattggtaatcggctgctgacccgatttgctgacttcgccggtgacgtacgctttttgcgatcggaacgccgcgacgctgacatcgacttgcgggctttcaatgactgcggagacgtggtaatcaccgtgatatttttggcggtcattaatccttcggcgataagcattgtcgtacttccgctgtcgagaataacgcattcgcctgaatttcgcagtgaagccctgaagcttgctgaacgcatcggtgttactgccgcagcccgtgaactcagcctgtatgaatcacaactctacaactggcgcagtaaacagcaaaatcagcagacgtcttctgaacgtgaactggagatgtctaccgagattgcacgccgcgacatacttcgcgaagcgcctgaaatgaagtatgtctttattgaaaaacatcaggctgagttcagcatcaaagcaatgtgccgcgtgctccgggtggcccgcagcggctggtatacgtggtgtcagcggcggacaaggataagcacgcgtcagcagttccgccaacactgcgacagcgttgtcctcgcggcttttacccggtcaaaacagcgttacggtgccccacgcctgacggatgaactgcgtgctcagggttacccctttaacgtaaaaaccgtggcggcaagcctgcgccgtcagggactgagggcaaaggcctcccggaagttcagcccggtcagctaccgcgcacacggcctgcctgtgtcagaaaatctgttggagcaggatttttacgccagtggcccgaaccagaagtgggcaggagacatcacgtacttacgtacagatgaaggctggctgtatctggcagtggccccttctttggaaaagtttgaaagctcctgggatttagcacgggccttccagccaacaggcaaaagccacccgtataccgggaacccccgggaaggcccgacaaaggccaggaaggttacaaaaggttgggaagaccgacactttctgttatttttccgcgctgatatcaatggtaatcggatctttgtcgccgccttgttgaatggtgagtttactgtcgctggtggcgatcgccgttttcgtatcgtctctggtggtgcgcgtggtcagggtttgcgcctgcgccagatgggtgacgctgatggtgtatttcccggcgatggcgttacccgcagtggtggcactgaactgcgcgcgaaggatgacgcagcgggtcagtcgattgctaaccgtttcacctctaacattaaaggcctgactcaggcggcccgtaacgccaacgacggtatctccgttgcgcagaccaccgaaggcgcgctgtccgaaatcaacaacaacttacagcgtgtgcgtgaactgacggtacaggccactaccggtaaaacagaagcagaggcgggtggcaagtgcagatccaaatgtgcttctatagtattgtacaaggctttattcaattcggataagtgttccagcgcagttcattcacgtcgttcatctatcgatttagttcatggtcgtaggcaatcacgatggctgtccttatag

SEQ ID NO: 18349 - DNA, 2277 bp, Homo sapiens
  SIMILAR (890)..(1561): 1001254mologous to Escherichia coli malate synthase (isoenzyme G),accession number X74547,Smith-Waterman Score=1161.
cctaaagggttatgcctggcgcgatttttgaagatcaccaagcggattaagttgggtaccaaaagggtatcgcctatggggccatttaaaaagaagcactcggaatatgttgtaaaccaaccactgttaataataatggagctgttcatgtataaaattaccgccactattggaaaggaaggtggcactcctactaactggacaagatattcaaaatctaaactaacgaaatcagaatgcgaaaaaatgctctcaggtaaaaaagaagcaggcgtttccagagagcagaaagtaaaactgataaattttaattgcgagaaacttcagtcctcgagaattgcattgtattcaaattaaaacttcatagctgattattaataatcaacatcgggcgtcaatttcagtctaacattggcgcctgcatgaactgatgcaatggcacaagtaatctttaatgaagagtggatgcttgcatacggcctgatgcttcgcactggtctgggggccaagacaaattgaagcataccgccagaactgttgggtggagggcttccacttcaaacgagtatctcctttaggtcaggaagaggcgcagaaaaataactggtctgtttccattgctgttgccgatgacggcggtcatctgctggcgttaagtcgcatggacgattgcgcgccgattgcggcttatatctcccaggagaaagcgcgtaccgccgcgctggggcgtcgtgaaactaagggctatgaagagatggtgaacaacggacgtaccgcgttcgtgactgcgccgttattaacgtcgctggaaggcggcgtaccggttgttgtggatgggcaaattattggtgccgtgggcgtttctggtttaaccggagcacaggatgcgcagagccgtttacgcattgacgccaattttaaacgttttgtggatgaagaagttttaccgggaacagggctggacgctgcggcgttctggcgcaattttgatgagatcgttcatgatctggcaccagaaaatcgtcagttgctggcagaacgcgatcgcattcaggcagcgcttgatgagtggcatcgcagcaatccggggccggtaaaagataaagcggcctataaatctttcctgcgtgaactgggctacctggtgccgcaaccggagcgcgtgacggtggaaaccacgggcattgacagcgaaatcaccagccaggcggggccgcagctggtggttccggcaatgaacgcccgctacgcgctgaacgcggcgaacgctcgctggggctcactgtacgatgcgttatacggcagcgacatcatcccgcaggaaggggcgatggtcagcggctacgatccgcaacgcggtgagcaggttatcgcctgggttcggcgtttcctcgatgaatctctaccgctggaaaacggcagctatcaggatgtggtggcgtttaaggtggttgataaacaattacgcatccagttgaaaaatggtaaagaaaccacgttacgtactccagcacagtttgtcggttaccgtggcgatgccgctgcgccgacctgcattttgcggctgtcggtagcagccataacctgctcctccagttgtttgaccaacactgatggcgaggagtttttgtgcttcaacggcaaattccaacggcagctccgagaacacgtctttgcagaaaccgttaacaatcatcgagatggcgtcttcttcgctgatcccgcgttgcaggcagtaaaacagttgatcttcaccaataccgcgtacacctggcgtgtggctgataacaatgttcagcaggaacagccagcgcaggcagaaaactgccccggagaaatcaccacagcaacagtagcgaaaatctcagagtgcgatttaaccagcgacgattggaacaacgaggaccacaaacggctgatgagctggctacattgtttggtaccacatcacgcaaagtggcttcaacgctggcaatggcaatcagcaaaggtcgtctgattcgcgtaaatcagggcgcacgaaaatggaagtataatgaggaccaaatgatgactatcgttcgtatcgatgctgaagcccgctggtctgatgtagtaatccacaacaacacgctctactacactggtgtaccggaaaacctcgacgccgatgcctttgagcaaaccgccaacacgctggcacagattgacgccgtgctggaaaaacaggcagcaataaatcgagcattctggatgccaccattttcctggccgataaaaacgacttcgcggcgatga

SEQ ID NO: 18350 - DNA, 270 bp, Homo sapiens
  SIMILAR (56)..(268): 1001254mologous to Escherichia coli K12 putative transport protein,accession number AE000391,Smith-Waterman Score=337.
atgcgtcgacagaacgcaccagggatgtgcgacaacacaatgaaaggatcgaaaaatgactacgcaacgttcaccggggctattccggcgtctggctcatggcagcctggtaaaacaaatcctggtcggccttgttctggggattcttctggcatggatctcaaaacccgcggcggaagctgttggtctgttaggtactttgttcgtcggcgcactgaaagccgttgcccccatcctggtgttgatgctggtgatggcatctattgctaa

SEQ ID NO: 18351 - DNA, 2226 bp, Homo sapiens
  SIMILAR (1336)..(2220): 991254mologous to Escherichia coli f404,accession number L10328,Smith-Waterman Score=1534.
atgatgaggacgagcggaggaacacgagataatgagtcgagcagtgacgatgagagagagagagagaaccgtctctcggatgagaaatcgaacgaatatgccaacctggtcggtggtgagcgttacgagccagatgaagagaacccgatgctcggcttccgtggcgcgggccgctatgtttccgacagcttcctgcgactgtgttcgtcgctggagatcgtgaaggcacgtgaaacagtggcgttgattcaggggctgaaacacgatctgctggcggatgataccgcgctacgtgcactcatcccacaacggctgatcgctttcgatgacgcggtacgtagcacgttgaaagaggaggaaaaactggtcaactccagcgactggggctacgacgctcaggcctttgcccgctggcgaccggagtacggttattttgccaaacaggcggggtttaccgttaaaacgtccgccagccttgctgctttatggcaggtagtgaaccaaatcggcggtaaagagcgttatttctttggcaatattttgtggcagacacgggcgttgatggaccgcgcgatcggtcataagctggcgaaaggccgcccggagcgcgaatatttacagactggcgatgcggtggatagctggaaagtgattgtcgttgaaccggaaaaacaacttacgttgttatttggcatgaaagcgccggggctgggacgactgtgttttagcctggaagataaaggcgactatcgtactatcgatgtccgcgctttctggcatccgcacggcaaccgggctgaacgggaaaaaccaagattccagccttattctcgccggaagtcgtttatcggccagaacatgttgctcccaatgtccattatgccgcccgttttccgcagggtaatctgcccccttggcgtggcccggctcggcaagttccgggacccggtttacctcgtttgtgtcttcacccgtcagattttccgctactacacttcaggcgatgagtttctgcaaatcaataccaccggcggcgaagatattgatgacattgatgatatcaagctctttgtctatgaagagagctacggtatcagtaaagagagtcactggcgcgaggcgatcaacgccaaagcgatgggagcaatgaccttaaactggcaggaaaaacgctggcagcgattttttaacagcgaagaaccgggaaatatcgaacccgtctacatgctggaaaaagtagaaaatcaaaaccatgccaaatgggaggtccataattttaccatgggctaccaacggcaagtaaccgaagatacttacgaatatttgctgctaaatgtggtgggtgttccggttccggacaatattcacccgatgaccaaagacgaagcaggagtctggtcgtggcgcacacctatcctgaaaggcaacctgtacgagtattttttcaatgttgatggtgtacgcagcattgatacaggcaccgcaatgactaatcctcagcgccaggttaactccagtatgattctggtgccaggcagttatctggatacgcgttctgttgcgcatggtgatttgatcgccataacttaccactccaacgcattgcaatctgaacgtcagatgtatgtctggaccccgccaggatacaccggcatgggcgagcctttgccagtgctctatttctatcacggctttggtgataccggacgttccgctatcgatcaggggcgtatcccgcaaatcatggataacctgcttgctgaagggaaaattaaaccgatgctggtggtgatcccggatacagaaaccgatgcgaagggcattattcccgaagatttcgtgcctcaggaaagacgtaaagtcttttatccgctgaatgctaaagcggcagatcgcgaactgatgaacgatattatcccgctgattagcaagcgttttaatgtccgtaaagatgccgatggccgcgcgctggcagggctttcacaaggcgggtaccaggcgctggtttccggaatgaatcatctggaaagctttggctggctggccacattcagtggtgttaccacgacaaccgtaccggatgaaggtgtcgcggcccgactgaacgatccggcagctatcaaccagcaactacgtaattttactgtggttgtgggggataaagatgtcgtaaccggcaaggatatcgccgggctgaaaactgagcttgagcgagaaaaaaattaa

SEQ ID NO: 18352 - DNA, 756 bp, Homo sapiens
cggtgtattctgcttcgcctcgacagcggcgggactgtccgtctacggctgactgggcggctcctgcgggcgctgcgcggcctggctccccccacgccagctaacctcactcgtgtcacgacgcgccgctgcctcctgccactctaaatcacacgtcgggtggctctggctctccccctcaagctcggcctacacgcgctgtcactctgcgcctcggcgaccgactgggacggcttccccttcgaagtccaataaagtcgcccactcttgctgtcggtgctcaggctgaaatctgggggtaatggagcgtaatgaaaggaatattacgatgaatataaaaattgctgctttagcgctggctattgccagcggtatttctgctcagtgggccatagcagcggatatgccagccagcccggcacccactatcccggtgaaacagtatgtgactcaggtcaatgccgataacagcgtgacctttcgctactttgcccctggggcaaaaaatgtctctgtagtggtgggtgttccggttccggacaatattcacccgatgaccaaagacgaagcaggagtctggtcgtggcgcacacctatcctgaaaggcaacctgtacgagtattttttcaatgttgatggtgtacgcagcattgatacaggcaccgcaatgactaatcctcagcgccaggttaactccagtatgattctggtgccaggcagttatctggatacgcgttctgttgcgcatggtgattt

SEQ ID NO: 18353 - DNA, 424 bp, Homo sapiens
  SIMILAR (11)..(184): 981254mologous to Escherichia coli K12 putative sensory transducer,accession number AE000368,Smith-Waterman Score=304.
ttattgacgtatgtactggattattaacgataatatcgagttctggcctgagcaccgaaaattaatatcggtacataacgccgattttaacgtcgttctgacaacgccagccagtcgatgtttatcacttctacttgaagcttttcctgatgtggttgcacaacaagattttttcaccagagtagaatcatggaatatactcgtcaaccttgggaggacgacggtatggatgacatactcatgggcattcctcggttgttgtgtttgcgttgttgttgttattttaaaggtgacggtgtcacgtttttcgggatagggcagtgatacgggtgcgtgtccgttacttgctgaggctcttgttggcattcttggaatagccctgaatcaaggaagagattggctgcggttgctcgcataacttacc

SEQ ID NO: 18354 - DNA, 688 bp, Homo sapiens
  SIMILAR (356)..(589): 1001254mologous to unidentified cloning vector 29kD protein essential for the replication of mini F plasmid,accession number AB015619,Smith-Waterman Score=394.
ggagctcagctgttgtgttctctttgctcctggaggtgctaaactggtaggatgtgccctggggctgtcaaggtcttccacatggagagaagctgaccaagaaggaagtcaacacagggatgagtacagtcgagaggtggggggaagatacccatcccgctggaaagtggctgaatccaagaggctgcgcagtgacagtctgcaggccccacttccacagcatctcataggagaagacccacgggcttggaaatccagccagcccctggtagccgccttgcgcctccctgaaatggagctccctgggggagggtgtgacaatctaaaaacttgtcacacttcacatggatctgtcatggcggaaacagcggttatcaatcacaagaaacgtaaaaatagcccgcgaatcgtccagtcaaacgacctcactgaggcggcatatagtctctcccgggatcaaaaacgtatgctgtatctgttcgttgaccagatcagaaaatctgatggcaccctacaggaacatgacggtatctgcgagatccatgttgctaaatatgctgaaatattcggattgacctctgcggaagccagatacgagaggataattttcagggtaacttcaagttcttctcctgctgatcttgtcctacatcctctcaccagtgaagcctcatttgccaatttctag

SEQ ID NO: 18355 - DNA, 735 bp, Homo sapiens
  SIMILAR (274)..(732): 1001254mologous to Escherichia coli Nodulation protein NolK,accession number D90843,Smith-Waterman Score=816.
atgtcatcagctgctgtcacgaacaatgtcttaacaccattgccgattgtaagtcaaccttgcaccaaaaactgtgatgccgggccactggataaacgctttgaactgctgaacatgctatacttcatgtacttgcctaaccggatatcattcatgagaattttgctctctttgacactgaagataaacgtgctagctgtgcactctcaccattttatgatgtaccatacagcgcaatggaggtgccccatcctcagagcgtacccgggtgtcagcaacatcattcacgccgcgcatcagaacgacgtgaacaaactgctgtttctcggatcgtcctgcatctacccgaaactggcaaaacagccgatggcagaaagcgagttgttgcagggcacgctggagccgactaacgagccttatgctattgccaaaatcgccgggatcaaactgtgcgaatcatacaaccgccagtacggacgcgattaccgctcagtcatgccgaccaacctgtacgggccacacgacaacttccacccgagtaattcgcatgtgatcccagcattgctgcgtcgcttccacgaggcgacggcacagaatgcgccggacgtggtggtatggggcagcggtacaccgatgcgcgaatttctgcacgtcgatgatatggcggcggcgagcattcatgtcatggagctggcgcatgaagtctggctggagaacacccagccgatgttgtag

SEQ ID NO: 18356 - DNA, 783 bp, Homo sapiens
  SIMILAR (409)..(780): 1001254mologous to Escherichia coli Nodulation protein NolK,accession number D90843,Smith-Waterman Score=654.
gtgacaaggtgcttaagcaatcttcttgaaaccgaaattcaatttgcctccattggtgcaaccaccaaagaagatgctgccaagacacttgagccgttaagcgccaaatacaaaaacatcgcgggtgttgaagaaaaattaacctataccgatacctacgcgcaggaaaacgtgactatcgatatggaaaaagtggattttaaagccctgcaggtatttctaggaatcaacgtttctgctgaagatgccaaaaaaggtatcactatggcgcaaatggaactggctctatgtaaatttcagttacatgtatctggtaataaatacacaatattactgattcttacaagtataaacccaggaaaatccagaaaacgagaatgtccagtcctaagagagtctaacagcaccagcgaacgtattgaccaggtctatctggcggcggcgaaagtgggcggcattgttgccaacaacacctatccggcggatttcatctaccagaacatgatgattgagagcaacatcattcacgccgcgcatcagaacgacgtgaacaaactgctgtttctcggatcgtcctgcatctacccgaaactggcaaaacagccgatggcagaaagcgagttgttgcagggcacgctggagccgactaacgagccttatgctattgccaaaatcgccgggatcaaactgtgcgaatcatacaaccgccagtacggacgcgattaccgctcagtcatgccgaccaacctgtacgggccacacgacaacttccacccgagttaa

SEQ ID NO: 18357 - DNA, 435 bp, Homo sapiens
  SIMILAR (405)..(196): 871254mologous to Escherichia coli membrane-located arsenite efflux pump,accession number X80057,Smith-Waterman Score=306.
gttgctggaaccggttttatccgtgaaaaccatccggggcaggtgatgaataaattgcgccgtctgtttccccgtgcgcgcccggaaagccaggagttgaatatcctgcgcgggattctggcttctattgagcagcagaataaaggtaacaaggccgaataacagccgttgcctgatgcgacgcgtaatgcgtcttatcaggccaatccggttaaacggcaagcgcccaggaccatacccccagcgtaagacgtgcagcgcggcccattcaaaaaagccggactcatccagcagcaggctgatgataatgacggcgataaacgcagccgtcgcgttccagacgatatcccacaccaccggaatatcacccggatggaccacgcccgtaactaacgccagtactgcgcgacgaatttgttcgataaccgcagccat

SEQ ID NO: 18358 - DNA, 1752 bp, Homo sapiens
  SIMILAR (1752)..(1441): 911254mologous to Escherichia coli methyl-accepting chemotaxis protein II,accession number M13463,Smith-Waterman Score= 444.
ctagtttggccccaagagttgttgccccaaagtttttcccccttttggggaaatcgcccccaaccgggaaaacgggggggctttaataagagcccgtttctttttgattcgaagcaggtttggaaacactgttgttggagaatcgagttgaacccttcttttgaagcgaccacgaccattaccacagcgtgagacgtgcagcgccgcccattcaaaaaagccggactcatccagcagcaggctgatgataatgacggcgataaacgcagccgtcgcgttccagacgatattccacaccaccggaatatcacccggatggaccacgcccgtaactaacgccagtactgcgccgagcgttgcactccagccgatgcctaaacctttcggctgccagataaccaggtgagacccataatgtggcggttgtgttcgttgtgcgggttctgaaatgggtgtaataagtctgtgttcgtccgtgtgtgtatgataaggtggaatgtctccaaaggggccgttaatttcgtcgcctaacgtggtcacctcttgtgctcccatgtagccaccatcgtatttgtcggtttgtaatgtccatagtgtctccctggtgagaattcctccatgcacgccggggccccaggttggccccaagagcctgtggccaatggccctcggcccagggtttcggaatttgcttaaggaaggaatgcccccccgaacccttccagagcctttgccttgggaaatttcacaaagtggaatcccctttgtctcctctccaagtctcttcttggaaagtatttctaagggaccactgtcgagtgtcggtaccgatcgagcgtttggtttggcgccggttctgcaggacagcagccgtccaccgcctgcggtcacgcgcgaattcggcagcggaatttcaaaggtgcagtggctgcgcatggcggcctcaggggtcctggcgattggtgccgaaggtctggcgttttccggtctgggtgagtcttcgccgctggtcgtgagtgcatcgttggcagccatcgcgctgggggggctggagacgctcaagaagggctggatcgcgctgcgaacccggtctctgaacatgaacctgctgatgacgatcgccgtcatcggcgccgcgctcatcggccagtggccggaggccgcggtggtgatctggctgttcggcatcgccgagatgattgaagcgctgagtttggaccgggcccgcaacatgcgagatcgtgggtgcgagtggttcatcgacggattcaccgggtagatctttaagtcggagagagggaatccgatggccggaaagatcgtcggtactattaagacgcggttcccgcagaaccgcgtccgctgccgaagttgattatcaaacgtaaacccgaatccatcttcgactaccgtttcgaagactttgagattgaaggctacgatccgcatccgggcattaaagcgccggtggctattggcaggacgggatggtgtttgcggtttattggtgagtgggctggctgccagacggaacgcggaaactgcttgcgttaaacgactcgcctgttcttccagcgcagcggcggcggcagctgattcctgcaccagcgatgcgttctgttgcgtgacgcgatccatttccgaaaccgccaatgcgacttgatcgatgccacggctctgttcatccgatgccgatgcaatctcgcccataatgtcagtcacgcgagtgacagcattgacgatattgttcat

SEQ ID NO: 18359 - DNA, 2182 bp, Homo sapiens
  SIMILAR (1319)..(2080): 961254mologous to Escherichia coli Nodulation protein NolK,accession number D90843,Smith-Waterman Score=1270.
tgccagagtgaaaatgcctcagagctaactggataatcatacagtacatgcaggttataaaaccagcacgtccttgcaatagtttcagtatggtattagcattgatgcgttagatgatggctatctcactccagtcagagccaccaactcagggctggaaagtaaaaaaccgacgcaaagtcggtttttttacatccggattcggacaaggcttaatatgacgatgacccagtgaaagtatataaatcgtcactgcgatatataccgaagtgctccctccgccagctgaagaaatcgctaattcttgcaatgttagcactggctaatagtattgagctgttagataagaactctctcactccagccagagccaccaactcagggctggaaagtaaaaaaccgacgcaaagtcggtttttttacgtcctgattcagacctcctttcaaatgaatagccaactcaaaattcacacctattaccttcctctgcacttacacattcgttaagtcatatatgtttttgacttatccgcttcgaagagagacactacctgcaacaatcaggagcgcaatatgtcatttctgttacccatccaattgttcaaaattcttgctgatcccacccgtctgggcatcgttttactgctcagcgaactgggagagtctatgcgtctgcgatctctgcactgctctcgaccagtcgcagcccaagatctcccgccacctggcattgctgcgtgaaagcgggctattgctggaccgcaagcaaggtaagtgggttcattaccgcttatcaccgcatattccagcatgggcggcgaaaattattgatgaggcctggcgatgtgaacaggaaaaggttcaggcgattgtccgcaacctggctcgacaaaactgttccggggacagcgctatctttgtcctgaccatcgtattggttatctggcagccgaaaggtttaggcatcggctggagtgcaacgctcggcgcagtactggcgttagttacgggcgtggtccatccgggtgatattccggtggtgtggaatatcgtctggaacgcgacggctgcgtttatcgccgtcattatcatcagcctgctgctggatgagtccggcttttttgaatgggcggcgctgcacgtctcacgctggggtaatggtcgtggtcgcttgctgtttacctggattgtcctgctcggtgctgccgttgccgccctgtttggcaatgatggcgcggcgcttattttgacaacgattgtcatcgccatgctgctggctttaggggtcagtaaaggcactacgctggcgttcgtgatggcggccgggcggcagctcgaacagcgcggtgatgtggaactggtattacgcacccgcgacgagctgaacctgctggacagccgcgccgtgcatgatttctttgccagcgaacgtattgaccaggtctatctggcggcggcgaaagtgggcggcattgttgccaacaacacctatccggcggatttcatctaccagaacatgatgattgagagcaacatcattcacgccgcgcatcagaacgacgtgaacaaactgctgtttctcggatcgtcctgcatctacccgaaactggcaaaacagccgatggcagaaagcgagttgttgcagggcacgctggagccgactaacgagccttatgctattgccaaaatcgccgggatcaaactgtgcgaatcatacaaccgccagtacggacgcgattaccgctcagtcatgccgaccaacctgtacgggccacacgacaacttccacccgagtaattcgcatgtgatcccagcattgctgcgtcgcttccacgaggcgacggcacagaatgcgccggacgtggtggtatggggcagcggtacaccgatgcgcgaatttctgcacgtcgatgatatggcggcggcgagcattcatgtcatggagctggcgcatgaagtctggctggagaacacccagccgatgttgtcgcacattaacgtcggcacgggcgttgactgcactatccgcgagctggcgcaaaccattggcaaagtggtggatacggccaagcgtttcatagccaacacgatcgctatgcatcaaccagaccggagaagggattgcccgttcccacgggttaagcggcgagtcgatggccaactgattcgccggggctggtag

SEQ ID NO: 18360 - DNA, 1446 bp, Homo sapiens
  SIMILAR (727)..(1197): 1001254mologous to Escherichia coli PROBABLE ASPARTATE AMINOTRANSFERASE (EC 2.6.1.1) (TRANSAMINASE A) (ASPAT),accession number D90868,Smith-Waterman Score=823.
gccgtcacgccgccgatatcaattaaataccggtgaatacccgcaatcacgccggtaatgatgcctacccacgggccaaacagaatcccgccggacatcaccgcgataatacgtacgttcaccagcgagccttctacgggaacgccggaccaggtgctgaacagggcgaacagcgagaaaatggcggtaacggcgagcaattcttttggggagtgcgccgacttgtgcaacagttcgcgaaacaggcggatacggatgagaaagaacaggcagataagcattaacgctgcccgatcgaagaccgccagcagcatgttgaatatttcgtgcacgggtgactctgaataaggattaaacctctatgataggtaacctgaaggctgatgaccagcaggccgtttttgaggaaaaaccacaattttaaaaggggattgatagataaatggtgtattagcaatgcatctcttgataatgcacttctggttagtaaatttattgaaattattatgttaataaaatgagtggtaattttcttgttagcgcagataaatttcctgtttttaaagcagagttcctcatttaacggcattaataaaaaggtttaaaacgctgggcagaccgaaattaattcggctatttttaaaacagccacccatcggggagcgtcgctttgacgggccggggcgctaacgtttatttggaggaaattatgggtggcacttcgcccctgaacgtcgctttacgcgcattgatcgtctcccgccctacgtttttaacatcaccgctgaactgaaaatggctgcgcgtcggcgcggcgaagatattatcgatttcagcatgggtaacccggacggtgcgactccgccgcatatcgtcgaaaaattatgtactgtggcccagcgcccggacacgcatggttactccacttcacgcggcattccgcggttacgtcgcgccatttcccgctggtatcaggatcgctacgacgttgaaatcgacccggaatcagaagccatcgtcactattggttcgaaagagggcctggcgcatctgatgctggcgacgctggatcatggtgacacggtgctggtgccgaatccaagttacccgatccatatttatggcgcggtgattgccggggcgcaggtacgctcagtgccgctggtggaaggtgtcgatttcttcaacgaactggaggtcgatgtgcctgcttccctttccgccatgatttttctcctccttcctcaactctgcttcctggccaaggccaccaaccctgtaatcaatccccttattccatattactcccctgccgatctcttccattcctttggaactcctgcctgcaggtcagctaaagagagagataagccccagtacaataataactggagacttcaacatcccactttcagcattggacagatcatcacagcagaaaattga

SEQ ID NO: 18361 - DNA, 320 bp, Homo sapiens
  SIMILAR (1)..(309): 931254mologous to Escherichia coli orotidine 5' monophosphate (OMP) decarboxylase (E.C. 4.1.1.23),accession number J02768,Smith- Waterman Score=484.
gacccacgcgattgtcgtctgaaggtcggcaaagagatgtttacattgtttgggccacagtttgtgcgcgaacttcaacagcgtggttttgatatctttcttgacctgaaattccacgatatccccaacactgcagcgcacgctgtcgctgctgcagctgacttaggcgtgtggatggtgaatgttcatgcctctggtggggcgcgtatgatgaccgcagcgcgtgaggcactggttccgtttcgccccgatgcaccgcttttgattgctgtgccagtatgacgcagcataaaagccagcgacctggtcgttcctctaga

SEQ ID NO: 18362 - DNA, 796 bp, Homo sapiens
  SIMILAR (660)..(76): 971254mologous to Escherichia coli K12 regulator of melibiose operon,accession number AE000484,Smith-Waterman Score=1017.
ttatgggatgcagctgctgcctgcagttctgacaatatatgaattactcaatctctctgaatgtcgtttcctcttccgctggaatatccccattgcatagttggcgttaagtttgacgtgctcagccacatcgttgatggtcagcgcctgatcatagttttcggcaataaagcccagcatctggctaacataaaattgcgcatggcgcgagacgctgtttttgtgtgtgcgcgaggttttattgaccagaatcggttcccagccagagaggctaaatcgcttgagcatcaggccaatttcatcaatggcgagctggcgaatttgctcgttcggactgtttaattcctgctgccagcggcgcacttcaaacgggctaagttgctgtgtggccagtgatttgatcaccatgccgtgagtgacgtggttaatcaggtctttatccagcggccaggagagaaacagatgcatcggcagattaaaaatcgccatgctctgacaggttccggtatctgttagttggtgcggtgtacaggcccagaacagcgtgatatgaccctgattgatattcactttttcattgttgatcaggtattccacatcgccatcgaaaggcacattcacttcgacctgaccatgccagtggctgttgcaactcgcatgtcctcctttcttatggccactgtcaacttgggtgacaccaacttccggctgctgctggtccttagtatgccaccatcctctgttgattcccttcttggtgccaacatctctgcatattgcacctttatttagcttt

SEQ ID NO: 18363 - DNA, 756 bp, Homo sapiens
  SIMILAR (1)..(342): 1001254mologous to Escherichia coli yejF,accession number U00008,Smith-Waterman Score=579.
atgcatgaagtgggattagatcctgaaacacgccaccgttatccggcggagttctctggtggtcagcgacaacgtattgcgattgccagggcattaattcttaagccctcgctgatcatacttgatgaaccgacatcatcactcgacaaaacggtacaggcgcaaatattgacgctattgaaatcattgcaacaaaagcatcaactggcctatttgtttatcagccacgatttgcacgttgtccgcgcgttatgtcatcaggttatcatactgcgacaaggggaagtagtggaacaaggaccgtgcgcgcgcgtgtttgccacaccgcagcaggagtatacggttcatccaaacaaacacaattctgaaatcggttttgccaaagaaaatgccgcaggtatcccgatggatgccgccgagcgtaactataaagatcctaaccacaagccggagctggtttttgcgctgactgatccgacgctgaccgtacaggcgtataccgttaatcctcaaacagagcgggtgaaaatgtactggcaaaaagccaatggcgaagcgtggggaacgttacatgctctgctggcggatattaatagtcagggtcaggtgcagatggcgatgaacggcggcatctatgatgaaagctatgcgccgctcggtttgtacatcgaaaacggtcagcagaaggccccggtgtgtgatgttccccctcctgtgtccaagtattctcattgttcaattcccacctatgagtga

SEQ ID NO: 18364 - DNA, 1065 bp, Homo sapiens
  SIMILAR (718)..(918): 1001254mologous to Escherichia coli orotidine 5' monophosphate (OMP) decarboxylase (E.C. 4.1.1.23),accession number J02768,Smith-Waterman Score=343.
atgggtcgcgagaatgcgtacgccagaagcgttagtagacgctattcgcatttaccaacagagcgcatcgacagaggtgtctacgacctgagcgtgcgcaaaacagttggcgttaagtttgacgtgctcagccacatcgttgatggtcagcgcctgatcatagttttcggcaataaagcccagcatctggctaacataaaattgcgcatggcgagaaatattgggatgaaggttcatccaaacaaacacaattctgaaatcggttttgccaaagaaaatgccgcaggtatcccgatggatgccgccgagcgtaactataaagatcctaaccacaagccggagctggtttttgcgctgacgcctttccttgcgatgaacgcgtttcgtgaattttccgagattgtctccctactccagccggtgcacatccggcgattcgctaaaaaccaggcgcggacgcccacagcatgggccacgttcacggcttcagcggtggacataatcgctgtcagtgtatccattgacgttttcttttcgccgttggcacgcagatcgcggaaggaccgagccgatagaaccacttctaatgacttcctgaaagactaccaggtgctgcgttttcggaagaagaatagcgttttccagagatccccgtaccggaagttcttttacctgtttcgcgccacttccggtgcccatcatcaagaaggtctggtcatgacgttaactgcttcatcttcttcccgcgctgttacgaattctcctgtggttgttgcccttgattatcataatcgtgatgacgcgctggcctttgtcgacaagatcgacccacgcgattgtcgtctgaaggtcggcaaagagatgtttacattgtttgggccacagtttgtgcgcgaacttcaacagcgtggttttgatgactctagagatccccgtaccgcaggtatcattaacgtttggagaactgcggacgacgacgtgtttacgcagaccgactttcttacgttcaacctgacgactctagagatccccggtaccggcgtgcatcgaacattatgtgtttag

SEQ ID NO: 18365 - DNA, 999 bp, Homo sapiens
  SIMILAR (259)..(996): 791254mologous to Escherichia coli K12 putative ATP-binding component of a transport system,accession number AE000215,Smith- Waterman Score=938.
atgtctcgtgttgctaaagcaccggtcgttgttcctgccggcgttgacgtaaaaatcaacggtcaggttattacgatcaaaggtaaaaacggcgagctgactcgtactctcaacgatgctgttgaagttaaacatgcagataataccctgaccttcggtccgcgtgatggttacgcagacggttgggcacaggctggtaccgcgcgtgccctgctgaactcaatggttatcggtgttaccgaaggcttcactaagaagctgcagctggttggtgtaggttaccgtgcagcggttaaaggcaatgtgattaacctgtctctggccatactgcagacgagtactcaagggtctgaggtgtgtggaccgtatctgggaatccaacggattgctccaacgtcgcagttcccaaagcctagcgcgactacagaagatgcagcatccaaaatagcactattaagtgttgaactttcaagtgctttggatagtattgatgttaacaaaactacaacggatgtaagtatccttaatcgaagtattatcacacctggtaataatgttctggttaataatactggaggtgacttaaacataatttcgtccgactctattctaaatggagcgactaaactcgtcagcggcacaaccacgctgaagctttcagaaaatacaatctggaatatgaaagatgactccgttgttacccatctgactaattcagacagtattatcaatctttcgtatgatgatggtcaaacatttacccaaggaaaaacattaaccgtaaaaggtaattatgtcggtaataatggtcagcttaatatccgcaccgtattaggtgatgataaatcggctacggacagacttattgttgagggtaatacttcgggttcaactaccgtctatgtgaaaaatgctggaggaagcggcgcggccacgctaaacgggatcgaactcataactgtgaatggcgatgaatctccagcagatgccttcagataa

SEQ ID NO: 18366 - DNA, 1006 bp, Homo sapiens
  SIMILAR (427)..(810): 991254mologous to Escherichia coli B12-dependent homocysteine -N5-methyltetrahydrofolate transmethylase,accession number U00006,Smith-Waterman Score=654.
atgttaagggtctaccattccaatcgtctggacgtgctggaagcgttgatggagtttattgtcgaacgcgaacggctggacgatcctttcgaaccagagatgattctggtgcaaagtaccggtatggcacagtggctgcaaatgaccctgtcgcaaaagtttggtattgcggcaaacattgattttccgctgccagcgagctttatctgggatatgttcgtccgggtgttaccggaaatccccaaagagagcgcctttaacaaacagagcatgagctggaaactgatgactctgctgccgcaattgctggagcgcgaagactttaccctgttgcggcattatctgactgacgatagcgacaagcgaaaactgttccagctttcctcaaaagcggcggacctgtttgaccacgtgtcgggagcaagtgtgagcagcaaagtggaacaactgcgtgcgcagttaaatgaacgtattctggtgctggacggcggtatgggcaccatgatccagagttatcgactgaacgaagccgattttcgtggtgaacgctttgccgactggccatgcgacctcaaaggcaacaacgacctgctggtactcagtaaaccggaagtgatcgccgctatccacaacgcctactttgaagcgggcgcggatatcatcgaaaccaacaccttcaactccacgaccattgcgatggcggattaccagatggaatccctgtcggcggaaatcaactttgcggcggcgaaactggcgcgagcttgtgctgacgagtggaccgcgcgcacgccagagaaaccgcgctacggttgccggtgttctcggcccgaccaaccgcacggcgtctatttctccggacgtcaacgatccggcatttcgtaatatcacttttgacgggctggtggcggcttatcgagagtccaccaaagcgctggtggcaggcattgtgctcatgcctgcaatcccagcactttgggaggctgagccaggtggatgtgcttga

SEQ ID NO: 18367 - DNA, 1108 bp, Homo sapiens
  SIMILAR (436)..(1107): 631254mologous to Escherichia coli permease,accession number M58000,Smith-Waterman Score=751.
atggaaggtcaacagcacggcgagcagctaaagcgcggccttaaaaaccgccatattcagcttatcgcgctgggtggcgcgatagggaccgggttattcctgggtagcgcctccgtaatacagtccgcagggccagggattatcctgggttacgccattgctggttttatcgcctttctgatcatgcgtcagctgggtgaaatggtggtcgaagaacctgtcgcaggctcctttagccactttgcttataaatactggggcagttttgccggtttcgcctctggctggaactactgggtactgtacgttttagttgccatggctgagctgactgccgtgagtaaatacattcagatctggtatccggaaatccccacctgggtttctgccgacgtattctttgtggtgattaacgccatcaacctgaccaacgctaaagcgacagttagcaacctgtgggatcagggtgttttcctgccgcacggcttcaccgggctggtgatgatgatggcgattatcatgttctcgttcggtggtctggaactggtggggatcaccgcagcagaagctgataacccggagcaaagtataccgaaagcaactaaccaggttatctaccgcatcctgattttctatattggttcgttagccgttctgctctcactgatgccgtggacccgcgttaccgccgataccagtccgtttgtgctgatcttccacgagttaggcgatacctttgtggcgaatgcgctgaacatcgtggtactgactgcggcgctctccgtgtacaacagctgcgtatattgcaacagccgtatgctgtttggtctggcacaacagggtaatgcgccaaaagcgctggcgtctgtcgataaacgtggtgtaccagtaaataccattctggtgtctgcactggtaacggcgttgtgcgtactgattaactaccttgccccagagtccgctttcggactgttaatggcgctggtggtatctgcactggtaatcaactgggcgatgattagcctggcgcatatgaaattccgtcgcgccaagcaggaacaaggcgtggtaactcgcttcccagctctgctttatccgctgggtaact

SEQ ID NO: 18368 - DNA, 3936 bp, Homo sapiens
  SIMILAR (2113)..(2796): 981254mologous to Escherichia coli ATP synthase gamma subunit (atp-7),accession number J01594,Smith-Waterman Score=1153.
atgaacatcgatgcaaaaatcctcaataaaatactggcaaaccgaatccagcagcacatcaaaaagcttatccaccacaatcaagttagcttcatccctgggatgcaaggctggttcaacatacacaaatcaatgaaagtaatccagcatataaacagaaccaaagacaaaaactacatgattatctcaatagatgcagaaaaggcctttgacaaaattcaacagcccttcatgctaaaaactctcaaaaaactagtggctggcatgatggcagtggctgctcctgacgacccgccaccgccatcggtatcatcttccaagccatcaacagtggcacctccgggccgcatctccccgtcggggcgcgccctctgcaccagcttacccagtgccttgagcagctcgtcgaaattctcgctgctgcgcatcttccaggtgccggcgaagttgggcatggtggcggtggcggcggcggcaggtgtgaacgccatgctgaggaaagtggccgtagcggctgcgtccaagccgcacgtggagatccgccaggacggggatcagttctacatcaagacatccaccacggtgcgcaccactgagatcaacttcaaggtcggagaaggctttgaggaggagaccgtggacggacgcaagtgcagggtgaggccccagagccactacagcgtccccgtgtccccgctcggtgcccatggcccactgctgctggaggaacctgtgtctccctttgcagcctgtggcgcgccttccttgcaggtgcctcaaggcgcgcagcgctgggcgcatagcgccagtctccgccttgcgagctcagagtgtgcccgctgcacctacgctgtcggtccctcacgcaacagcctctgcccccatgcccaatttcgtcggcacttgaataatgctcagcgagctgaaaatttctcctatctgctcaaggcactggggtacgaactggcaagaattcttccgcttcttaatgagcgcttttaccctgtgctttccattagaacccatactggggttagcttcgttttcattcagtgcctggcctctgtcctcgatatcagtttagccacttgggagaatgagaacaagatccgctgcacgcaaactcttcttgaaggggacggccccaaaacatactggacccgtgagctggccaacgatgaacttatcctgctgattgaatttggtgtggtcgccgcacctgagggccagcagtccacagctgtctaccactggtgcaataccgcggtgctggacccactggcatgtatgttactaattttgatgaatcttgccaaattgctttccacagagcttgggtaccgagctcgaagctttccctcaacccaaaaaaacctttttaaaaatacaagtcgacactgcatgttcactcagtgcggcagcgaaaatgacgtctactcaagcggtagcctcactcacggcacgcaggtgaataaactgctgcagaacatccgggagcgcgttaagacgaccattttcagccataacccgaatcaggttctgaccgttttcgtccagttgctcaccacaaactgcgataaacgactcggcgagcgtttctggcgcaagcgcgccagagagaagctctgccatttgttcgtttttggttacctcggcggcaaacgccagcatgtcctgccagcgttctacactttggtgttcgacggcaaagtcaaaagctgctttggcttcagcgacaagtttatccacgatgtcgctgttagcagcttcatccacggaacgttcgatgatcttctcggcgccagcaacagccaggatagcaacttgcttacgcagctcttcacgggcacgtttacgctcggcttcaatttccgcctgcgcctgggccacgattttactggtcggtcgcgctggcctttgcaaggtcaaggtccttatgtgctcgttctgcggaagcaaggccgtcagcaatttctttttgacgtttttcgatggctgccattaatggcggccatacgtacttcatgcagaacagaacgaacaggacaaacgcgatggcctggccgaggattgttgcgttcagattcaccacacaagggtctgagccaggagtcgtacccttatgcagaaaccatgcgcaaagtgattggtcaccttgcacacggtaatctggaatataagcacccttacctggaagaccgcgacgttaaacgcgtgggctacctggtggtgtcgaccgaccgtggtttgtgcggtggtttgaacattaacctgttcaaaaaactgctggcggaaatgaagacctggaccgacaaaggcgttcaatgcgacctcgcaatgatcggctcgaaaggcgtgtcgttcttcaactccgtgggcggcaatgttgttgcccaggtcaccggcatgggggataacccttccctgtccgaactgatcggtccggtaaaagtgatgttgcaggcctacgacgaagtccgtctggacaagctttacattgtcagcaacaaatttattaacgccatgtctcaggttccgaccatcagccagctgctgccgttaccggcatcagatgatgatgatctgaaacataaatcctgggattacctgtacgaacccgatccgaaggcgttgctggataccctgctgcgtcgttatgtcgaatctcaggtttatcagggcgtggttgaaaacctggccagcgagcaggccgcccgtatggtggcgatgaaagccgcgaccgacaatggcggcagcctgattaaagagctgcagttggtatacaacaaagctcgtgtaagaatgagtgcagaaccatcaccgccaccggttgccgcaagcgcgacacccaccgccgagcttacggtgctgacgctggtcgcggaggaactccccgccgaaaccgacgttgctgccgaccctgccgcttcgcccacctgtacaggcatgcggccgctgcactatgcggcctggcagggccggaaggagcccatgaagctggtgctgaaggcgggctcggccgtgaacatcccgtctgatgagggccacatccccctgcacctggcggcccagcatggtcactatgatgtgcaccagccctacctgcgtcagcgcacggaagaccgccggacgcggcactacctggcgcaatccttcgcgcagtattcgctccggcagtgggcgtttcactttctgctcgacaatatcacgcccgatatccagcaaattgtgatagcgcacaccagaaggacaggtggtttcacaattacggcaagtgaggcagcgatcgagatgctcctgtgttttaagcgtgacttcgttgccttacagcacctgtttaatcagatagatgcgcccgcgcgggccgtccagttcatcgcccagaagctgataggttgggcatgttgcgaagcagcgcgcaaaaatcagctgccacacaacacaacaaagcgaagcctactcatgagcatcttgtacgaagagcgtcttgatggcgctttacccgatgtcgaccgcacatcggtactgatggcactgcgtgagcatgtccctggacttgagatcctgcctaccgatgaggagatcattccttaccagtgtgacgggttgagcgcgtatcgcacgcgtccattactggttgttctgcctaagcaaatggaacaggtgacagcgattctggctgtttgccatcgcctgcgtgtaccggtcatggtattcccgggcctgcgtctgagccgtgaagccttcctcaccacggccgaatttgggacccaggagctccggcggcccgcccagctgcggctgcaggtgtaccggctcctcagcacagcaggcaggcaccacccggctcagaactcacccatccgggtcctggaagttgacattgatcttcttggtggaacccaggagctctggggatggaaggagactcactga

SEQ ID NO: 18369 - DNA, 1741 bp, Homo sapiens
  SIMILAR (427)..(939): 971254mologous to Escherichia coli peptidase E,accession number U00006,Smith-Waterman Score=870.
ggcgcgaacctcctggatcttacatttagcgatgcgcagcaggacgctcagagcgctaaacggtcacgccagggccttcacagatgacgcgtacacccgcgaccagtccagctggtcctgcgcccgctcccctatagtggactcgcttgcgggcgggagaacattgcgctatgggcaaaatattctcttaaacgggccgatgagtcgggcagcataaattctcctgtaaaaaacggaatatcccgtacttttgggttgataaaaaatagtcatgagcgaactattagttatttccattggcttgaattcgttacctgctcaaatcactttccagaagcaatgtgcgacatcgtgagccatgtcagtaagtggttaaattcccagtggtagcatgcctcccgccatttctaactagccggagaagtaatggacctgcttttattgagtaactcgacgctgccgggtaaagcctggctggaacatgcactgccgctaattgctgaacagttgcagggtcgccgctcagcggtgtttatccctttcgctggcgtaacgcagacctgggatgattacacagcgaaaacggttgcggttctcgctccgctgggtatttctgtcaccggtattcatagcgttgtcgatcccgttgccgcgattgaaaatgctgagatcgtgattgtcggcggcgggaatactttccagttgctgaaacagtgccgcgagcgcgggctgctggcaccaattactgacgtggttaaacgtggcgctctgtatattggctggagcgcaggcgctaaccttgcttgcccaactattcgtaccaccaacgatatgccgattgtcgatccgcaaggtttcgatgcgctaaatctgttcccgctgcaaatcaacccgcacttcaccaacgcgctgccggaaggccataaaggtgatcctcgtttgtttcgttattcgcgaactgctggtcgtcgcgccagaactgacgattattggtctaccggaaggtaactggatcacagtgagtaaaggcatgctcgccaaatcccctgttgattctaactccacccagctcaaagaggctgaagaagagcgactaaaagctgcacagtatggtttacaactagtagagagtcaaaatgaattacagaatcaattggataaatgtcgtaatgaaatgatgaccatgactgagatgcagctgcgaaataaaaaacgccgccgtgaactgggcaatctgattaaacgctttcgtagcggcgcggagtcgctgcccgacgcggtggtgctgaccacggaagagggcggtattttctggtgtaacggtctggcgcaacaaattcttggtttgcgctggccggaagataacgggcagaacatccttaacctactgcgttacccggagtttacgcaatatctgaaaacgcgtgatttttctcgcccgctcaatctggtgctcaacaccgggcggcatctggaaattcgcgtcatgccttatacccacaaacagttgctgatggtggcgcgtgatgtcacgcaaatgcatcaactggaaggggcgcggcgtaacttttttgccaacgtgagccatgagttacgtacgccattgaccgtgttacagggttacctggagatgatgaatgagcagccgctggaaggcgcggtacgcgaaaaagcgttgcacaccatgcgcgagcagacccagcggatggaaggaactgtgaagcggtaccgagctcgatag

SEQ ID NO: 18370 - DNA, 3091 bp, Homo sapiens
atgaaaaaactgtccggcggtatccgtaccgctctggcacagtatcgtgaactggcagcgttctctcagtttgcatccgaccttgacgatgcaacacgtaagcagcttgaccacggtcagaaagtgaccgaactgctgaaacagaaacagtatgcgccgatgtccgttgcgcagcagtctctggttctgttcgcagcagaacgtggttacctggcggatgttgaactgtcgaaaattggcagcttcgaagccgctctgctggcttacgtcgaccgtgatcacgctccgttgatgcaagagatcaaccagaccggtggctacaacgacgaaatcgaaggcaagctgaaaggcatcctcgattccttcaaagcaacccaatcctggtaacgtctggcggcttgccttatggcaggccgcaaggcattgaggagaagctcatggccggcgcaaaagagatacgtaataagatcgcaagcgtccaaaacacgcaaaagatcactaaagcgatggagatggtcgccgcttccaaaatgcgtaaatcgcaggatcgcatggcggccagcccgtccttatgcagaaaccatgcgcaaagtgattggtcaccttgcacacggtaatctggaatataagcacccttacctggaagaccgcgacgttaaacgcgtgggctacctggtggtgtcgaccgaccgtggtttgagcggtggtttgaacattaccctgttcaaaaagctgctggcggaaatgaagacctggaccgacaaaggcgttcaatgcgacctcgcaatgatcggctcgaaaggcgtgtcgttcttcaactccgtgggcggcaatgttgttgcccaggtcaccggcatgggggataacccttccctgtccgaactgatcggtccggtaaaagtgatgttgcaggcctacgacgaaggccgtctggacaagctttacattgtcagcaacaaatttattaacaccatgtctcaggtttcgaccatcagccagttgctgccgttaccggcatcagatgatgatgatctgaaacataaatcctgggattacctgtacgaacccgatccgaaggcgttgctggagcagtgcagctgcatgcttaggtcaccggcatgggggataaccagtacagatacaactcgagctcgtaccgacttggcatgtcccatctggcttcttttagatccctaccccaagcttatgggtaatgcgccaaaagcgctggcgtctgtcgataaacgtggtgtaccagtaaataccattctggtgtctgcactggtaacggcgttgtgcgtactgattaactaccttgccccagagtccgctttcggactgttaatggcgctggtggtatctgcactggtaatcaactgggcgatgattagcctggcgcatatgaaattccgtcgcgccaagcaggaacaaggcgtggtaactcgcttccctgctctgctttatccgctgggtaactggatctgcctgctgtttatggcggcggtactggtgattatgctgatgaccccaggaatggcgatttcggtatacctgatcccgcccttacaaaccaacaccttcaactccacgaccattgcgatggcggattaccagatggaatccctgtcggcggaaatcaactttgcggcggcgaaactggcgcgagcttgtgctgacgagtggaccgcgcgcacgccagagaaaccgcgctacgttgccggtgttctcggcccgaccaaccgcacggcgtctatttctccggacgtcaacgatccggcatttcgtaatatcacttttgacgggctggtggcggcttatcgagagtccaccaaagcgctggtggaaggtggcgcggatctgatcctgattgaaaccgttttcgacacccttaacgccaaagcggcggtatttgcggtgaaaacggagtttgaagcgctgggcgttgagctgccgattatgatctccggcaccatcaccgacgcctccgggcgcacgctctccgggcagaccaccgaagcattttacaactcattgcgccacgccgaagctctgacctttggcctgaactgtgcgctggggcccgatgaactgcgccagtacgtgcaggagctgtcacggattgcggaatgctacgtcaccgcgcacccgaacgccgggctacccaacgcctttggtgagtacgatctcgacgccgacacgatggcaaaacagatacgtgaatgggcgcaagcgggttttctcaatatcgtccgcggctgctgtggcaccacgccacaacatattgcggagatgagtcctggccgtaaaaggttaacgccgcgcagaatcgagctcggtaccctcgacgctgccgggtaaagcctggctggaacatgcactgccgctaattgctgaacagttgcaggtcgccgctcagcggtgtttattccctttcgctggcgtaacgcagacctgggatgattacacagcgaaaacggctgcggttctcgctccgctgggtgtttctgtcaccggtattcatagcgttgtcgatcccgttgccgcgattgaaaatgctgagatcgtgattgtcggcggggggaatactttccagttggctgaaacagtggccgcgaagcgcgggctggtggcaccaattactggacgtgggcggcaggggctaaacttggttggccaaatattcgtaccaacaacgatatgccgattgtcgatccgcaagggtttcgatggcgctaaatctgttcccgctggcaaatcaacccggcacttcaccaacgcgctggcggaagggcataaaggtgaaacccgtgagcagcggtattcgcgaactggtggtcgtcgcgcccgaactgacgattattggtctaccggaaggttactggatcacggaaaaacattaaccgtaaaaggtaattatgtctataatggtcatttacgcaccgtattagtgatgaaatcggacggagatagtagtatacttcgggttcctagctatgtgaaaaatgctggaggaagcggcgcggccacgctaaacgggatcgaactcataactgtgaatggcgatgaatctccagcagatgccttcagatga

SEQ ID NO: 18371 - DNA, 384 bp, Homo sapiens
  SIMILAR (133)..(327): 811254mologous to Homo sapiens Human transmembrane protein HTMPN-60,accession number Y57936,Smith-Waterman Score=296.
ctggttgattgagatgctgatcctacagtactcccgctgtgcctcagcagtgagctgggatgtaaaggcaggaggcttgctggggtctgacacttccctgcccttcttcaggagggacacatctggggctatatgaggaggacagctttcatcctgggctatggacttctgtcatttgcggccttctggaactcaatgacatggcatcttcagagactttggggtgcttgtggctacttttggcatgcccaatgggagaggctgctgactacatttgaagggaacgagtggatcctcatctttatagggggcatcctgtgaaactgcgccaggctatccacacagatcttttcaaccagtgcatgatatctttgcccatggtgg

SEQ ID NO: 18372 - DNA, 1149 bp, Homo sapiens
  SIMILAR (134)..(430): 981254mologous to Homo sapiens Human transmembrane protein HTMPN-60,accession number Y57936,Smith-Waterman Score=540.
ggcacgaggagatgctgatcctacagcactcccgctgtgcctcagcagtgaggtgggtgtaaaggcaggaggcttgctgtggacttgacactttgcctgcgccttctccaggtagggacacatctggggctctatgaggaggacagcttttatcctgggctctggacttctctcatttgtggccttctggaactcagtgacatggcatcttcagagattttggggtgcttctggctacttttggcaagcccagtgggagaggctgctgactacatttgaagggaaggagtggatcctcttccttataggtgctatccaagtgccttgtctcttcttctggagcttcaatgggcttctattggtggttgacacaacaggaaaacctaacttcatctctcgctaccgaattcaggtcggcaagaatgaacctaatattacctgccgtctgtacaaccttgtggtctacacaatgactacagagctacattggaagatgtcattgcattctgcagaagctgaggttcagaaatcgtccagtgactagctcaagatcagattgctgctaggaaacagagccagggctcatcccatctgacaccaagtccagtgctcctgtacctacatgcaccctcaagtgggcacacaagcaggaaagaacctcacgaggccatttaatctttggctgtttcaaggaaggactggcccctgaactaacacatcagaaacagatcctcaaagtggggagcttgaatgctacctggtgttcctatgatccattcctggctctggtttactcttccacttgcctgaatggctagtttcacaacctcctcccctaactgctggcagagggagggggccttgctttccattttactaaggaaaattttaggcctgggggtgggtgggttcatgcctgtaatcccagcactttgggaggccgagatgggcaaatcacttgagctccggagttcaagaccagcctgggcaacatggcaaaaccctgcctctactaaaaatacaaaaattagctgggcatggtggcgcatgcctggaggagaattgcttgaacctgggaggcagaggttacagtgagccgagattgcaccactgcactccagcctgggcgacagagcaagactctgcctc

SEQ ID NO: 18373 - DNA, 373 bp, Homo sapiens
  SIMILAR (55)..(366): 991254mologous to Escherichia coli O157:H7 uracil transport protein,accession number AP000422,Smith-Waterman Score=517.
atgccatatcggggatcctctagagtggcctgtcaggaaggcaaactcagtgggagcggcgtggtcgcgccggatgaacgattgccgtttgctcagacggcagtaatgggcgttcaacactcggtggcgatgtttggcgcgacggtgttaatgccgattctgatggggctggatcccaatctttccattttaatgtcggggatcggcacgttactgtttttctttattaccggcgggcgcgtccccagttatctcggctccagcgcggcttttgtcggcgtggtgatcgccgcgacgggctttaacggtcagggcattaacccgaatatcagcattgcgctgggcgggattatcgcctgtgggctggacgaaa

SEQ ID NO: 18374 - DNA, 397 bp, Homo sapiens
  SIMILAR (204)..(79): 401254mologous to Corynebacterium glutamicum RXS03159,accession number AX063915,Smith-Waterman Score=77.
atttttggggaccagcctaggaatgggcctcttactcgtgcaggccaaagccatgcagcttctgtactgcctgaagaccgagcactctgaggacgatgtgcagagcaagcagtggctcacccatttccttgaccaatttaccaacattaagaacagcctggtcttgaagaaaattgaggtacctggcggtttgggtttacaaggaggccaggagaaggtgggagggacgaggaagatttgcacccagaaccctaacaaaagtactgcatgactacttgatggggcccttgcctcaaagccgggtttgctctgctgtatttggtactcaatccaattttcttaaccctgacagatgctagaaatcgtgaatcctgggtaacattgcagtcgataacgc

SEQ ID NO: 18375 - DNA, 594 bp, Homo sapiens
  SIMILAR (22)..(132): 891254mologous to Mus musculus rab18,accession number X80333,Smith-Waterman Score=163.
tcagagcccagcagggtgaggatggatgaggatgcgctgaccaccctgaagatcctcatcattggcgagagtggggcgggcaagtccagcctgctcttgagtttcacagataatacttttgatccagaacttctcctggcctccctgtaaacccgaacagccaggtacctcaattttcttcaaggccaggctgttcttaacgttggcaaattggtcgaggaaatgggtgagccactgcttgctctgcacgtcgtcctcagggtgctcggtcttcaggcagtacagcagccacacggctttggcccgcaggagtaagtggcccattcctaggctgtcccccaagatgtgtcctccgaagaagctggtcaggtagaggggatgcccgccctgctggtactggatctggcttccgtttccccgcgccacacgcagatcctgcaccgcaccgtccagtttgctgacttctgcaaagatggccgggtccagcagtgagtcgctgtggaagaccgccagaagcgaggcgcaattggcctcggtgctcatcctggaagccgagaagacgtaggagtcgttgttggtgaaatggctctgcat

SEQ ID NO: 18376 - DNA, 440 bp, Homo sapiens
  SIMILAR (224)..(439): 981254mologous to Homo sapiens zinc finger protein,accession number U09847,Smith-Waterman Score=384.
  misc_feature (1)...(440): n = a,t,c or g
tcttggcatacccgnctggaattcccgnnnnnaaatctcgtgtctttgtctcgctgcagcgggtgctgcaggtttggccttcacttttctgcgtcctcttactcctagaggcccagcctctgtggcgctgtgatctggttatcgggagattcacagctaagacgccaggatcccccggaagcctagaaatgctctgtgttctcgttttgcccaagacctttggctagagcagaacataaaagattctttccaaaaagtgacactgagcagatatggaaaatatggacataagaatttacagttaagaaaaggctgtaaaagtgtggatgagtgtaagggacaccaaggaggttataatggacttaaccaatgtttgaaaattaccacaagcaaaatatttcaatgtaataaatatgtaaaagtcatgcataaattttcac

SEQ ID NO: 18377 - DNA, 2175 bp, Homo sapiens
  SIMILAR (325)..(2172): 991254mologous to Homo sapiens BC273239_1,accession number AC007204,Smith-Waterman Score=3397.
tcagaggcgctgggctggaaaccgtccaatcaggcacgcagtggaatgaacaggacggcttccggatttggcggggtctttgtctctcccgcagctggagctccaggtcgtctgttcactgctgtgtgtcctctgctcctagaggcccagcctctgtggccctgtgtcctgcaggtattgggagatccacagctaagacgcccgggagcccctggaagcctagaaatggccagaaaaactgggaaaaacaggctcttccacttactggatgtttgacaaaatatccttcttgggccaaaaacattgacatcattggggccattgcaatttagagacgtggccatagaattctctctggaggagtggcattgcctggacactgcacagcggaatttatataggaatgtgatgttagagaactacagaaacctgggctttcttggtattgttgtctctaagccagacctgatcgcccatctggagcaaggaaaaaaacctttgactatgaagagacatgagatggtagccaacccctcagttatatgttctcattttgcccaagatctttggccagagcagaacataaaagattctttccaaaaagtgatactgagaagatatgaaaaacgtggacatggaaatttacagttaataaaaaggtgtgaaagtgtagatgagtgtaaggtgcacacaggaggttataatggacttaaccagtgtagtacaactacccagagcaaagtatttcaatgtgataaatatgggaaagtctttcataaattttcaaattcaaatagacataatataagacatactgaaaaaaaacctttcaaatgcatagaatgtggcaaagcttttaaccagttctcaacccttataacacataagaaaattcatactggagagaaaccctacatttgtgaagaatgtggcaaagcctttaagtactcctctgcccttaatacacataagagaattcatactggagagaaaccatacaagtgtgataaatgtgacaaagcctttattgcatcctcaacccttagtaaacatgagatcattcatactggaaagaaaccctacaagtgtgaagaatgtggcaaagcttttaaccaatcctcgacacttactaaacataagaaaattcatactggagagaaaccctacaaatgtgaagaatgtggcaaagcttttaaccaatcctcaacacttactaaacataagaaaattcatactggagagaagccctacgtttgtgaagaatgtggcaaagcctttaagtactcccgtatccttactacacataagagaattcatactggagagaaaccatacaagtgtaataaatgtggcaaagcctttattgcatcctcaacccttagtagacatgagttcattcatatgggaaagaaacattacaaatgtgaagaatgtggcaaagccttcatttggtcctcagtcctaactagacataagagagttcatactggagagaagccctacaaatgtgaagaatgtggcaaagcctttaagtactcctctacccttagttcacataagagaagtcatactggagagaaaccctacaaatgtgaagaatgtggcaaagcctttgttgcatcctcaacccttagtaaacatgagatcattcatactggaaagaaaccctacaagtgtgaagaatgtggcaaagcttttaaccagtcctcatcccttactaaacataagaaaattcatactggagagaaaccctacaaatgtgaagaatgtggcaaagcttttaaccagtcctcttcccttactaaacataagaaaattcatactggagagaaaccctacaaatgtgaagaatgtggcaaagcttttaaccagtcctcaacccttattaaacataagaaaattcatactagagagaaaccctacaaatgtgaagaatgtggcaaagcttttcacctatccacacaccttactacacataagatacttcatactggagagaaaccttatagatgtagagaatgtggcaaagcttttaaccattctgcaaccctttcttcacataagaaaatccattctggagagaaaccatacgagtgtgataaatgtggcaaagcctttatttcaccctcaagccttagtagacatgagataattcatactggggagaaaccctag

SEQ ID NO: 18378 - DNA, 426 bp, Homo sapiens
  SIMILAR (164)..(316): 881254mologous to Homo sapiens dJ599F21.1 (KIAA1637),accession number AL035662,Smith-Waterman Score=256.
cggcacgagatcatctcagtgagacaggttaactctatcacagccacagagctgataatgcagtgagtcccagatataaacctcatttgtctaatcccagagaattctctaggtgactttttcaggataagacacagttttatctttatgaaaatttccttaacttttcaggagagaaggctcttatgaccgatacctactaatggatgactattgcaggagaaaggatgactcttattttgaccgttacagagatagctttgatggacggggccctccaggcccagaaagtcagtctcgtgcaaaaggtaaagtagctgaaacagtctattcctattattgatagaacactttacaaaagagagaggaaactaataaccagtacccccatctgaaaaagggctagtgccttggccaagcagtgta

SEQ ID NO: 18379 - DNA, 999 bp, Homo sapiens
  SIMILAR (420)..(995): 1001254mologous to Homo sapiens nuclear receptor coactivator CIA,accession number AF230533,Smith-Waterman Score=990.
atgaaggatccatatggctttggagacagtcgagattcaaggcgtgatcgatccccaattcgaggaagtccaaggagagagcccagggatggcagaaatggccgggatgcccgggacagcagagacattcgagacccccgagacttgcgggaccacagacatagtagagatttgcgggatcacagagacagcaggagtgtgcgcgacgttcgggacgtgagggatcttagagactttcgtgatctaagagactctagggattttcgagatcagcgagaccccatgtacgacagatacagagacatgagagactcccgagatcctatgtacaggagagaaggctcttatgaccgatacctacgaatggatgactattgcaggagaaaggatgactcttattttgaccgtttacagagattagctttgatggacggggccctccaggcccagaaagtcagtctcgtgcaaaagagcgtttgaaacgtgaggaacggcgtagagaagagctttatcgtcaatattttgaggaaatccagagacgctttgatgccgaaaggcccgttgattgttctgtgattgtggtcaacaaacagacaaaagactatgctgagtctgtggggcggaaggtgcgagacctgggcatggtagtggacttgatcttccttaacacagaagtgtcactgtcacaagccttggaggatgttagcaggggaggttctccttttgctattgtcatcacccagcaacaccagattcaccgctcctgcacagtcaacatcatgtttggaaccccgcaagagcatcgcaacatgccccaagcagatgccatggtgctggtggccagaaattatgagcgttacaagaatgagtgccgggagaaggaacgtgaggagattgccagacaggcagccaagatggccgatgaagccatcctgcaggaaagagagagaggaggccctgaggagggagtgcgtgggggccaccctccagccattccag

SEQ ID NO: 18380 - DNA, 681 bp, Homo sapiens
  SIMILAR (88)..(288): 971254mologous to Escherichia coli K12 putative ATP-binding component of a transport system,accession number AE000184,Smith- Waterman Score=337.
ctataacagggcccaagagaaaccaacaacgcgttctgataaaaaactatggccagtgggtaaacgaaagaaaaaaaacaagaaacatttgaaaacatttccgtcaaatttggcggcggcaaccgttacggcctgattggcgcgaacggtagtggtaaatccacctttatgaagatcctcggcggcgaccttgagccgacgctgggtaacgtttccctcgatcccaacgagcgcattggtaaactgcgtcaggatcagtttgcctttgaagagttcactgagctggaatgaacttataatgcgcttccaatactctaatattctgataactgccccgaaagggggttgtcccatctcccgagcctccctaaaccgtggccaggaaaggagcgcacctcgagtcctgcggggaagcggagccgggacactccgcattgcacgggtgtcatttctcctgtggccctttcctgtgacgttgccggctggtgggcgcagccctaggcgttcaggaagaggaggcgggcactggcgcggcggttgagctagtcgggctgggcttttgcccgcatccttttcaagctgaagcagtttcctcccagcttgactgagaaggcgttggggcaggcgatgctgctcttctccttcccctccagtccactggtttccctgctgttctgacat

SEQ ID NO: 18381 - DNA, 550 bp, Homo sapiens
  SIMILAR (380)..(550): 841254mologous to Escherichia coli K12 putative ATP-binding component of a transport system,accession number AE000184,Smith- Waterman Score=249.
cggccttcctgagagaatattagagtattggaagcgcattataagttcattccagctcacagtgaaattatgatgtgtacgaaatcacattttttgcctttggcttgagtgtagaccttaagcgaggagcaggatcttctttcagacttatggcataatgcgcggtttgtcatatctcttttcaggatacgcctgtgttagtttccagtaacgtcaccatgcagttcggcagtaagccgttgtttgaaaacatttccgtcaaatttggcggcggcaaccgttacggccttgattggcgcgaacggtagtgggaaatccacctttatgaagatcctcggcggcgaccttgagccgacgctgggtaacggttccctcgatcccaacgagcgcattggtaaactgcgtcaaggaccagtttgcctttgaagagttcactgtgctggatacggtgatcatggggcataaagagttgtgggaagtgaagcaggagcgcgaccgcatctatgctttgccggaaatgagtgaagaagacggctataaagtggccgat

SEQ ID NO: 18382 - DNA, 481 bp, Homo sapiens
  SIMILAR (183)..(479): 1001254mologous to Escherichia coli K12 putative secretion pathway protein,accession number AE000379,Smith-Waterman Score=486.
cgatagccagcaccctgaaatcagcgtcactttccgacatcgaaatgcgtggttttacctttgatcaaaaacgccagatacttcacctccagctacgggccgcgaactttgccagtttcgacaaactgcgtagtgtactggcaaccgataatgttgtgcaccaggacgcgttacagaaagaggcggtggtgttcctgtttagcgtcggatattacgtcctcatctggcagccgttgagcgaacggattgagcaacaggagacaatattgcagcagctggtggcgatgaacacccgactgaagaacgccgcgccggatattattgcagcgcgaaaatctgccacaacaacgcctgcgcaggtatcgcgggtcatcagtgacagtgcttccgcgcactcggtggtcatcaggcggatagccgatcgtggggagaatattcaggtctggatagaacctgtggtgtttaatgacctgctgaaatg

SEQ ID NO: 18383 - DNA, 235 bp, Homo sapiens
  SIMILAR (2)..(127): 561254mologous to Escherichia coli hypothetical protein,accession number U73857,Smith-Waterman Score=104.
gccggataaggcgtttacgccgcatccgcaacagtgccaactgcctgatgcgacgcttgcgcgtcttatcaggcctcaaattcccgcaccatccgtaggccggataaggcgtttacgccgcatccgcaacggccggataaggcgtttacgccgcatccgcaatggtgccgactgcctgatgcgacgcttgcgcgtcttatcaggcctcaccgctgtgaagtgctccaccccgtag

SEQ ID NO: 18384 - DNA, 3028 bp, Homo sapiens
  SIMILAR (1925)..(2437): 991254mologous to Escherichia coli DEAD box protein (AA 1- 432),accession number X52647,Smith-Waterman Score=871.
ctcggtaccgaccattatcttctttttcctgccagttttgcgtttctggcggccaggtatccagcaagccaagaaatgccacctgttcgccacgggcacgcagtcgcgccgcaataccctgcgccagcgtaccgccaagggaataccccagcagcgaatgaccgccaagcgcgaagaaatcagcatcggcatcctgcacgtcacaccccagcaacgacgagaatgccgcggcgataatcgtttcactgcccgctttcggcgcacgccctggcgcttgctgggacattgtgtgtcagccgcagtcacaggcgtcctgccagcagtggctggaagcccactggcgtactctgacaccgacgaattttacccagttgcaggaggcacaatgagccagcatttacctttggtcgccgcacagcccggcatctggatggcagaaaaactgtcagaattaccctccgcctggagcgtggcgcattacgttgagttaaccggagaggttgattcgccattactggcccgcgcggtggttgccggactagcgcaagcagatacgctgcggatgcgttttacggaagataacggcgaagtctggcagtgggtcgatgatgcgctgacgttcgaactgccagaaattatcgacctacgaaccaacattgatccgcacggtactgcgcaggcattaatgcaggcggatttgccacaagatctgcgcgtcgatagcggtgaaccactggtctttcatcagaccacgttaggttttattctgtcgcaaagtgaaaaaaatgaacttagcctgaccgcatcctggatgccgctggaatttgaccctaccgataatgacgattatgccatgcaacagcttgataagcgtgatagtacggctatggcgggggttgcctggtatcaccacgagcgttggggaaccgtgaaagcctctgcagctgcggacgttctggataacagcaacggctgggtgggggagctatcggtattccacaaaatgcagataggtcgtctgtcgctgacacctgcgctgggcgttctctattatgacgagaatttcagtgactattactatggcatttcagagagtgagtcccgtcgtagcggtctggcaagttattccgcgcaggatgcctgggtgccctatgtcagcctgacggcaaaatacccgataggagagcacgtcgtattgatggcgagcgcaggatacagcgagctgccggaagagattaccgacagcccgatgattgatcgtaatgagagttttacctttgtcaccgggacccatataggcgcattcttcgagtactacggcgttatgcacggcatcggcggcgtttttaccccatgcgaacgggccgtgagaatgcaccagcaccgccgggatttgtgccggactcctgccacgttcttcgaaggtttcaatgatcacttcgccggtctgatattcatattcgccgttaatctcctctgcggtcatctgtcgcgtgcaggggatggcaccgtaaaaataatcggcgtgggtggtgccccaggcggggagatccagcacggcctgtgcgtgattcgttgcaacagtgcgaccgcaattattatcgtggcaacgccggggcgtttgctggatcacctgcaaaaaggcacggtatcactggatgcgttgaatacgctggtgatggatgaggccgaccgcatgctggatatgggatttagcgatgccattgatgatgtcatccgttttgcgcctgcatctcgacagacgcttctgttttcggcaacctggccggaagccatcgctgcaatcagcggacgagtgcaacgcgatcctttggcgattgaaattgactcaacagatgctttgccacccattgaacaacaattttatgagacatccagcaaaggcaaaattcctctgttgcaacgcaccctggtacgttttgctaacggtagcgcccgtgtactggtcgcgactgatgttgctgcgcgtggtctggatattaaatcgcttgagctggtggtgaactttgagctggcgtgggaccctgaagttcatgtacatcgcatcggtcgtacagctcgtgcaggaaatagcggtctggcgatcagtttctgtgctccggaagaagcacagcgggccaatatcatttctgacatgttgcagataaaacttaactggcaaacgccgccagctaatagttccattgcgacgctggaagcagaaatggcaacgttgtgtatcgatggcgggaaaaaagccaaaatgcgcccgggtgatgtattaggtgcactgacaggagatatcgggcttgatggcgcagatattggcaaaatcgccgtgcatccggcgcatgtctatgtcgcggtccgtcaggctgttgctcataaagcatggaaacagttacagggcgggaagattaaaggaaaaacgtgccggcggtgttacccgttggcggctccgtatgttcggcattgtagccttgttggacgcgcggcgtcgcatcaggcattgtggcatgttgccggattcggcttatacgccttattccgtcgtaccggaggctgtcggctccgttgccggtattctggcggtttacgccttatccggcctacggtggctgcgggtatttgtaggcctgataagacgcgcaagcgtcggatcaggcatcgggcaccgtttccggatgcggcgcgagcgccttatccggcttaccgatcacaatacaatcagttctttttcactaactcagatttcagtttcatcggaccaaaaccgtcgatgttgcaatcgatgttatgtgcgccttgcaaccaggcggatgtttttcactttggtgccaatgtttcagcatcgaagagctacctgttcaccttcagatcgttaatgatggtaacgctgtcgccgtgcagccagcagattgccgttagcatctttaacgatcagctcgtcgctttcctgtgcaggttctgcgtcgttccattgcgtaggcacattcacgggcagatgtacatgccgttatcttcgtag

SEQ ID NO: 18385 - DNA, 5421 bp, Homo sapiens; identical to SEQ ID NO: 9235
  SIMILAR (3880)..(4452): 821254mologous to Escherichia coli Pyruvate-flavodoxin oxidoreductase (EC 1.-.-.-),accession number D90775,Smith-Waterman Score=773.

SEQ ID NO: 18386 - DNA, 891 bp, Homo sapiens
  SIMILAR (137)..(3): 1001254mologous to Escherichia coli phnB protein,accession number J05260,Smith-Waterman Score=231.
atggcatcgctcatcatgatgtcgcttccggcaatgcgcacattggcgtgggcgatggcggtatcgggaaattgcattccggaagggcagttctcggcgctgtcctgcgctgattttggcatttcgccgaagctgattggtatagagcagttccgcgcccaacgtacgttgataataggcaatcgcgtcggaacagttaccggccaacgagagttcgaaatttatacggatgagaggcggcctgataagacgcgcgagcgtcgcatcaggcagtcggcactgttgccggatgcgggcgtaaacgccttatccggcctacggagggtgcgggaatttgtaggcctgataagacgcgcaagcgtcgcatcaggcagtcggtaccattgccggatgcggcgtaaacgccttatccggcctacggagggtgcgggaattcgtaggcctgataagacgcgcaagcgtcgcatcaggcagtcggcaccgatgccggaactacctggtcccccggtgattgaaacttcaactaggaacttcaaagaaaactgggaagaaaacttctgttatctggaattcacaattgccaaattaggaaccaccaggaaaagaatacaggaaaactgcaaagggcagcccctgggtcctgcgggagttcaggtgtctctgagaaacactgggaccgaagcaaagatccagtccacagttacacagcctggcggaaaaccaaaagtagataaaaccacaaagatggggaaaaaacagagcagaaaaactggaaactctaaaaagcagagcacctctcctcctccaaaggaacacagttcctcaccagcaacggaacaaagctggatggaggatgactttgacaagttgagaaaagaaggcttcagatga

SEQ ID NO: 18387 - DNA, 3224 bp, Homo sapiens
  SIMILAR (1730)..(1158): 981254mologous to Escherichia coli transcriptional activator of the formate hydrogenlyase system,accession number U29579,Smith- Waterman Score=1003.
ccccgacaaactcagggattttgtgtataattgcggcctttttcggcaatctgccgttttttggcgcttttgccctgctgacttttgaggaaatccacatgtcattaccacactgcccaaaatgcaactccgaatacacctacgaagataacggcatgtacatctgcccggaatgtgcctacgaatggaacgacgcagaacctgcacaggaaagcgacgagctgatcgttaaagatgctaacggcaatctgctggctgacggcgacagcgttaccatcattaaagatctgaaggtgaaaggtagctcttcgatgctgaaaattggcaccaaagtgaaaaacatccgcctggttgaaggcgaccataacatcgattgcaaaatcgacggttttggtccgatgaaactcaggtgccagcagatgtccggaaataccaatcactttttcagcatcaacgccaccgttcatcactcgcgcccgactgtagcccacttcggctcccagcttttctgccagcatagcgatttcctggttatctggctctccgccctgccccaccaccagcacccgtctggcctcagctaatgggtcgcgggtaacatttttcagatcctctgtgctaaccagccagtccggaagcgcacccgggacaatgttcagttgttgcattccagagggcaacgtggcgtttttcgctgctcccgcctgacgcgccagggaaaggcatagcgggcgtttttctgtttgcagcgtcgccgttagcgcatttccccagtgggatttgcgcacgcttacggttggaatatctaacgaagtcacctggcagatggatgctggttcaggcaagtaggtgctccaaatgcctgcatttctgcctgaaggtggatcatagagggccttgctacaccacaatctcatgggagcatggtatgccacttctgaaattaggttagcaaggactctggcttccaccatgagtgcatgttttccatctgtctgcctttcagtctctctctctctctctttctgtctctctgtatcattctttcctgggaaattcattgcaaaaagatcatcgcctaggcacattgtcatcaggctatttaatgttacgatgaaggaaagaatcttgagagctgtgagacaaaagcacccggtaacccgcatgcggaagttatcgcgttcccggcataacaactcatagtcgacattgttaacgacgcggctctggatttgttcggtgacgacagaaacgatctgcgtaaatgtttgcagacgattgaactctttttcgctccaggggcgatcgtcataacgaataaattcacagccaccaaaaatatgcccttccgccgccagtggcatcaggcaatagtgaccaaattttgggtatagcccacctgcgtccagctgcggccaggtttcacaaaattcttcgtaactgcaatgcagcgtatcagggcgcgacaaaatgctgcgtaccggaccgtgtgccagaacagtttcgtcttcatatttaatgggggtgtctttttcacgcgacgcgtaataagacgcacgttgagtctgcgcttgccacaacacaatagccgcgttgtcggcgagcgcagaacgctttaccagttgcgaaagagcctcacacagcgaggccagatcgggctgctgcaatagtgtccgagtgatgtcgaacaacccttgttgtccgagatcactcatcggtgtatatgacattttgttcttccaggaaagcaccgcaaagcggtgcaaaaggtcattgagcggaagcggttcggcgtgtggtaaatcgagggttcgtttcacgccatacagaccggcaagacgaacacctttacgttccaccacttcaccaatcagcgccgcgtctttccccagtggatgggaatgtaacgctgccagcacttgctctgccgcgttgcgttcaacagctattactagtttgccttcgttggcaaagttcagggcgtccagtcccagcaattcgcaaacgccacgcacggcaggtttaacaggcagtgccgcttctgaaagttcaataccacaaccgcaggctgccgcgaactcatgaaccaccgcgtttacaccaccacgggtggcatcacgcagcgctttcacgccgggaatgtcacgcagcgtctgaataagcggcgtcagcaccgcgcaggttgttccctctttgttgcgcctctcctcttgtggaagtttgttgccccctattactttttttaggacagcgcagtactgagaaggccctcgggtccaacaccgaaaccaccctttttttgcatgaacttccttgggccctggaacaacctcccgagaaaactcggagaccgacacaccaaaatggccctctacctttcttcttcttcttgtcgtgtctcgctctggtcgtctcgtctctctcatgatcggtctgtcatctgtgttgtcttcttggtcctgcaagtccggtttgttgagtttctttttcactgcttcaacaatggcgttggagtaatcctgcgagtaacccaccactttttgctgattgtcgtaataagagaaaggcactgaagattcacggtgaccgacgacaatcacaccgtttttggcgattttgtccagagtactgcccgctgccggggcggcgtcatctgcctgtgccagtcgtatcatttggtccgcccgaaacaggttggccagcgtgaataacatcgccagttggttatcgtttttcagcaaccccttgtatctggctttcacgaagccgaactgtcgcttgatgatgcgaaatgggtgctccaccctggcccggatgctggctttcatgtattcgatgttgatggccgttttgttcttgcgtggatgctgtttcaaggttcttaccttgccggggcgctcggcgatcagccagtccacatccacctcggccagctcctcgcgctgtggcgccccttggtagccggcatcggctgagacaaattgctcctctccatgcagcagattacccagctgattgaggtcatgctcgttggccgcggtggtgaccaggctgtgggtcaggccactcttggcatcgacaccaatgtgggccttcatgccaaagtgccactgattgcctttcttggtctgatgcatctccggatcgcgttgctgctctttgttcttggtcgagctgggtgcctcaatgatggtggcatcgaccaaggtgccttgagtcatcat

SEQ ID NO: 18388 - DNA, 1428 bp, Homo sapiens
atggcgctgaaaaaatatcgccacatggccgacgatacgccgctgctcgccgagttgtcagcgatagccagcaccctgaaatcagcgtcactttccgacatcgaaatgcgtggttttacctttgatcaaaaacgccagatacttcacctccagctacgggccgcgaactttgccagtttcgacaaactgcgtagtgtactggcaaccgattatgttgtgcaacaggacgcgttacagaaagagggtgatgcggtttccggcggccaatggcgtgaacgccagttaagccgtggcgaacactggctggcacaacacctggcggggcgttctccgcgtgaaaagggcatgttactggcagcggtggtgttcctgtttagcgtcggatattacgtcctcatctggcagccgttgagcgaacggattgagcaacaggagacaatattgcagcagctggtggcgatgaacacccgactgaagaacgccgcgccggatattattgcagcgcgaaaatctgccacaacaacgcctgcgcaggtatcgcgggtcatcagtgacagtgcttccgcgcactcggtggtcatcaggcggatagccgatcgtggggagaatattcaggtctggatagaacctgtggtgtttaatgacctgctgaaatggttaaacgcactggatgaaaaatatgcgctgcgggtgacacaaattgatgtcagtgctgctgagaagcctgggatggtgaatgtgcagcggctggagtttggacgggggtgtaccaatgctgcatgcagtgaatgcgtagcatgtctccagcggataaggtcgccggccattaccagccttggggtaaaacggctcgatgacttccaccatgttttgccatgccagatcctgctccatgcgggacaagaaatctccttttctggtctgacggcgcatactgctgaattcactgtcggcgaagcgcttgagtcggatcactactcacactgtgatgtacagatcatctcgcacgtttgttccccgaaccatgtcagacatggtgtcctctatgaacacatgagaaataggtttattctcatacctaaaggcgttagtgctgatccagagttgcgtattaaggtcgtgacagctgtgatcgagcagcacatgtcccttaatcaggctgctgctcactttatgcttgctggtagtggttctgtagccaggtggctgaaggtctatgaagagcgcggagaagctggtttacgcgcgctcaagattggcaccaaaagaaacattgcaatatcagttgatccagaaaaagcggcatcagcattggagctgtcaaaagaccgacgcattgaggatcttgaaaggcaagttcgatttcttgaaacgcggcttatgtatctaaaaaagctgaaagccttagctcatcccacgaaaaagtga

SEQ ID NO: 18389 - DNA, 868 bp, Homo sapiens
  SIMILAR (535)..(128): 1001254mologous to Escherichia coli similar to,accession number D90882,Smith-Waterman Score=703.
aatttgtaggccggataaggcgtttacgccgcatccggcgatattagtttacgccgttaacagattagctatcgtgcgcacaccaagtcccgtagcgcccgcagaccactgttcaaccggcgctttacgtcgccgagcagtcgatatgcagccagccttgctgatagttctcaacaaagtgcgacaggaagcccgccgccgtgctcgcgcctgccggatacgccgcgcttccggtattgttcagttcggcaaagttagacggcagctggctgcggtggaactccgccagcggcagacgccagaacggttcgttctcctgcgcggcactcgccagcaagcgaccggccagcgcatcgtcaaaactgaacagcgcgtgataatcattacccagcgcagttttcgccgccccggtgagggtcgccgcatcaatgatcatttccggtttctgcgcactggcatcaatcagaccatcggcaagcaccagacgcccttcggcatcagtgttcatcacttcaacttttttaccgttgcgatagaacctgcacaggaaagcgacgagctgatcgttaaagatgctaacggcaatctgctggctgacggcgacagcgttaccatcattaaagatctgaaggtgaaaggccggataaggcgtttacgccgcatccggcaacggtgccgactgcctgatgcgacgcttgcgcgtcttatcaggcctacaaattcccgcaacctccttaacagctgctccgcggcgcccgaggcccggaccaccgatcccataaagcgctacaacaggcccacaaacgtggggaacagcggaaccagcgaccgagccacaaagaggatccagccggaacccacagactaa

SEQ ID NO: 18390 - DNA, 1394 bp, Homo sapiens
  SIMILAR (444)..(869): 991254mologous to Escherichia coli nitrate sensor protein,accession number M94724,Smith-Waterman Score=734.
  misc_feature (1)...(1394): n = a,t,c or g
ttacgcgataaatttattcactattttcagcaatggcgtgaacgccattaagccgtggcgaacactggctggcacaacacctggcggggcgttctcgcgtgaaaagggcatgttactggcagcggtggtgttcctgtttagcgtcgatattacgtcctcatctggcagccgttgagcgaacggattgagcaacagagacaatattgcagcagctggtggcgatgaacacccgactgaagaacgcgcgccggatattattgcagcgcgaaaatctgccacaacaacgcctgcgaggtatcgcgggtcatcagtgacagtgcttccgcgcactcggtggtcataggcggatagccgatcgtggggagaatattcaggtctggatagaacctgggtgtttaatgacctgctgaaatggttaaacgcactggatgaaaaatatcgctcacgtctggtatgtgccagaagcagtaaaaactcgctatgcgcatctgaatgccaactggctggagatgaataatcggctcagcaagggcgatttgccgtggtatcaggccaatattaataattatgttaatcagatagacctgttcgtactggctttacagcactacgctgaacgcaaaatgctgctggtggtggcgatttccctggctggcggcatcggtattttcacgctggtcttttttactttgcgccgcatacgccatcaggtggttgccccgctgaatcagctggttaccgccagtcagcgtattgaacacgggcagttcgactcgccgccgctggataccaacctgccgaatgagcttggtctgcttgcaaaaacctttaaccagatgtcgagcgagctgcataaattgtaccgttcggaagataacggcatgtacatctgcccggaagtgcctacgaatggaacgacgcagaacctgcacaggaaagcgacgagctatcgttaaagatgctaacggcaatctgctggctgacggcgacagcgttacatcattaaagatctgaaggtgaaaggtagctcttcgatgcctcgtaggccggataaggcgtttacgccgcatccggcaacagtgccaactgctgatgcgacgctcgcgcgtcttatcaggccgcctctcatctgtataaattcgaactacacttaactggcttctcttaactgaggtcaccatcatgccgtaagtccctacctctcttttgccggtaactgttccgacgcgattgcgttgggcgcggaactgctctataaaatcagcttcggcgaatgccaaaatcagcgcaggacagcgccgagaactgcccttccggaatgaatttcccgataccgccatcgcccacgccaatgtgcgcattgccgngaacgacatcatgatgagcgatgccat

SEQ ID NO: 18391 - DNA, 2382 bp, Homo sapiens; identical to SEQ ID NO: 15106
  SIMILAR (1206)..(595): 991254mologous to Escherichia coli hycD,accession number X17506,Smith-Waterman Score=1021.

SEQ ID NO: 18392 - DNA, 1161 bp, Homo sapiens
  SIMILAR (1)..(300): 1001254mologous to Escherichia coli No definition line found,accession number U00006,Smith-Waterman Score=515.
atgaatggcactatttatcagcggatagaagacaatgcgcatttcagggagttagtcgaaaaacggcaacggtttgccaccatcctgtcgattattatgctggcagtttatatcggctttattttactgatcgccttcgcgcccggctggctgggcacgccgctgaatccgaacaccagcgtcacacgcggtattccaattggtgttggagtgattgtgatctcctttgttctcaccggtatctacatctggcgggcgaacggcgaattcgaccgtcttaataatgaagtcctgcatgagcggggccgtagagcgccagccaacgaactggcaggcgattcttatgttcctgattttcgtcgtgtttacgctcggcattacctactgggcatcaaacgcgtacgttctcgccggataaggcgtttaccccgcatccggcaacggtgccgactgcctgatgcgacgcttgcgcgtcttatcaggcctacaaattcccgcaccctccgtaggccggataagggcgtttacgccgcatccggcaacagtgccaactgcctgatgcgacgcttgcgcgtcttatcaggcctacaaattcccgcaccatccgtaggccggataaggcgtttacgccgcatccggcaacggtgccgactgcctgatgcgacgcttgcgcgtcttatcaggcctacaaattcccgcaccctccgccggataaggcgtttacgccgcatccggcaatggtgccgactgcctgatgcgacgcttgcgcgtcttatcaggcctacaaattcccgcaccctccgtaggccggataaggcgtttacgccgcatccggcaacagtgccgactgcctgatgcgacgcttgcgcgtcttatcaggccacaaattcccgcaccatccttcaatgccaaatgtttccgcgaacggttaccgttcgttcccgtttatggcatcgtatatgaccccgttctttggctatctcaccgcctggtcttactgtttatgtggatgccgttggggatctctgaaatcaccgccattggcgttatgtccagttctggttcccggagatggcgcagtggatacccgcattgatgcagtggcgctggtggcgttggcgaatctggcggcggtgcggttgtacgcgaaatcgagttctg

SEQ ID NO: 18393 - DNA, 536 bp, Homo sapiens
  SIMILAR (255)..(272): 831254mologous to Acidiphilium acidophilum beta subunit of light-harvesting 1 complex,accession number AB013379,Smith-Waterman Score=46.
cggtccggaattcccgggcaaggacaagaagaacagatcagataggagcacaccagccgggcatgagcctctccagctctaaggtgatgaatgaccaaggcccagtgtggaaacccttgaaactgcagcaagctggtggccccgccaatacagtgctgcagctgcctggtcagggatgccgaccgtggagggaaaggattccctctgaggcagcagctccaacacatggggccaagctcaggaccaccagggcatggaactggagaccatggtttttaatgttagaacagaaaacgccatacttttcctatatcaatgatcaaaagtgcaaacaatttaaatttccatcagggaacatcaaatgttgcccaacccttttcattcctatccatggctccgtaaggggcttgaggcttaatgcccatcctgtggccaagctgagcttccactccgggaccaaaaaaaaaaaaaaagtctgctttgtgacatcatcgttatgagcggaaagtacctagatgacaatgtttccattctga

SEQ ID NO: 18394 - DNA, 1110 bp, Homo sapiens
  SIMILAR (343)..(1074): 441254mologous to Mus musculus cyclin I,accession number AF005886,Smith-Waterman Score=506.
atggcctcgggcgctcagctcccgccgcagccgtcgagctcagaggtcagcgccgtccagagcccaggcgggcgtcccggcgccggtctggaggaaacagccctgggcgttcctctcccgccgtctccgggggaggcccctctgccccgaagcaaccggagcaggtgccctgggacccgccagcccggagcggcctccctccacgcggcgtccgcagcagtccccgtgcggccccggcgcggtacggcgccagccgggaaaaccgcagacgcggtccccgccgccgccccagagcaagctccgcggccggctccacagtcccgcaagccgcgcaacctggaaggcgacctggacgagcgccggctgctctgccacttgcagctggcccaggaccgcgaggcgcgcctgtggcggggcggcaaaccccaggatgaaatctgcgacgccttcgaggaagtcgtgctgtggctcctgcggcttcagaacaccttttacttctcccagtccacttttaacctggccctcaccatctttggccgcctcctgatttcagtgaaggtaaaagagaaatacctgcattgcgccacaattacttccttgaggctcgctgcaaaagttaatgaagaagaggagtttattccacaagtaaaagacttcacaaagcactatggctctgactattccccgaatgagctgctgaggatggagctggctattctggacagactgcactgggacctctatattgggacgccgctggacttcttgactatattccatgccctggtggtcctgagctggccccatgtgttggagctgctgcctcagaggaatccttccctccacgtcgcatccctgaccaggcagctgcagcactgtatggcgggccaccagctgctgcagttcaagggctccacactggccttggtcatcatcaccttagagctggagaggctcatgcccggctggtgtgctcctatatctgatctgctaaagaaagcacaggttggtgatatgcagtacagctgctgcaaggaacttgtaatgcagcaactgagaagtcttcagtcatcctcctgcacagacaactttgtgtcacctgccaactag

SEQ ID NO: 18395 - DNA, 156 bp, Homo sapiens; identical to SEQ ID NO: 1295
  SIMILAR (1)..(105): 911254mologous to Homo sapiens Human secreted protein encoded by gene 14 clone HSNBL85,accession number W75070,Smith-Waterman Score=161.

SEQ ID NO: 18396 - DNA, 510 bp, Homo sapiens
  SIMILAR (226)..(510): 981254mologous to Homo sapiens 8D6 antigen,accession number AL365455,Smith-Waterman Score=457.
ctagaattcagcggccgctgaattctagcagggataagagagcggtctggacagcgcgtggccggcgccgctgtggggacagcatgagcggcggttggatggcgcaggtttgatgcgtggcgtacaggggctctgggcctggcgctgctgctgctgctcggcctcggactaggcctggaggccgccgcgagcccgctttccaccccgacctctgcccaggccgcaggaaccaatgagatcctccctgaaggggatgccacaaccatggggccccctgtgaccctggagagtgtcacctctctcaggaatgccacaaccatggggccccctgtgaccctggagagtgtcccctctgtcgggaatgccacatcctcctctgccagagaccagtctggaagcccaactgcctatggggttattgcagctgctgcggtgctcagtgcaagcctggtcaccgccaccctcctccttttgtcctggctccgagcccaggagcgcctccgcccactg

SEQ ID NO: 18397 - DNA, 1015 bp, Homo sapiens
  SIMILAR (381)..(515): 951254mologous to Homo sapiens 8D6 antigen,accession number AL365455,Smith-Waterman Score=254.
atgagcggcggttggaggcgcaggttggagcgtggcgaacaggggctctgggcctggcgctgctgtgctgctcggcctcggactaggcctggaggccgccgcgagcccgctttcaccccgacctctgcccaggccgcagagaacgcgaggtctctcccccccatgctactgcaggctctcgcagaactggggtcacaagttgaatatacccccgtggacgtgttcgccctggccaagaggggctcagtaacaagcagccgccagtgtggttcctatatcccgggacttcgcctgtctcctgcggatcacagccagtgactactgtgctcttggagaaaggtccagcctccagcttcccaggcttcatttgcatccatctcgcaggccccagctcaggctcgtgcccacccaccaagttccagtgccgcaccagtggcttatgcgtgcccctcacctggcgctgcgacagggacttggactgcagcgatggcagcgatgaggaggagtgcacggtgctcagtgcaagcctggtcaccgccaccctcctccttttgtcctggctccgagcccaggagcgcctccgcccactggggttactggtggccatgaaggagtccctgctgctgtcagaacagaagaattcgctgccctgaggacaagcacttgccaccaccgtcactcagccctgggcgtagccggacaggaggagagcagtgatgcggagggtccccgcgtccccgagaaggctgtggccaagggatcgagcccagccgtcccgcccgggtgccgagctccggcctcgaacccgggtccggcccgcggactggcgtcctccggccttacctgcaggcccgtgcatacctgatccgcggccgggccgggcggccgcacaggcccctcggttcgcctcggcccgggtcccgcccggcccggcccgtcggcgccactagctccgctccggccggcacctggtccgggcaccgcccgccgagccgacagcgccgcggaccaatag

SEQ ID NO: 18398 - DNA, 858 bp, Homo sapiens
  SIMILAR (286)..(753): 911254mologous to Escherichia coli N-acetylglutamate synthetase,accession number AF008117,Smith-Waterman Score=727.
tcacagggtgcaagggcaatttgtcacagacagaactgtcagttgagggtgatctgtcacactgaacacgggcgaatgtgtgccgaccaccgtctctagacacgcagcatggactatagggcctacaaggcgcgcgaatggggaagagctcctaactatatggctgatgatcttgtagagagtatctccgtggatgcgctcggggaccccgtgggatgttgcttcaggcagcgtgtgtaagcggaatatatcagtgctgttctctggtgcttcctcgctcacggcgagggcttcgctgatcgcgctactgcggcgagacggggaaaaacgtttgtcatcatgctcggcggtgaagccattgagcatgagaatttctccagtatcgttaatgatatcgggttgttgcacagcctcggcatccgtctggtggtggtctatggcgcacgtccgcagatcgacgcaaatctggctgcgcatcaccacgaaccgctgtatcacaagaatatacgtgtgaccgacgccaaaacactggaactggtgaagcaggctgcgggaacattgcaactggatattactgctcgcctgtcgatgagtctcaataacacgccgctgcagggcgcgcatatcaacgtcgtcagtggcaattttattattgcccagccgctgggcgtcgatgacggcgtggattactgccatagcgggcgtatccggcggattgatgaagacgcgatccatcgtcaacgggcgcagggtgtacagtgtgcccagcagtgacagcggaccggcgctgtgctcgatatacacaccagccgtagctgccttcccgcggggcagggatcgggagcagcagcccaccat

SEQ ID NO: 18399 - DNA, 2247 bp, Homo sapiens
  SIMILAR (1700)..(1879): 771254mologous to Escherichia coli K12 putative structural protein,accession number AE000180,Smith-Waterman Score=265.
tcagggagtctgcgagcaagacaccctggtcaccaggatgcctcgacggtgagctgctccaccagctcgtccgtcggggtctgcaggcgcaggcctagcacatgtccggttgtggatgggtgggcctaccgggccagtcgcccatggcgacggcgccgcggcctgaggggctggtaggtacgaggggctgggatgcgaaggtgctagtcggctgtggtacgccgtttgtccttcgcgctcatttggtgcgtattttgttgcgtcgtgtcttgtgctcaggtgtgtcgtatcttctttgtggtcagtgtcgtctttctcgcggatgtcggttttggtggtaggctgtgttgggcacgacggctggacttgtgccactggcagatgagtgacagctgatggagggtgggatgcctgttgagagtcagacataaacaatgcatgggcaagctttgcatgctggcaggtgggtgttgtgtgttggtgggtggtggttggaggtgaccgtttttccacgccgaagtgccggttgttttcctggggggttggatctcctattggaaccccacggggataacggccccacaaatagtggcctccggccatcccctctttcctttgtttcccgcccgcgggttgttccgggttggaacttgtaccggcgttggagaaaaccgcttcgtgggacaaccaatggccaaggtttccccacgggaaggaccgggttccaaccaaggctttggttccgtgtaaaaatccgggaattgccccggggggaagcataggaccaatagcccccagttccaagggggccgccgttcctagaccggggttgttttcggccggggctgttccgggggccttgggcctttcaaacttaatgccgggccaatccaagtagccaagaatttggtaacttgaaggagctgccaaccaataatgccggtcgttgataatacccggcaacaagaatgccgttaacgggtagaaataatacccgccatccaaggcgcccatttcgcccaattccagactggcgccaacctgtttggtaagggccgaatccggtccaacgagagactgccctgcaccgatactgcccccagcagacccgccggatgacacgtagacgcaatgacgacgaatcccgccggcggttgcacgacctcgcgcgtacacgcacccagcaactcccacacacggcaacgaaccctgagagaaccaatcggtgttgccccgtggatgaataggtgtctcatcatgggggcatcttggggggttacgtaagaagttaatcacatcggtgtgaagtgtggcgttgctgctccgacctgccagcagttccagcacttcatccacgctggtggtgtgtgccagacgctcgatgacggactcatcatccagtgcattggtcaggcgtctttgcgtgtggaatcgttgtgtggactgccaggcgtcatggaattgagtgtctttagcgtagaaggtcgcccgtgccagtgttccaactgtggtggccacatgctgttgtcgggcctttgtgcggcaacatattgttgtgtggccttggccgaagcgtattggtgtgtgtcctagttgtgcaaccttgcgccgacgtgtggattggcaccacaccctggaacacggatgaacatgatatagagtggtacagtgcgcgggatgcactgctgaagactgccatattcgccgttcagaaggcggcattgcctggggcgatatgcgcaactgcctcaaccagctgataacggaaccgagcgtcgcctccgcgatgtttgaataccgttttggtggcaatggcgaacttagcgtgcggcctctggaagccatcaatttaattcgtaatctgctgaaagtggatagtttacctcgtattttgttagatggttgttgatgtccaaagtaaggcatttgttctggtgggttcttaatatgtctggtgagttccggctcatgtttggagacacctagccttgatctatccggataagcatccactagcaatcgcggctcacggacaacaggtgatttcaaaatacttcgatgacggacaccggtgccagcccggcagcaggagatatccttacactggtaacaacgggagccggtatatagcctatttacgttggcaatgccggaggagttgttagatggacgaggtagtagttgtgaggattgttctttcaggtcgaatccatacatgaggtcccgcgtgtccaactccggagtcat

SEQ ID NO: 18400 - DNA, 413 bp, Homo sapiens
  SIMILAR (52)..(228): 381254mologous to Felis catus tumour necrosis factor receptor p80,accession number U51429,Smith-Waterman Score=72.
cccagcagtgtccgggctctcccggcaggtgagagaaaggtggtcctgagagccagtgggaggatccctcctgggatgaccggtaccaaacctcgagcaccagggtgcgatgcttcggctggggaagtctggcagtcttcaaggttatgggacctggcgagtgggagcgactcaggacgacccagcgtttgtcccccgggatgcctacggggcagtaggcgcggggctgcgcgtgccgtaaccttggcgtcttccgagcacagcccctggaagctgctagcctgaggggcgcaggagagggggtctgcccttcgctgaattccggggaaggggcatggactagcccccaaatcagcttcctttgccattgtggtaaaacctgtcagagatcacttactagtaatgctaaggag

SEQ ID NO: 18401 - DNA, 588 bp, Homo sapiens
  SIMILAR (106)..(345): 1001254mologous to Homo sapiens ATP synthase, oligomycin sensitivity conferring protein,accession number X83218,Smith- Waterman Score=390.
atgcttcggctggggaagtctggcagtcttcaaggttatgggacctggcgagtgggagcgactcaggacgacccagcgtttgtcccccgggatgcctacggggcacctcctgttcaggtatacggtattgaaggtcgctatgccacagctctttattctgctgcatcaaaacagaataagctggagcaagtagaaaaggagttgttgagagtagcacaaatcctgaaggaacccaaagtggctgcttctgttttgaatccctatgtgaagcgttccattaaagtgaaaagcctaaatgacatcacagcaaaagagaggttctctcccctcactaccaatctgatcatgaggcctgctctgcagaaggtggcgtcatacacacaatcacagctcctacagacatgtgactgccaatggacaaaccgtctttgcgggagcctcatgctgctgatgctgcccagatccttcagagtcaaactcagcaagcttcctgttgatcaagcacatacaatcttggggaatgatgaggcccttcatatgtcgccttacgaggtcaccagagagaacctagagatctatgtacaatga

SEQ ID NO: 18402 - DNA, 803 bp, Homo sapiens
  SIMILAR (21)..(350): 401254mologous to Homo sapiens ATP synthase, oligomycin sensitivity conferring protein,accession number X83218,Smith- Waterman Score=131.
ctacagccgcccgggagaagatgggctgccccagcagtcgtccgggctctcccggcaggtgccgatgcttcagtacctctgtggtcagaccatttgcccaagcttgtggggccctcttgttcaggtatccgttattgaaggtcgctatgccacagctcttttattatgctgcatcaagacagaataagctggagcaagtagaaaaggggtttgttgagagtagcacaaatcctcgaaggaaccccaaagtgggctgcttctgttttggaatcccctatgttgaaggcgttcccattaaaagtgaaaaagcctaaaatgaccatcacagcaaaagtaggaggttctctccccctcacttaccaaaccttgatcaattttgctttgcttgaaaatgggtccgattaaggcaattacccaagggagtcgttttctggcctttttcttaccatggatggagtgttccattcgcgggagagggtaccttggcacagtggacctctggcatcttcctttaggaaggaaggccacaattctctgaatttaaaaactgttcctcaaggggtttcctaaggtcaagggccaagtttttgaaattgggggctaaggactgatccgtcaatctttgggtggaatgattgtgcgcattggcgaagaaatatgttgacatgtctgtcaagaccaaagattcagaagctggggcagggctatgcgggagattgtctaaaagtgttggttttctgccatcaagtgaaaattcttaaacttggagcaacaataaaaagcttccagaacagaaaaaaaaa

SEQ ID NO: 18403 - DNA, 1092 bp, Homo sapiens
  SIMILAR (517)..(894): 921254mologous to Homo sapiens low density lipoprotein receptor related protein-deleted in tumor,accession number AF176832,Smith-Waterman Score=646.
  misc_feature (1)...(1092): n = a,t,c or g
tcccgggtcgacgatttcgtgagaaggctgactggctggactcattgagctgaagaatttccagtgacatttgtaaatgacgccgctcgattccgggctccaagcggcccctgccgccgccgccgccgccgggccgaaggtgccgccgagcagtctccagcgcaggcttccttaccgggcgaccacaatgtccgagtctctcctcgccttactcactctctcgggattattgccgattgccagggtgctgaccgtgggagccgaccgagatcagcagttgtgtgttcccgggtcgacgatttcgtcgcgcatccctccaccttccacatcctgctccaggcaggagaaggctgactggctggactcattgagctgaagaatttccagtgacatttgtaaatgacgccgctcgattccaggctccaagcggccccctgctgccgccgccgcccgccgccggggcgaaaggtcccgccgagcagtctccagcgcagatttctttaccgggcgaccacaatgtccgagtttctcctcgcattactcactctctcgggattattgccgattgccagggtgctgaccgtgggagccgaccgagatcagcagttgtgtgatcctggtgaatttctttgccacgatcacgtgacttgtgtctcccagagctggctgtgtgatggggaccctgactgccctgatgattcagacgagtctttagatacctgtcccgaggaggtagaaatcaagtgccccttgaatcacattgcttgccttggcaccaacaaatgtgttcatttatcccagctgtgcaatggtgtcttggactgcccagatgggtatgacgaaggagtacattgtcagggtgagtccatttgtggaacaatgcatctgaaatattaaattttacatagtaatgaaagttcaaagaaaacctataacctgccttttctttcaactacaagcatatcagttattaagaaagcatgaattttactgccagacattttaatatgcatttcaaagctgcaagtattatgtttgagcaaaaaaacaccattagacagnnnnnnnnnnnnnnnnnnnnnnnggggtatt

SEQ ID NO: 18404 - DNA, 1026 bp, Homo sapiens
  SIMILAR (310)..(906): 981254mologous to Escherichia coli membrane protein,accession number Y07802,Smith-Waterman Score=951.
  misc_feature (1)...(1026): n = a,t,c or g
atgatcaccctggaaaaaatcgtgcgtggaaaacgtactgcagtcagtgagccattgttccccaactacctgtttgtggaatttgacccagaagtgattcataccacgactatcaacgcgacccgcggtgtcagccacttcgtgcgctttggcgcgtcgccagcgatagtcccatcggcggttattcatcagctatcggtatataaaccgaaagacattgtcgatccggcaaccccttatccgggtgataaggtgattattaccgaaggcgcgttcgaaggctttcaggccattttcaccgaacccgatgcatttattgcttttgtttttgtcttgttatgccagaacacggcgtttgcgcgggcgtcatcgaatggtgatctgccgacaaaagcggacctgcaggcgcaacttgactcactaaataaacaaaaagatctttctgctcaggacaaactggtgcagcaggatctgacagatacattagccaccctcgataaaatcgatcgcataaaagaagagacagttcagctacggcaaaaagtcgctgaagcgccggaaaaaatgcgccaggcgaccgcggcgttaacagcacttagcgatgtcgataacgacgaagaaacgcgcaaaattctgagcacgctgtcgttgcgccactnggaaactcgcgttgcccaggcgctggacgatttgcaaaacgcacaaaacgatctggcgtcttataacagccagctggtttcgttacagacgcagcccgaacgcgtgcaaaatgcgatgtataacgcttcgcagcagctgcaacaaattcgcagtcgtctggatgggactgatgtcggcgagacagccttacgtcccagccagaaagtgttaatgcaggcccagcaggcgttgctgaatgcggagattcgtaaaacaccgcttcgccgctcattcgcgcactggcggttctacggcatctgcgccgtacatgcgaacaaacgcattcagatattgcagcggctggcgatcttcttcctgtgccagtaa

SEQ ID NO: 18405 - DNA, 427 bp, Homo sapiens
ccgggagcgcgaccctcccccgtcccggcctggcccggcctggccagtcccggcggtctctgcccgggctgacgcccaggaatgtggtcgacgagaagccccaacagcacggcgtggcctctcagcctcgagcctgatccggggatggcctctgcctgcaccacaatgcatactaccaccattgcagagcctgatccagggatgtctggatggccggatggcagaatggagacctccagccccaccataatggacattgtcgtcatttgatgtgcgattgctgctgaggccatcgtcctagtctctcttctcttcgtcatgctgcgctacatgtaccggcacatgggcacgtaccacaccaatgaggccaagggcactggagttgctgatagtgcagatgcatgccctgccggagaccctgcctgat

SEQ ID NO: 18406 - DNA, 1202 bp, Homo sapiens
  SIMILAR (150)..(548): 501254mologous to Homo sapiens sialoglycoprotein beta (AA 1- 128),accession number X12496,Smith-Waterman Score=227.
ggaaggacttccgcgcgttaggagtgtgacccaggtgccgcttcctctcgccgccgagggtcaggagcccgggagcgcgaccctcccccggcccggcctggcccggcctggccagtccccgcggtctctgcccgggctgacgcccaggaatgtggtcgacgagaagccccaacagcacggcgtggcctctcagcctcgagcctgatccggggatggcctctgcctccaccacaatgcatactaccaccaattgcaagagcctgatccaggggtttcctggattgccggaatggcagaatggaaacccccaccccccacccataattgacaatggtcgtcattgcaggtgttgattgcttgcttgtggccattcgtccttagtcttccctcctctttcgtcatggttgcgttaacattgttaaccgggcacaaaggggcacgtaccacaccaaatgaggccaaagggcacggagtttgctgagagtcgcagatgcagccctgcagggacgaccctgccctcctaagatgctggtgatagcagcagaaaaggagtactttatttgagggacaacagacttaactttccttgaatgccttcccccatctcccatcaggaaaaatacaaccccaatcgccccagcaacccctgctggataccacccagacagagagagagagtacacttgatttcttcccgagatagcccaccctggaaacactaaggtgccctgccccccagggaggaaacggaaggaaggaactccgcgcctacaaagaggcccacttcccccagggaccccccagggaagccgaatggcccaccccccagagggccacccttttgcctcccacgggaaggtgggagaaaaatctgggcacaatggggccccctagggcagtgcaggacaacatcagctcactggcaggacaacatcagctcactggcacagttcactgcagggaaagccctgttgaggggtgagggggtgcctggggtaacccgggggcctggggaagcaaggaaataagtcatctgtatgctgaactggggataatggcatcaaatgtcagtccttgacatttggggggaacagtcaggtgccagagctaaaaggtacctttgtctgaccattgatccagctcagaacgaattggaaataaatttgaaatgtaaccgagcaaaaaaaaaaaaaaaaaaaaga

SEQ ID NO: 18407 - DNA, 1572 bp, Homo sapiens; identical to SEQ ID NO: 3344
  SIMILAR (310)..(705): 281254mologous to Gorilla gorilla atrophin-1,accession number AJ133271,Smith-Waterman Score=80.

SEQ ID NO: 18408 - DNA, 717 bp, Homo sapiens
  SIMILAR (636)..(595): 571254mologous to Homo sapiens retinoic acid receptor alpha 2 isoform,accession number AF283809,Smith-Waterman Score=44.
atggtgaaaggtgaaggtgaaaagcccgtggtgaaaggtgaaggtgaaaagcccgtctcacatggcagcagacaagagaagagagtttgtgcagggaaactcccccttataaaaccatcagatctcgtgagacttattcactaccacgagaacagcatggaaaagacctgcccccatgattcaattacctcccaccaagtccctcccacaacacgatctgccctgggtgacaagaccaagggaggttcacacaacactctttatctccgctgcaaacgtttttctgcatttattcttaattgtgagcctccctctaaactgttaaaagccaggccacaggtgtcggagctgagctggaatcctgactttgttgcctcctggcggcgaggcccagcatttcaaagtaaaacatccaagtattcctttactgaggggggagaagtaggaatcaagcccaagaaaacatctccaggcactgaactgctaatgcagccttgcaccagcccagccctaggacttgtcagccggcaccccgaaaatccaacaggcctcaggctgcttaagcccattaatgaagcacagtacactagggtatctgctttggttgcaaaaagcaatctggctaaagggatttgggacatccggctggtgaatgtaggggaggtttcacctttagatgaggcaccagaaacgatgtgctccctggtagcatcctga

SEQ ID NO: 18409 - DNA, 323 bp, Homo sapiens; identical to SEQ ID NO: 3342
  SIMILAR (163)..(306): 391254mologous to Escherichia coli narX,accession number X15996,Smith-Waterman Score=67.

SEQ ID NO: 18410 - DNA, 2909 bp, Homo sapiens
  SIMILAR (544)..(939): 281254mologous to Gorilla gorilla atrophin-1,accession number AJ133271,Smith-Waterman Score=80.
atggtgaaaggtgaaggtgaaaagcccgtggtgaaaggtgaaggtgaaaagcccgtctcacatggcagcagacaagagaagagagtttgtgcagggaaactcccccttataaaaccatcagatctcatgagacttattcactaccacgagaacagcatggaaaagacctgcccccatgattcaattacctcccaccaagtccctcccacaacacataacagctttctagctttcaccagaccctggattcccagtaataatgcatccttcagaccctttaagcctctggactgtcttcaaataaaatactggaaattgcagaggtctgactccctctcatcccagcccaccctcctccaggccacctggaaggagggagtcggtgaaccatctcttttcctgctgctctctttagcaggccttcgaacttcactgcccttgcagacccaagttttccacattaccaagcccagcctggccacccaggcacacagatttgagaaaaagaggccgaaggaccgcacaataatatgccggcaacgagagccatcccccatccctgccccgatacctgcgccgctcccggcactgcggatgcaggccccctcctctacctgttcctactcccacacaagcctgcaatgctccccagcgccgcagaaccacctcaacatccttagcctgccttggaagagctggcctgtggctcccgtcagtctcctctccatatctcgtcctaagctcttgccaggagcagccacatcactgctgtcctccctccacaccccggccctcctggtcccctcttccggggatgccatctgctactcacccggtcaggtccccgctcaaggggacctctcccaggaagactcctcagactcgcctccagctgagcaggttctccctccttcctcaggttcacacaacactctttatctcggctgcaaacgtttttctgcatttattcttaattgtgagcctccctctaaactgttaaaagccaggccacaggtgtcggagctgagctggaatcctgactttgttgcctcctggcggcgaggcccagagatggtccctgctccactggaaggcaatcagccagcaagacgccacctccacccagtcatcctcacacggggcactcactgtggtcagaagagaaatgaaaggacagtgactcgaggccaaaccaaagtgcttttccaggatgcagtgttgatttgcaattttcccacaagcttaggccatacctcattcatccccagagtctctggggacagtcggaaacaggccttcccaggagggccacgagcttccgccagccccgttctccaggatggggccagaacagcacctgcccgtggtggtgctgcctttcactggggcctttgctgtggtcctgccttgccccttcctagtatcatcgtctgcctggcatttcaaagtaaaacatccaagtattcctttactgaggggggagaagtaggaatcaagcccaagaaaacatctccaggcactgaactgctaatgcagccttgcaccagcccagccctaggacttgtcagccggcaccccgaaaatccaacaggcctcaggctgcttaagcccattaatgaagcacagtacactaggcccctcacaacaccactcacaatgtgtctgctcatgcaggctgctctgcggacactccttggagaggctgggcctgccaaattcagtgaccatcccagggaatgttggctgtccctccccacaggaattcacccagtggcctcctgtccttgtgctcatggtaaatccaagccccggttcagcagcaggggacttcccttggcttctccaacaaagtccttcgcagttaggccccttctcagacaatcttggaagatggagaagcaagaaaagaatggagagggagaatggaagaggtggactcagaaatgccgcatttgtgggtggagctggggctgggctttggttaacaaaaagcaaatctggctaaagggatttgggacatccggctggtgaaatgtaggggaggttttacctttagatgaggcaccagaaacgatgtgctccctggtagcatcctgagctgcccctcttgactttaatgctaaccctgctgcttttcctcaaggctcagacatcccatttcgatgcttccagaagcacagcctgcacccagggacaggagctgccgccctcccactggagagactctcagaatggacacaattgattcccaagtacccttagagcttcctggaagagggttcccttcccgtcccccagaccagcgatgctccttggagccagggtggccccaaaaggatggcatttggagaaaaattgggccccattcacggcccatcagctccaggtcagagaagccactgggtttacactgcgtggggacaggagggttcttgatactggtccacatttagtgttcggtgtggaaagcggaataagtcctcagcttccatgggataacgggaaataatctaggtaaatctaagctcaataactcaaccttttcaactatttactttcaatatttttccattcatgttaagcataaagttgaaatgtgagcacatagcaaaacctgagtctgcatccctctatttacccagtggtgtgaccttgaggaggtcgagctctataagcctcggcgtcttcagctgtgaaacgcaaattgtggcagatctccctgggatggtgttgcctaagggaaatccctcctggcttgggctcggggatgcagatgcctagtggcaggcacgcatcctcgcttcctccccacaacctctctccagccccacaaccaactgtccctacctccagccactaggagggacactctccatgataccccgaggtcaacttcctatgtatcctcc

SEQ ID NO: 18411 - DNA, 2299 bp, Homo sapiens
  SIMILAR (334)..(492): 791254mologous to Homo sapiens Human secreted protein, SEQ ID NO: 5733,accession number G01652,Smith-Waterman Score=198.
ataggccttcgcctccgcgctgcaggaattcggcacgagggattctgtgtgctgtcggacccagagggtgacggcgccgctaggatgaagctcgtgagatttatttctgtatctcagttggcagcattgtcatccttattctcactgtcaccctaaccaaaaacctgggagatttttgatgaaattgagttcatgaaactgtaaccattgaattgaagaacggaaccaccaggtcccatggaaccaatccaccaggtgtgggatgtccagcatgaatacacatccttaaagctgtgaaaatgaccctgaagaacagagaacctgtacagctgggaaacgctgagtattcgaggaaataacattcggtgattttattctaccagaccagtttaccctctggatacactacttgtggatgttgaccctaaggtgaaatctaagaaaagggaagctgttgcaggaagaggcagaagaagaggaagaggaagagggacgtggcccgtggcagatgaagaggggggtcctaggcgataatgtctctcaagatttcaaagtcatatgagatttgggatattttttgtacacggttgtgtttgtttatgtcagtttttaataaacataaatgtgggacagagctgtctatttagtatatcaaagttttagtagtttcctccacattcacgaaattaccacagtgagagctaagcatttctactgggcagtttcattttttagttgatcaggttttaagtttttgaactaaaatttttctttttctttttatgatgaataaggttaaaataaaagccttagacaaattaaatttggcagagtttaattgagcaaaggacaattcacaaatcaggtagcccctgaaccataataggctcagaggcttcagcccagctgcatagttgaagatttatggacagaaggaaagtgatgtatggaaaatggaagtgagatacagcaacagccggattagttacagttcagcgtttgccttatttgaatatggtttgaacagttcgctgtctttggttggctgaaacttagtgattgcccacaagagtaggggtaccgtttgtttacacgtcagtttaggctacagttctatgtactgagaaaccttaaagctgaacttgagatatgtaaagagactttaggctaaacttaaccaatatatatacgatatatacccttctaattcaaaaggcacggattagccatttatggccttaactctaaattctgtggcaacctaacccacagggggaagtaagaagtttgttttggtatttcggaaactaaacgtccttatgggatggggtctagaatctgatcctcctttccctgagctctactccacggagtccttaggtacccggtaaaaagttgtcttcctaaattaagggtcattgcctttgttgtcctagctgcctaatgtcttacttttgtttctttcgcatttttaatcagtccttaataggatatagtttctatcttctccaagttataacttggagttaatgggcactagattatcagtctatgagcagtgttaaaatctcctcttaatgtgtaatgtacctgtcagtgcctcctttattaaggggttctttgagaataaaagagaaaagacctactttatttgacagcaaaactgttctaattgttaataaggacttttaaaaattgtttttgatttgctaagctcagaaaaaatgtctctcagtgcatcagttctttgtaaagcttactacgaagtatttatatgctaaggaaaacaactgaggatgtgggtggcttaaatctgtattttcatcatgtatgtgagttttttttttttttaagtaaagaaattttctgcaaagatcgttaccttaaaaaagtttagcctgggcgtgagccaccgcgtccggccgaacattagtttttaaagaaatgtattatgaatatagatagaaaacccaaagtgaaggaatagaaaatgaaatatcagtttcttttaatctatcataattatgtgagcataahyttagtattttgaaatagattaatgtagtcagcaaacaattcatgtattacctataatagatatcatacatataacatttaataacatacagttcttgttcctgaagacttaacctagacacctcactccataacaagaagaatctctgtcatcatacacccaacagacagacattctctaaaggcattaaacgtatatctgatactggcctttattaatgtgaaattcttgtggatctgtgaaatccagaggagtactttc

SEQ ID NO: 18412 - DNA, 547 bp, Homo sapiens
  SIMILAR (1)..(264): 971254mologous to Homo sapiens Similar to heterogeneous nuclear ribonucleoprotein A/B,accession number BC002625,Smith- Waterman Score=441.
aaaatcttcgttgggggtctgaatcctgaagccactgaggaaaagatcagggagtactttggcgagtttggggagattgaggccattgaattgccaatggatccaaagttgaacaaaagacgaggttttgtgtttatcacctttaaagaagaagaacccgtgaagaaggttctggagaaaaagttccatactgtcagtggaagcaagtgtgagatcaaggtggcccagcccaaagaagtctatcagcagcaggtgagaggctctgcttcctgctgccgctctgcagcctggacctgtggaccctggttgtaaagagtaaattgtatcttaggaaaccagtgtcacctttttttcaccttttaattttatattatttgcgtcatacatttcctgtaacggaagtgttaattttactgtactttttggtaccttttgggaatctaatgtattgtaaggtattttacacgtgtcctgattttgccacaacctggatattgaagctatccaagcttttgaaataaaatttaaaaacccccaacatataaaa

SEQ ID NO: 18413 - DNA, 514 bp, Homo sapiens
  SIMILAR (56)..(217): 981254mologous to Homo sapiens A human beta-alanine-pyruvate aminotransferase (HAPA),accession number B08069,Smith-Waterman Score=288.
gtggtggaattcggctgagtggagccaggcgtgtgacggaggcggccctcttccagttgggcactgccaccctctcgtggtccaagcagcacatgagcagaacgaggtgctcaacaccaacagccggtacctgcatgacaacatcgtggactatgcgcagaggctgtcagagaccctgccggagcagctctgtgtgttctatttcctgaattctgggtaagtggactgtggccagcccccgggaagagggtgagacggtaacaaagacagtcactcacatgggcccagtgtagtgtagctgaccgagtgtggactcggagaggcagcccccactgcaccaggctcctgagattcccggctgtaggccctgatgctttctctgttggatccagtttccttgtctcttattgaaggatgttattacctcctttctaggatcattgctggagcttagtgaggtaatatgttcctttatttctgccttacggatacagccaaaatccctggctgtggc

SEQ ID NO: 18414 - DNA, 606 bp, Homo sapiens
  SIMILAR (96)..(236): 951254mologous to Homo sapiens hnRNP type A/B protein,accession number M65028,Smith-Waterman Score=228.
tatttttcaccctctgtcttcaatggggtcttttctcctgtgagtcccctatatgctctggggtagggaggtattgggcctgagtttgcctatgctttttgcagattgaggccattgaattgccaatggatccaaagttgaacaaaagacgaggttttgtgtttatcacctttaaagaagaagaacccgtgaagaaggttctggagaaaaagttccatactgtcagtggaagcaaggtaaggtgttcccagctctgcttggcctcctgtgctgctggagagctggcccttagagggatgggttaggggttgggcctcatgcaggagctctccaggttggtcagactttactatttctctgaagcgtatgctgccctgattggggcagtcgttccaatccttgaaagacttcccaggctgggaggactgccaataaacaacacaggatgtgaagggaggtaaggagaaggtggcctctgtgaataagagcaggtttgagtagcctctttagctcctcacttaaagctagaggtgacagttctagatttctgagtccaggggtatgaagcctgcagtttaaggtctcagaagatcctagaacttctgc

SEQ ID NO: 18415 - DNA, 640 bp, Homo sapiens
  SIMILAR (247)..(378): 911254mologous to Homo sapiens A human beta-alanine-pyruvate aminotransferase (HAPA),accession number B08069,Smith-Waterman Score=211.
gccacagaggctgaaaatgctttcagaaacaatccgaggtttgagcgacttgttaccccatctgcttcctgctttgcaaccacctgtggagtggagagacaaggcagggaagcagcaccttgcccttccagctctcatttcccccccgccaccagaaactgggaaggggtgggcgggggtctgcgatgagtagacttcaccctttcggtcttcagacatggctgtccactccttgcctgtccccacagctcttcctgcagactcttttttcccgaggatcctgttaagaatgtccgggcccaagggcagtacatgtacgatgaacagggggcagaatacatcgattgcatcagcaatgtggcgcacggtcagtatcacacctcaggctggcagggcaggagaggaaggcagtgctgtgaacctggtcccaaggtgacctgagattgccgagaggtgtggagaacctgggtggagttgaggcactgtcagtatgcagaggaggctcagccttcgcaatatagctgtggaattctgcaatctggagctgtgctaaaccaggcaggggtcagcaatctaagtctgtgagtctagttccacttgggactgatgatgagctcacaaagtggcagatggcccagct

SEQ ID NO: 18416 - DNA, 1584 bp, Homo sapiens
  SIMILAR (16)..(1008): 1001254mologous to Homo sapiens ABBP-1,accession number U76713,Smith-Waterman Score=1803.
gcgcctcggcctagcatgtcggaagcgggcgaggagcagcccatggagacgacgggcgccaccgagaacggacatgaggccgtccccgaagcgagtcgcggccggggctggacgggcgccgcggcggggctggaggcgcgaccgccgcgcccccgagcgggaatcagaacggcgccgagggaccagatcaacgccagcaagaacgaggaggacgcgggaaaaatgttcgttggtggcctgagctgggatactagcaaaaaagatttaaaagactattttactaaatttggagaggtcgttgactgtacaataaaaatggatcccaacactggacggtcaagagggtttgggtttatcctgttcaaagatgcagccagtgtggagaaggtcctagaccagaaggagcacaggctggatggccgtgtcattgaccctaaaaaggccatggctatgaagaaggacccggtcaagaaaatcttcgttgggggtctgaatcctgaaagtcccactgaggaaaagatcagggagtactttggcgagtttggggagattgaggccattgaattgccaatggatccaaagttgaacaaaagacgaggttttgtgtttatcacctttaaagaagaagaacccgtgaagaaggttctggagaaaaagttccatactgtcagtggaagcaagtgtgagatcaaggtggcccagcccaaagaagtctatcagcagcagcagtatggctctgggggccgtggaaaccgcaaccgagggaaccgaggcagcggaggtggtggtggaggtggaggtcagagtcagagttggaatcagggctacggcaactactggaaccagggctacggctaccagcagggctacgggcctggctatggcggctacgactactcgccctatggctattacggctacggccccggctacgactacagtcagggtagtacaaactacggcaagagccagcgacgtggtggccatcagaataactacaagccatactgaggcggccaagggagcgaccaactgatcgcacacatgctttgtttggatatggagtgaacacaattatgtaccaaatttaacttggcaaactttctattgcctgtcccatgtgcatcttatttaaaatttcccccatggaaatcactctcctgttgactatttccagagctctaggtgtttaggcagcgtgtggtgtctgagaggccatagcgccatcatgggctgatttttattaccaggtcccccagaagcaggtgagaggctctgcttcctgctgccgctctgcagcctggacctgtggaccctggttgtaaagagtaaattgtatcttaggaaaccagtgtcacctttttttcaccttttaattttatattatttgcgtcatacatttcctgtaacggaagtgttaattttactgtactttttggtaccccttttgggaatctaatgtattgtaaggtattttacacgtgtcctgattttgccacaacctggatattgaagctatccaagcttttgaaataaaatttaaaaaccccaagcctgggtgagtgtgggaaaaaaaaaaaaaaa

SEQ ID NO: 18417 - DNA, 911 bp, Homo sapiens
  SIMILAR (2)..(355): 981254mologous to Homo sapiens A human beta-alanine-pyruvate aminotransferase (HAPA),accession number B08069,Smith-Waterman Score=589.
ccctgacatcgtcaccatgggcaagtccattggcaacggccaccctgttgcctgcgtggccgcaacccagcctgtggcgagggcatttgaagccaccggcgttgagtacttcaacacgtttgggggcagcccagtgtcctgcgctgtggggctggccgtcctgaatgtcttggagaaggagcagctccaggatcatgccaccagtgtaggcagcttcctgatgcagctcctcgggcagcaaaaaatcaaacatcccatcgtcggggatgtcaggggtgttgggctcttcattggtgtggatctgatcaaagatgaggccacaaggacaccagcaactgaagaggcatgtctacttggtatcaaggctgaaggagaactacgttttgctgagcactgatggccctgggaggaacatcctgaagtttaagcccccaatgtgcttcagcctggacaatgcacggcaggtggtggcaaagctggatgccattctgactgacatggaagagaaggtgagaagttgtgaaacgctgaggctccagccctaagccagccctgctctgcctaagtgtactccagaagaaactcatctcatccaaatacacgctattgagaaggcgagcctgacctccctcttacagataaagtcagctttcagaggctcagggtgggggggcctgcccgaggccataatgctacccaccccctcctcctaaccactggtctgttggaataacccagatgtctgcatcccctcaagtcagtcaatttcctttctgtccactgggggtggaatggggtagggtgggatactttaaagtgctcctgcttaaataaattagaccagaccagtgtatttctaaagaaaatcctgacatgcacacccattaaaaatagtacattttacagtgaaa

SEQ ID NO: 18418 - DNA, 2449 bp, Homo sapiens
  SIMILAR (369)..(1151): 521254mologous to Homo sapiens hnRNP type A/B protein,accession number M65028,Smith-Waterman Score=557.
atccttaattaaattaaactccccccccccccgaggcggcggcaccgcgcggtacggagcttggctgttggtcggtgggttcccgtgcggcggcggccaaggaggaggagacacagttggagcagctccgtgggctgactggggcgaggcctcagcagccgcgagctttgatgtgctggccgaagcctgcgcgcgcctttcctccttgcgggtgggggacgaagcgggctcccgcggcgtcatctggcgtgcgaggagcccgccgcgcctcggcctagcactgtcggaagcgggccgaggagcacgcccatggagacgacgggcgcctccgagaacggacatgaagccgtccccgaaggcgagtcgccggccggggctgctggacaccgctgcggcgggggctggaggcgcgaccgcggcgcccccgagcgggaatcagaacggcaccgagggaccaagaatcaacgccagcaagaacgaggaggacgcgggaaaaatgttcgttggtggcctgagcatgggatactagcaaaaaagatttaaaagactattttactaaatttggagaggtccgttgactgtacaataaaaatggatcccaacacctggacggtcaagagggtttgggtttatcctgttcaaagatgcatccagtgtgtagaaggctcctagaccagaaggagcacaggctggatggccgtgtcattgacccctaaaaaggccatggctattgaagaaggccccggtgaagaaaatcttcgttgggggtctgaatcctgaaagtcccactgaggaaaagatcagggagtcttttggcgagttttggggagattgaggccattgaattgccaatggatccaaagttgaacaaaagacgaggttttgtgtttatcacctttaaagaagaagaacccgtgaagaaggttctggagaaaaagttccatactgtcagtggaaagcaagtgtgagatcaaggtggcccagcccaaagaagtctatcagcagcagcagtatggctctgggggccgtggaaaccgcaaccgagggaaccgagggcaagcggaggtggtggtggaggttgaggtcagggtagtacaaactacggccaagacccagccgacgtggtggccatcagaaataactacaagcccatactggaggccggcaggcaggagcgaccaacttgattcgcacacatgctttgtttggaatatggaagtgaaccaccatttatgtccccaaatttaacttggcaaactttccaattgcctgtccccatgtgcaatcttaattaaaaatttccccccatggaaaatcaactctcctgtggacttatttcccagaagctcctaggtgttttaggccaccgtgtgggtgtcctgaagaggcccatagcgcccatccatgggctgatttttattacccaggtcccccccagaagcaggtggggaaggctctgcctcccctgctggccgctctgcagcctgggaccttttggaccctggagtacacttaggcagagcagggctggcttagggctggagctcagcgtttcacaacttctcaccttctcttccatgtccatttcctcactgaactggaaaagcaccccagggtattgtgagacacgggctgaacttgggatctgtttccttccagccacctgaccattccgaatccctgaggctccttgataccaagtaggcagcctcttcagttgctggtgtcttgtggcctcatctttgatcagatccacaccaatgaagagcccaacacccccagggtggcccgtcagcagcacctgggcctgctcgagagtgacctgggagggggcctttcggtcttcgacatggctgtccactccttgcctgtccccacagctcttcctgcagactttttttcccgaggatcctgttaagattgtccgggcccaagggcagtacagtacgatgaacagggggcagaatacatcgattgcatcagcaatgtggcgacggtcagtatcacacctcaggatgggcccagtgtagtgtactgaccgagtgtggactcggagaggcagcccccactgcaccaggctcctagattcccggctgtaggccctgatgctttctctgttggatccagtttcctgtctcttattgaaggatgttattacctcctttctaggatcattgctgggcttagtgaggtaatatgttcctttatttctgcccggcccggcattataaagggcgccacgagtcggcattgtcaggcggcggcacccgcgggacggagcttggctgttggtcggtgggttcccgtgcggcggcggcaaggaggaggagacacagttggagcagctccgtgggctgactggggcgggcctcagcagcgcgagcttgagtgcggccgagcctgcggcgccttccctgcgggtggggacgagcgggccccgcggagtcat

SEQ ID NO: 18419 - DNA, 784 bp, Homo sapiens
  SIMILAR (45)..(437): 1001254mologous to Homo sapiens FLJ00008 protein,accession number AK024419,Smith-Waterman Score=720.
agcctttgtttgttgtatttcctctgtctccagacatcgcaggccggccgggcggcgttgttggcgggggccccggtggaggcccggcctgggcggcgcccgccatgaatgggctgtcgctgagtgagctctgctgcctcttctgctgcccgccctgccccggccgcatcgctgccaagctcgccttcctgccgccggaggccacctactccctggtgcctgagcccgagccggggcctggtggggccggggccgcccccttggggaccctgagagcctcctcgggcgcacccgggcgctggaagctgcacctgacggagcgtgccgacttccagtacagccagcgcgagctggacaccatcgaggtcttccccaccaagagcgcccgcggcaaccgcgtctcctgcatgtatgttcgctgcgtgcctggtgccagacaaggacaccaggctcagggaggccatccccagctggcatgggtgggcaggctgggcgactccaacaacccagcgcctggtggttgcctgctgggcaagagctggggcacaggggctgccctggcctgcgggtacatccaccttctcgccaggtacacggtcctcttctcgcacggcaatgccgtggacctgggccagatgagcagcttctacattggcctgggctcccgcctccactgcaacatcttctcctacgactactccggctacggtgccagctcgggcaggccttccgagaggaacctctatgccgacatcgacgccgcctggcaggccctgcgcaccag

SEQ ID NO: 18420 - DNA, 2251 bp, Homo sapiens
  SIMILAR (9)..(257): 1001254mologous to Homo sapiens Similar to CGI-67 protein,accession number BC000158,Smith-Waterman Score=454.
  misc_feature (1)...(2251): n = a,t,c or g
cgcccgccatgaatgggctgtcgctgagtgagctctgctgcctcttctgctgcccgccctgccccggccgcatcgctgccaagctcgccttcctgccgccggaggccacctactccctggtgcctgagcccgagccggggcctggtggggccggggccgcccccttggggaccctgagagcctcctcgggcgcacccgggcgctggaagctgcacctgacggagcgtgccgacttccagtacagccagcgcgagctgnagcaccatcgaggtcttccccaccaagagcgcccgcggcaaccgtgtctcctgcatgtatgttcgctgcgtgcctggtgccaggtacacgggtcctcttctcgcacggcaatgccgtggacctgggccagatgagcagcttctacattggcctgggctcccgcctccactgcaacatcttcacctacgactcctccggctacggtgccagctcgggcaggccttccgagaggaacctctatgccgacatcgacgccacctggcaggccctgcgcaccaggtgagggcgaccctgggggcagctcagcctggcgggagggagtgggtggtggtctgggggtctgtgcacgtgtggctgggagcccatcggctgaggcagcacttggggccaagtgaggcgaggctgctgcatccaggtccggaggactggcccatgaggccctgtggctgcggagcttggccatcctgccatggccagctctgagctctgtctgctcggccatctgtcctgctgcccctttgtcctgcaggaacctaggcccagagccatgagggggaggccagagcgtgcccagggcctccactggggatgtgtcccgttcgtttgagtggtgacatccaggtggcagctgggggctcctgcctgcccatgctcctgccttgcaagagggcgtctgcctgggatcagagcctagagcgtgtgggaggagagttgtggggtcccggcatgggcagggtggcaggtgggtcccgcgtgcttgggactgggcacgaggaggccttgtaactggtgctggatcagctgggtcaggggccgcacaccaatgacctgggggtgagggtgcccctgggtgggagctggtggtgctgaggtggccgaggacttgtccactcccaagggaaggtgctggtgggagggggtgccacctccgcagccaccaccctcgatgctgacctgggttgcactggcatctcactgggcgtggggactccgagagtccaaaattgggtggagacatttggggacacagctgcctgaattcctcatggccaagggggtgggcaagggctgcagggaggaagagtgtccgctgtcctggccagtgcaccaggaacggctttctaacccgggcaggaaggtatgaagcattcaggatgtgggggccacacagttcccagtgtgcactgacttggctgagtggggagactggagggtcgcatccggagctgggcccggggacgcccgctggtgggaagggtgcgcgcgcgttggaggccgcggctgaccctgctccggcgccgccaggtacggcatcagcccggacagcatccatcctgtacgggcaggagcatcggccacggtgcccaccgtgggacctggcctcgcgctacgagtgtgccgcggtggtgctgcactcgccgctcaacctcgggcatgcgcgtcgccttccccgacacacaagaaagacctactgcttcgacgcctttcccctacattcgagaaaggtgtccaagattaacgtctccccgtgctcatcatcccacgggcacgaaggacgaggtgatcgactttctcgaagcgggctggcgctctacgaggcgctgccaccaaggcggtggagccgctgtgggtggagggggccccgggcacaacgacatcgagctctacagccagtacctggagcggctggcgtcgctttcattctcccaggagctgcccagccagcgcgcctagcggcggcccccaaccggccggacctcagcaataaggcggcccccggacttcaccccgcgccggcccccacccaggggcttgcatgtggaccccccgggcggccccggtggaggcccggcctgggcggcgcccgccatgaatgggctgtggacgatgtacaggcaacgagacgtacgcactcctttccttttggaagcaagaagaaaatacgtgaaaacggacaattaaagatttaaaattttaaaaaaaaaaaaaaaaa

SEQ ID NO: 18421 - DNA, 478 bp, Homo sapiens
  SIMILAR (85)..(357): 971254mologous to Rattus norvegicus proteasomal ATPase (S4),accession number D50696,Smith-Waterman Score=464.
  misc_feature (1)...(478): n = a,t,c or g
tgannnnttgcnnnctannnnnaaaactgagnacccatgagancntcngaaannnncgnaannnnnggnncgacgannncctgtcaaagtcagagtggtggtcatggtcctggttttggcattaaggatgacaaggacaagaaaaagaaatatgaacctcctgtaccaactagagtggggaaaaagaagaagaaaacaaagggaccagatgctgccagcaaactgccactggtgacacctcacactcagtgccggttaaaattactgaagttagagagaattaaagactatcttctcatggaggaagaattcattagaaatcaggaacaaatgaaaccattagaagaaaagcaagagacaaggatctgctggaacctggctgctcggtcctgctcaaccacaaggtgaggtgatagtctttttcagaaagcccacggaagtgctttctcttctcacttaaggtcatctttctggtccg

SEQ ID NO: 18422 - DNA, 1909 bp, Homo sapiens
  SIMILAR (248)..(1420): 471254mologous to Rattus norvegicus proteasomal ATPase (S4),accession number D50696,Smith-Waterman Score=595.
ggcacgagcttccggcagcggcagctcaagtggccaaggcaagatgggtcaaagtctagagaggtggtcatggttctggaggtggcaagaaggatgacaaggacaagaaaaagaaatatgaacctcctgtaccaactagagtggggaaaaagaagaagaaaacaaagggaccagatgctgccagcaaacgtgccactggtgacacctcacactcagtgccggttaaaattactgaagttagagagaattaaagactatcttctcatggaaggaagaattcattagaaatcaggaacaaatgaaaccattagaagaaaagcaagaggaggaaaagatcaaaagtggatgatctgaaggggggaccccgattgtcagtagggaaccttgggaagagattcatttgatgacaatcatgcccatcgtgtctacacctagtgggctcagaacactaccgtcagcattcttttcatttgtagacaaggatctgctggaacctggctgctcggtcctgctcaaccacaaggtgcatgccgtgataggggtgctgatgggtgacacggatcccctggtcacagtggatgaaggtagaaaaggccccccaggagacctatgcagatattgggggggttggacaaccaaatttcaggaaattaaggaatctgtggagcttcctctcacccatcctgaatattatgaagagatgggtataaagcctcctaagggggtccatccttttggtcccacctggccacgggtaaaacctttttgcccaaggcagtagcaaaccaaaccctcagccactttcttgagagggggtggctctgaacttattcagaagaacctaggagatgggcccaaaacccctcccgggaattgttccggagtttctgaagaactggccccgtccctccggtttattgatagaattttgcccccattggggacaaaaagatattgactccaattctggtggtgaggagagaatttcagcgaacaatgtttggaactgctgaacccagttgggatggatttgattcttaggggagattgtgaaagttatcatgcccacaaaccgaaatagaaactttggatccagcacttatcagacccaggcccgcatttgacagaaagtatgagtttccccctgccctgatgaaaaggacgaagaagcgcatctttcagatttcacacaaaagcagatgacgctggctgatgttggtaccccctggacgaccctgatcatggcctaaagatgacctctctggtgcctgaccatccaaggcaatcctgtacatgaagctggcctgatggcccttaagagaaccgtagaatgaaagtaccaaattgaagacttcaaaaaatcctaaagaaaatgttctttataagaaacaggaaggcacccctgagggggtggtatctctaatgaacccatggcttgtcatcaggaaaatggttgggagatttctcaatccctgaaagggatgaggttggggggagttgcccagaggaatccctgttcccactgattttttattagcaaaacatcctgtgtcttttggaataacaagtgtaaagtgcccattgggtggcctgttggtcactgtgcatcagtctgctttcccaataaagcgtgctctttcacaaacacttcctgtttctgcagtctccacacacacctaccgctcaacagcagcctgtgggtggacccagctacagggaagcctttggacaggaactcaggctgcggtcccaaggagtgtggacctcactatgcgttcgccacatcacacccccagagctggcgttcaacggtaattacagtgggaaatggtcactaccacagagccagggatattcgttgtttaaataataaaggctgcgttaatgtggctattgcttccaaaggaag

SEQ ID NO: 18423 - DNA, 274 bp, Homo sapiens
ctggcaggacctaatctgtcggatggctgcatcagtgaaggagcaatccacaaagccaattccattaccacagtcaacacctggcgatctcattcactgagtacctctgggaaatcagaggtacgtgatctgtttgtggctgagagacagtttgcaaaggaacaacatacagatgggacactaaaggaagttggagaagattatcaaatcgcaatcccagattcacacctgcctgtctcagaagaacggtgggcattggatgcactaagaaatt

SEQ ID NO: 18424 - DNA, 845 bp, Homo sapiens
  SIMILAR (3)..(425): 991254mologous to Homo sapiens Human secreted protein from clone CW420_2,accession number W64468,Smith-Waterman Score=745.
tgggtttgttgaagcagttgctggtgcaacagctaggtttgactgagaagagcgttcaggaagactggcaacatttcccaagatacagaacagcctctcaggggccgcagacagacagtgtcatccagaactctgaaaatattaaggcctatcattctggtgaaggacatatgccctttagaactggaactggtgacattgcaacttgttacagtccacggacttcaactgaatcttttgctccacgggattcagtgggactggcaccccaggatagccaggcaagtaacattttagtaatggaccacatgattatgaccccagagatgcctaccatggagccagaagggggtcttgatgacagtggagagcacttttttgatgcccgtgaagcacatagtgatgagaatccatcagaaggaaactatttgatccttgatggctatgacccagtgcaggagagttccacagatgaggaggttgcttcctcacttaccctgcagcccatgacaggcatccctgctgtggaatccacccaccagcagcaacattctcctcagaatactcactccgatggggcaatttcaccattcacccccgaatttctggtccagcagcgctggggagctatggagtattcctgttttgagatccagagtccctcctcttgtgcagattcacagagccagatcatggagtacattcataagatagaggctgaccttgaacacttaaaggtacctcatacttccacatccataggacttggttgtaagaaacatttagcagaggggaagaatagggtgatgaaaatgctgatgtcaataaacttgttcaggttctag

SEQ ID NO: 18425 - DNA, 7843 bp, Homo sapiens
  SIMILAR (366)..(1202): 911254mologous to Homo sapiens Human secreted protein from clone CW420_2,accession number W64468,Smith-Waterman Score=1297.
  misc_feature (1)...(7843): n = a,t,c or g
gttttaggggtgactgaacatgggacaccaaagcccttttcaaaagtaagtaaatcttaagcagctttcaataaggcgcattttaagaaacgtaaccttttttcctctaaagtttcattttaaaggaaaagaaaccctgtataccaatctgttatgtagtataaaagaaagctcttaagaaacactggtcattcaaaagctgtattttgaagtatgtataaaacagccatttgtaggagaggatgaaatttcagtgctaagtcagattcaggaatctgattagaatttattgtaatataaagatttgtgctgtttctcattgtccacctaaagtcttcaaattgaattcactcttttttcttcataggtttgacagtgtagcttttggagaaagtcaaagtgaggatgaacaatttgaaaatgacttagagacagatccacccaactggcagcagcttgttagtcgagaagtgttactgggactaaaaccttgtgaaatcaaaagacaggaagtgattaatgaattgttctacactgaaagagctcatgttcgaacactgaaggttcttgatcaagtgttctatcagcgagtatccagagaaggaattctgtcaccctcagagctacggaaaattttttcaaacttggaagatattcttcaacttcatattggattgaatgaacaaatgaaggctgttcgaaagagaaatgagacctctgttatcgatcagattggggaagatttgctgacatggttcagcggaccaggagaggagaaattgaaacatgctgctgctaccttttgcagtaaccaacctttcgccctggaaatgatcaaatctcgtcagaaaaaggattctcgatttcagacttttgtgcaagatgctgaaagtaatccactgtgtcgtcgtcttcaactgaaggatattattcccactcaaatgcaaaggcttactaagtacccacttctgttggataatattgccaaatacacagaatggccaacagaaagggagaaggtgaagaaagctgcagatcactgtcgtcagatcttaaattttgtaaatcaggctgtcaaggaggcagaaaacaagcagcgccttaggaagattatcagcgtcgccttgatacctccagcctggaagttgtcagagtacccaaatgttgaaagtgctcaggaatatggatttaacaaaaaggaagatgattcatgaagggccattggtttggaaggtgaatagagataaaactattgatttatacacgttgctgctggaagacattcttgtattgttacaaaagcaggatgatagactggttttaaggtgtcatagtaagattctggcatctacagctgatagcaaacacacgtttagccctgtcattaagttgagtacagtgttggttcgacaagtggcaacagataacaaagctttattcgtcatttccatgtcagacaatggcgctcagatttatgaactggtggcacagacagtttctgaaaagactgtctggcaggacctaatctgtcggatggctgcatcagtgaaggagcaatccacaaagccaattccattaccacagtcaacacctggcgaaggagataatgatgaagaagatccttcaaaattaaaagaggagcagcatggcatttcagtcactggtttgcagagtccagacagagatttgggattagaatctaccttaatatcgtcaaaacctcagtctcattcactgagtacctctgggaaatcagaggtacgtgatctgtttgtggctgagagacagtttgcaaaggaacaacatacagatgggacactaaaggaagttggagaagattatcaaatcgcaatcccagattcacacctgcctgtctcaaaagaacaggagggcattggatgcactaagaaatttgggtttgttgaagcagttgctggtgcatcagctaggtttgactgaaaaaagcgctctggaaaactggcaacattttccaagatacagaacagcctttcaggggccgcagacagacagtgtcatccagaactctgaaaatattaaggcctatcattctggtgaaggacatatgccctttagaactggaactggtgacattgcaacttgttacagtccacggacttcaactgaatcttttgctccacgggattcagtgggactggcaccccaggatagccaggcaagtaacattttagtaatggaccacatgattatgaccccagagatgcctaccatggagccagaagggggtcttgatgacagtggagagcacttttttgatgcccgtgaagcacatagtgatgagaatccatcagaaggtgatggagcagttaacaaggaagagaaggatgttaatttacgcatctcaggaaactatttgatccttgatggctatgacccagtgcaggagagttccacagatgaggagggttgcttcctcactttccctgcagcccccatgacaggcatccctgctgtggaatcacccacccagcaagcaacattctccctcagaaatactcactccgattggggcaatttcaccattcacccccgattttctggtcccagcagcgctggggagctatggagtatttcctgtttttgaggatccagagtccctcctcttgtggcaggatttcacaggaggccagatcatggggagttacatttcattaaggttaggaggctgacccttgaacacttaaagaaggtggaggaaagttaacacccattcttttcccaaaggcctggcttggatcagcccctcacagacaagcacctcagataaaagttaagagcctcatgtcctgggaggtgactgcaaggttggttggatttggagtatcggccgtgtcttcaccacatccctggctccagtgtggatgccagagagagtgtggaccagagggatcctgccctgtgaaccccacccctgggattagtcaaagtcccccaaggtgccccagagtgggacctagttccttcacagtgtggcagctgcacctaatctgtttggtgagggaatatcccattccctcactctactctcctcactatcggaaattcattttgattcagaataaaaaccaaatgtatagagctttgggtgtaggatatgaaattgtacttagatttaagaaaaagagaaaatcagatgtatttatttgacttcattccgtatttgaaagcacattttaatttttatttgccttggtttgttttaattgagtagggagagttttagacctttgtctttagtacacccaaggatcaactgctcctgaagcaaagaggtcaggatggagtatgcagaagttgggtagagaggttaagaagaggaggaagtgagacggggaagggaggagcaccttgcttcactataccgtatttcaagctctctgctgtccagtaggctgcttctctgagggtcacctcaaaggtatgctatgccgtgtggctcttatgtgcccaggtggtgtggtcagagagtggatgggcttcctcccgccctgaggcaagcacctcttctctgtagctgggatcaaccacaattaataggaatcctcaacatactaaatagcaggcacttgaaaatgggtgtgttttcttccattgtcgtcttttctattgagggttgggattttgggtgggagaggaaagcaaatttcattttcttgactataaatttgtcattccttggtatcatttcatttttataattatacattaggacattggcacttgtgtaaaactgtccctgcagattgagcaggaagtaaaaacaaatggaaatgcttcggatagtggcaggggtgggggttgctaaggaaagggtgggatgggagtgggtaaagagtttgggaaggttatctaactgaatcactactgagttgaatcatggctatcattagccacaggtactgctgattataaggccagtaaaattttagtacctggaggtttgactctaatttttgcactgatggtgccaaagggccctgagtcaaaaggatagccaagggtggagtggaaaaagatatggtgaaggcagaactgctcacaccagctccagaagcacgtcctctgacttcactgccgcagctctttccacacggggccgtgattgaccctaaaaattgcagaccagcacatacactggacactgcaggcaaggtgttggtaacttgcctgctctagggatgaatagtagcgttagcagcaccctacagagggtaagtttcagaattgtaatttgagaactccttcaattatattgactttctttggttttccttgtgcattaaggtatatattttttgaagtaattttggccaactaaaaatgaagtctgtaaattctgttaataaacaaggagttcatccgttgctcacatctttcattggtgccctctgaactctgtgggttgctaggatgtaattttaatgcttccctgcagtccaaagatgattttttcaccacaaatggtaagggatgcccacctacttttataaacaccactgcaacttaacaagtttatttatctatgtccagatttctgtttctgtcctaaattgatctgtgtttttaggtggatcaacttggatctttagacctcatctataaattgaaattatatttttaagtcataagccaagtacaatctaactcagaatgggattaaaaattttagaagcagaagctaatatataaatgaagtttgggatttggaactttctgtatctcttaggaggaacaagtaaaaaccaaatggttacattgtgctgctagaaataatgtcattctcaattaaaagggttacacctgtagccacttgacactaacaccatcgagggcaattaatcaggagaaaagtaaatataaaaactttgctcttaacgtcacacactacagggtaattatgtaattctctaggcactcaattaaggaaggcttgtagggttaggcaaaatttcagtttctctagttcagccagtgtcttgtccttaggtaattatttgctttccctgcagttcaatttctccttgggaactctaacagggacttaactgggaaggaattactttggacccattaggctctaggtactttcccaaattaaattccatattctaggattttttcaaacaaaggccccaaggatggaaggtcttaatttctggaaaatattctncacaatttttggaatgttctttttatcttaccgacctaacttctctttttccctcccaacttggcctcccacacgttccatttcattttggccattatagtcacatccgtttgactttggttgtgacatcttcctttcagggatgatgggaattaggatgcagtctgtctttgagtgaggactgggtcaccatcagagggagttttttcttaaggtgacgtggactaggaagttggaaatcttacttccctggctaaagggggcacaggggtggtgtacaaagaaagctaccttcccagagcaagcaggctgcattttagctatggaagtgacctgctgtgacactgtgctctcttctgtgggcttaatggttcctttgctatgaagtggcaaattacatgtagagtgtctccttccttttcagagaacagttaatcaaggcaaatcagcaagcccccaaagtgctgtaatttaacatcatgattaccaccgttcgaagcgtatatattttgcatactttaaaatcaccgtaacttggactgcttgaattacattggcttttagaacccgaaattgtaactatgtattgtatttcatgggaggtatattttatgagctttttggctttctttttttcccacagcaactgccaatgaaggatgaatccccttttgtaaaaagttgttgttgttgttgtttatttgattttgagttaggagggataatagagaagtccatttaaaaattatttttagaagctaaagaaagtaattatgcttcctgtggaattgtctttttactggcatctctgtyyttcctctcttgatgttagtaaatctsgtgtaatacgtggggcttccatatttcaaagtggaagctttcttctctgaagtcgatatatggttttgaattactagagctttggtcagtatttccttccctaatatgtcacagagggcaccacttgagaactgcgtgccataggacctcaaaataccaaatttagcagggcctcacagtcagcttcctcatgggctagtttttcccccttatattacaatttttgttttataagacattttttttcctgatatttacaccacttttcagagtccatctacaaaattttttcttttcctcaagaaaagagtttcctttttggccttattccttatggcctttccccactgggtatttgtaggggtttttgataataaattggtaggaaaaaaaagtaccctcctagaaggaagccttccccacccatttcccaggtgcccaactgctaagcgggatatattcccaaaaaatgggtaaccggtccatgtggcacactgttgggttatttttaataagccctcttccctacctagaaccattttattttcccttggttccaccataccaatccatgtacccctttaaccagaaattgcttttcacacacaaatatctggaactaatctttaaaaaaaactttattgaataatccatgtatttttactgatccacattttgcaaatgccctaaaagactttattgttctcaattatccgagatgtacctttgtaaaataggctcttttatgaattaacctgatatgggctggatggtttctggaacaaaatattgtgtcatctaaaaactttctgttttctggggtctgggcaaaatagaaaataagatttcaaatattaaataagtcttaaaggaaccaagcatgtgactttttatttgtattctggttgatttgtcttgtccaagttatattagaaaagttgaggagtcgaggagcctgtaattaattttcctgtcagtgactgtcagacatcttcctgcttattagagcatccctagcaacaagggctaaacctttcatgacagtgctgggcaggtggggcttgccctaggcatgtgggggcaggtttgttgttttttttaatagctttattgaggatatttcacatatcatataattcatccatttaaagtgtataatcagatgggttttggtatattattgatttttaattgtggtgaaatatatatataacaaaatttgctattgtaactatttttaagtataaagttcagtgaggtaggccagcttttatgacgcacctgaagataactttggttttaatcctaccctaaatgaagcatatgcctctatttttcctgtccccagtgctgggcttcttcacataccaacatttctgtgcttttaccaacagcattttagctcagaaggctcgcttactttgggcatttgctgtattttggttttgaaatacttgtaatttgacttattcttgggataatattttagttttcagtcattcaagggcacatttggctgacggagctaataagcgtaataaaatgcttagtagtttataccatcttttagttaaacattttaaagattaagactattcaaatgtactttgcggaaattaacctgtttgtatgcctggctttgtttacaaacatatatctatatctatatatatagatacagatacagatacatatctggtggaacaaagaaatacctgtaccattcccacttgctctttgatagccacctcctaggaatggagacaataaaactctgtatttgcatgtgaaaaa

SEQ ID NO: 18426 - DNA, 414 bp, Homo sapiens
  SIMILAR (411)..(292): 571254mologous to Homo sapiens Human secreted protein sequence encoded by gene 4 SEQ ID NO:51,accession number B08894,Smith-Waterman Score=106.
tcaggccataaacccaggcattctagcaggcaacggcaatcccctttgggtcccctccttgtatgggagctctgttttcactctattaaatcttgcaactgcactcttctggtccttgtttgttatggctctagctgagctttcgctcgctgtccaccactgctgttttgccagtgttgcagacccgctgctgacttccatccctccggatccagcagggtgtctgctgtgctcctgatccagcaaggcgcccattgccgctcccgatcgggctaaaggcttgctatttttcagctctttctcttcaaacttctttaacatgtcttggcttagttgttctgcttgattttccaaaagaagcagcttctctggataaggtgtaggatagttaaaggaggttctagtaagagccat

SEQ ID NO: 18427 - DNA, 459 bp, Homo sapiens; identical to SEQ ID NO: 14120
  SIMILAR (1)..(114): 1001254mologous to Homo sapiens dJ1191N16.1 (A novel protein (translation of the cDNA DKFZp566A0946, Em:AL050069)),accession number AL118501,Smith-Waterman Score=197.

SEQ ID NO: 18428 - DNA, 1092 bp, Homo sapiens
  SIMILAR (161)..(502): 331254mologous to Arabidopsis thaliana F23N19.12,accession number AC007190,Smith-Waterman Score=121.
tcacaatatgtccagattcttagcactttccacttctcctccactttcatcgtggtccaagtcagtatcaccccctgcaatgtttgttgtgaccccctctaactggttccccgacctgcgcctttcctttagcatgttcagtttctgaacattccctcctctttcctcctcctccttcctcctcctcctcctccttcttctcctccttctcggccgggaggaggcagggctggatccctcagccgccgccgctcctcctcctggcaggccggccgcggagtcagctgacgccggcgctccagcctcgcctccccgcgccgcgctctgcgctccccgaaagtggctgcaagccggccgcccactgtcagggttggggggacagagaaagtgatgtgcgccttctaaagcctcgcccagcgccgccgaagcagcttcacctctccaactttctcccaccgactgcttgtcttgaccctgccctccaccctccccagagccacttcgggtgcgcgctgtgaggatccggagcagacgcctcggggtgagtatcgatcctctccgtgttgctgttcgccggttcgattgtctctctcttgagccagcatccctggagggtggacggagagtccccggccgcgcgccggagaattgcgcggtggctttctcagccgaaacccgcgtctccggggctgtcactgtaaggccagcgtctaggtatgtaatggatctatctttatctcttggatgacttggctttctgatggtggccgcgtgttgggcttcagtagcccctggagcccatctactcgaaataaatatttctcggtagccatggaagttggagctctgtcccaggtgtcgtgtcaaaggcggtgcgggctggcctctggtcggggccaacttgggtagatacttgaatctggattttccgtggttcgaagccggggtggtggatttctgttgctggaatacaccctggaggtccacggaagggttatttacgtggaacctgatacctggcatagcgcaagtgctccctacatatgtcctcacgctatccactgctacgaccctggtccgaaccctcctcat

SEQ ID NO: 18429 - DNA, 2539 bp, Homo sapiens
  SIMILAR (1332)..(1808): 661254mologous to Homo sapiens dJ1191N16.1 (A novel protein (translation of the cDNA DKFZp566A0946, Em:AL050069)),accession number AL118501,Smith-Waterman Score=440.
  misc_feature (1)...(2539): n = a,t,c or g
caagagttcggcgcgaggggctgggtccctctagccggcgccgctcctcctcctggcaggccggccgcggagtcagctgacgccggcgctccagcctcgcctccccgcgccgcgctctgcgctccccgaaagtggctgcaagccggccgcccactgtcagggttggggggacatgagaaagcgatgtgcgccttctaaagcctcgcccagcgccgccgcaagcagcttcacctctccaacttttttncacccaccgactgcttgtcttgaccctgccctccacccttccccagagccactttcgggtgcgcgctcttgggtaaagggggggtcaccggctgtctgggatggcttccaattttaatgacatagttaaacaagggtacgtgaggatccggagcagacgcctcgggatttatcagcgatgctggtttaatattcaagaaagcttcaagcaaaggtccaaaaagactggagaaattttctgatgaacgtgctgcatatttcaggtgttatcataagctgttcttgctgttttccagtctctgctatgggacttatcatgttgttgtactccctacactgaagccccgagaggatgaggactggatctcattgtgtctcagacactgcctgatgcagaaagacactcattcaatgcttggggaatgtggggagagaagggaggggaagaagcagaaaacaggtgccctgggctcctctctttccttggaagatgccaagcacctcctgccctttatacctgctcttcccttttcctggaatgctctcccccaggatctttgtaatgtattcaagttgctgtgggattatcggattagagtggaccccagtcccatagctggtacccttataagaagagacacagacccacagggagaaagccatgtgaagacaggcagacactggagtgatacaattaaaagccaaaggtgtcaaggactgcggcagccaccagaccgtcccattcccatccttctcatggttaaaggtcaacatgtgtggccaagccagctggacaaggctcaaatccaggaggttacagaactcaataatgtgaagaacgtagctcgattgccaaaaagcaccaagaaacatgccatagggatttatttcaatgacgatacctccaagacttttgcttgcgaatcagatcttgaggctgatgagtggtgcaaagtactccagatggagtgtgtaggaacacggatcaatgacatcagccttgggagagcctgacttactgggccactggggttgaggagagaacagagtgaggagattcaatgtgtatttgatgacatctccttaacttaggatgttacatgggcgaatgtgccttgcaggtttacatatggagtatatctgtctttggggacgtcccaggantccccaggagttcaaactcatctcttgggccgctaagcgccctgcggcggtatgagacgtggtactccttgtttcaattatcaggcagggaggatgttgtcagactggtgaaggcctgtttatctttcagacccgagacggggaggccatctatcagaaagtccactcttgctgctttggccatagccgagcagcacgagcgcttgctacagagtgtgaaaaactcgatgctccagatgaagatgagtgagcgggccgcctcgctgagcaccatggtgcccctgcctcgcagcgcctactggcagcacatcacacggcagcacagcacgggacagctctaccgcttgcaagatgtttccagccctctgaagcttcatcgaacagagacttttcccagcctacaagattcttgagcactgacagtaactggccatgaattgttaacacacttgtgatgtgtcagcccacagattcacccaggaggtcacagaatgacagcaagggaaatgacgaccaagagaagaagcttaaagccctggctaattgtgtggtcattggaaaaactctgcaatacaataattttctttatttcctttttcttttttaaattcttagtgtaattgaaacgtgctctatagatattgactctgtgttccctcttttacagctggacagaaagaagtcaatgtcacgaaatgattttctattgtagatactttgtcccttgcacttctctgaatctgtccttttgtggattcttgtgattttccttccaagtgtttcagttgtatgacagtcagtattgacaataaaatggcgttttaattatttgttatttgtttacccccctattcctcagttattattactgtggttctgattaactactgggaaattatatttgattatatcaccaattagttaaatcagtgcttcgactcactccttatctgttctgttcaaaactatttgttcaaagaacccattagtattgtttacagggttacagtttctctcacatgctttcctcacccctttacccccctttttgaaagcctttattttgttcggagtctcttcataaaacatttgaaaataaaagatcattcttcacccataaaaaaaaaaa

SEQ ID NO: 18430 - DNA, 620 bp, Homo sapiens
  SIMILAR (13)..(612): 701254mologous to Mus musculus Pro-Pol-dUTPase polyprotein,accession number Y12713,Smith-Waterman Score=701.
aagacagatggatcttggagaatgacagtggattactgtaagcttaaccaagtggtgactccaattgcagctgctgtaccagatgtagtttcattgcttgagcaaattaacacatctcctgatatcacactggtccattacattgatgacattatgctgaatggatcaagtgagcaagaagtaacaaacacactggacttattggtgagacatttgtgtgccacaggatgggaaataaatccaactaaaattcagggatcttctacctcagtaaaatttctaggggtccagtggtgtggggactgtcgagatgttccttctaaggtgaaggataagttgctgcatttggcccctcctactaccaagaaagaggcacaacacctaacgggcctatttggatttcggaggaaatacattccttatttgggtgtgttactctgtcccatttatcaagtgacccgaaaggctgccagttttcagtggcgtccagaacaggagaaggctctgcaacaggtccaggctgctatgcaagctgctctgccacttgggccatatgacccagcaggtccaatggtgcttgagatagcagtggcagatacagaggctgtttggggccattg

SEQ ID NO: 18431 - DNA, 424 bp, Homo sapiens; identical to SEQ ID NO: 14653
  SIMILAR (1)..(306): 821254mologous to Mus musculus Pro-Pol-dUTPase polyprotein,accession number Y12713,Smith-Waterman Score=419.

SEQ ID NO: 18432 - DNA, 207 bp, Homo sapiens; identical to SEQ ID NO: 14654
  SIMILAR (1)..(159): 731254mologous to Mus musculus Pro-Pol-dUTPase polyprotein,accession number Y12713,Smith-Waterman Score=185.

SEQ ID NO: 18433 - DNA, 1863 bp, Homo sapiens; identical to SEQ ID NO: 3795
  SIMILAR (817)..(1860): 911254mologous to Homo sapiens putative p150,accession number U93563,Smith-Waterman Score=1638.

SEQ ID NO: 18434 - DNA, 3819 bp, Homo sapiens; identical to SEQ ID NO: 3971
  SIMILAR (1084)..(2460): 931254mologous to Homo sapiens putative p150,accession number U93564,Smith-Waterman Score=2255.

SEQ ID NO: 18435 - DNA, 1524 bp, Homo sapiens; identical to SEQ ID NO: 2166
  SIMILAR (1)..(852): 881254mologous to Homo sapiens p40,accession number U93570,Smith-Waterman Score=1274.

SEQ ID NO: 18436 - DNA, 2265 bp, Homo sapiens; identical to SEQ ID NO: 2285
  SIMILAR (946)..(2256): 951254mologous to Homo sapiens putative p150,accession number U93574,Smith-Waterman Score=2181.

SEQ ID NO: 18437 - DNA, 1716 bp, Homo sapiens; identical to SEQ ID NO: 9110
  SIMILAR (628)..(1713): 941254mologous to Homo sapiens putative p150,accession number U93569,Smith-Waterman Score=1738.

SEQ ID NO: 18438 - DNA, 1707 bp, Homo sapiens
  SIMILAR (163)..(1704): 961254mologous to Homo sapiens putative p150,accession number U93565,Smith-Waterman Score=2531.
atgcagaaaaagcatgacaaaatccgaaattctttcatgataaaaactctcaaaaaactacgtacagaaggaatttacctcaatacaataaaggcaacatataaaaagcccataactaacatcatactcaatggtgaaaaccagaaagcttttgctctaagatcgggaacaagtgcaatcaaactagaactcaggattaagaatcccactcaaagccgcccaactacatggaaactgaacaacctgctcctgaatgactactgggtacataatgaaatgaaggcagaaataaagatgttctttgaaaccaacgagaacaaagacacaacataccagaatctctgggacgcattcaaagcagtgtgtagagggaaacttatagcactaaatgcccacaagagaaagcaggaaagatccaaaattgacaccctaacatcacaattaaaagaactagaaaagcaagagcaaacacattcaaaagctagcagaaggcaagaaataactaaaatcagagcagaactgaaggaaacagagacacaaaaaacccttcaaaaaatcaatgaatccaggagctggttttttgaaaggatcaacaaaattgatagaccgctagcaagactaataaagaaaaaaagagagaagaatcaaatagacacaataaaaaatgataaaggggatatcaccaccgatccctcagaaatacaaactaccatcagagaatactacaaacacctctacgcaaataaactagaaaatctagaagaaatggataaattcctcgacacatacactctcccaagactaaaccaggaagaagttgaatctctgaatagaccaataacaggagctgaaattgtggcaataatcaatagcttaccaaccaaaaggagtccaggaccagatggattcacagccgaattctaccagaggtacaaggaggaactggtaccattccttctgaaactattccaatcaatagaaaaagagggaatcctccctaactcattttatgaggccagcatcattctgataccaaagccgggcagagacacaaccaaaaaggagaattttagaccaatatccttgatgaacattgaggtaaaaatcctcaataaaatactggcaaaccgaatccagcagcacatcaaaaagcttatccaccatgatcaagtgggcttcatccctgggatgcaaggctggttcaatatatgcaaatcagtaaatgtgatccagcatataaacagagccaaagacaaaaaccacatgattatctcaatagatgcagaaaaagcctttgacaaaattcaacaacccttcatgctaaaaactctcaataaattaggtattgatgggatgtatttcaaaataataagagctatctatgacaaacccacagccaatatcatactgaatgggcaaaaactggaagcattccctttgaaaactggcacaagacagggatgtcctctctcaccactcctattcaacatagtgttggaagttctgaccagggcaattaggcaggagaaggaaataaacggtattcaattaggaaaagaggaagtcaaattgtccctgtttgcagatgacatgattgtatatctagaaaaccccattgtctcagcccaaaatctccttaagctgataagcaacttcagcaaagtctcaggatacaaaatcaatgtacaaaaatcacaagcattctga

SEQ ID NO: 18439 - DNA, 3621 bp, Homo sapiens
  SIMILAR (1)..(3093): 991254mologous to Homo sapiens unknown,accession number AF148856,Smith-Waterman Score=5336.
atggtaaagggatcaattcaacaagaggagctaactatcctaaatatttatgcacccaatacaggagcacccagattcataaagcaagtcctcagtcacctacaaagagacttagactcccacacattaataatgggagactttaacaccccactgtcaacattagacagatcaacgagacagaaagtcaacaaggatacccaggaattgaactcagctctgcaccaagcagacctaatagacatctacagaactctccaccccaaatcaacagaatatacatttttttcagcaccacaccacacctattccaaaattgaccacatagttggaagtaaagctctcctcagcaaatgtaaaagaacagaaattataacaaactatctctcagaccacagtgcaatcaaactagaactcaggattaagaatctcactcaaagccgctcaactacatggaaactgaacaacctgctcctgaatgactactgggtacataacgaaatgaaggcagaaataaagatgttctttgaaaccaacgagaacaaagacaccacataccagaatctctgggacgcattcaaagcagtgtgtagagggaaatttatagcactaaatgcctacaagagaaagcaggaaagatccaaaattgacaccctaacatcacaattaaaagaactagaaaagcaagagcaaacacattcaaaagctagcagaaggcaagaaataactaaaatcagagcagaactgaaggaaatagagacacaaaaaacccttcaaaaaatcaatgaatccaggagctggttttttgaaaggatcaacaaaattgatagaccgctagcaagactaataaagaaaaaaagagagaagaatcaaatagacaaaataaaaaatgataaaggggatatcaccaccgatcccacagaaatacaaactaccatcagagaatactacaaacacctctacacaaataaactagaaaatctagaagaaatggatacattcctcgacacatacactctcccaagactaaaccaggaagaagttgaatctctgaatcgaccaataacaggctctgaaattgtggcaataatcaatagtttaccaaccaaaaagagtccaggaccagatggattcacagccgaattctaccagaggtacaaggaggaactggtaccattccttctgaaactattccaatcaatagaaaaagagggaatcctccctaactcattttatgaggccagcatcattctgataccaaagccgggcagagacacaaccaaaaaagagaattttagaccaatatccttgatgaacattgatgcaaaaatcctcaataaaatactggcaaaccgaatccagcagcacatcaaaaagcttatccaccatgatcaagtgggcttcatccctgggatgcaaggctggttcaatatacgcaaatcaataaatgtaatccagcatataaacagagccaaagacaaaaaccacatgattatctcaatagatgcagaaaaagcctttgacaaaattcaacaacccttcatgctaaaaactctcaataaattaggtattgatgggatgtatttcaaaataataagagctatctatgacaaacccacagccaatatcatactgaatgggcaaaaactggaagcattccctttgaaaaccggcacaagacagggatgccctctctcaccgctcctattcaacatagtgttggaagttctggccagggcaatcaggcaggagaaggaaataaagggtattcaattaggaaaagaggaagtcaaattgtccctgtttgcagacgacatgattgtttatctagaaaaccccatcgtctcagcccaaaatctccttaagctgataagcaacttcagcaaagtctcaggatacaaaatcaatgtacaaaaatcacaagcattcttatacaccaacaacagacaaacagagagccaaatcatgggtgaactcccattcacaattgcttcaaagagaataaaatacctaggaatccaacttacaagggatgtgaaggacctcttcaaggagaactacaaaccactgctcaaggaaataaaagaggagacaaataaatggaagaacattccatgctcatgggtaggaagaatcaatatcgtgaaaatggccatactgcccaaggtaatttacagattcaatgccatccccatcaagctaccaatgactttcttcacagaattggaaaaaactactttaaagttcatatggaaccaaaaaagagcccgcatcgccaagtcaatcctaagccaaaagaacaaagctggaggcatcacactacctgacttcaaactatactacaaggctacagtaaccaaaacagcatggtactggtacaaaaacagagatatagatcaatggaacagaacagagccctcagaaataatgccgcatatctacaactatctgatctttgacaaacctgagaaaaacaagcaatggggaaaggattccctatttaataaatggtgctgggaaaactggctagccatatgtagaaagctgaaactggatcccttccttacaccttatacaaaaatcaattcaagatggattaaagatttaaacgttaaacctaaaaccataaaaaccctagaagaaaacctaggcattaccattcaggacataggcgtgggcaaggacttcatgtccaaaacaccaaaagcaatggcaacaaaagacaaaattgacaaatgggatctaattaaactaaagagcttctgcacagcaaaagaaactaccatcagagtgaacaggcaacctacaacatgggagaaaatttttgcaacctactcatctgacaaagggctaatatccagaatctacaatgaactcaaacaaatttacaagaaaaaaacaaacaaccccatcaaaaagtgggcgaaggacatgaacagacacttctcaaaagaagacatttatgcagccaaaaaacacatgaagaaatgctcatcatcactggccatcagagaaatgcaaatcaaaaccactatgagatatcatctcacaccagttagaatggcaatcattaaaaagtcaggaaacaacagggtgaacaaggagaaaaaggagatccagctctggctggccttaatggagaaaatatgtgttcagaaacccattttgtatgcaggagatcattacagcggaagagaggctgaagaccaatctttccggcctgtggagaaagtcgagcaccagtgtgacacaaggagaaaaaccgcatttgagaaaagcattactgatgtgtttctcagaggctattacaatgccatggccttaacaacattgtactttgtcacaggaagacaattagagaaaaacattctaaaattcatatggaaccaaaaaagagccttggtagccaaagcaatcctaggcaaaaagaacaaagttggaggcatcacacttcctgacttcaaactatactacaagttcagtatggcactggtacaaaaacaagcacatagaccaacggaacaggttagagaacccagaaataaagatgcatacctacaaccatctgattttcgacaaggcttacgaaaacaagcaatggggaaaggactcattcaataa

SEQ ID NO: 18440 - DNA, 3090 bp, Homo sapiens; identical to SEQ ID NO: 7047
  SIMILAR (547)..(2625): 961254mologous to Homo sapiens putative p150,accession number U93567,Smith-Waterman Score=3410.

SEQ ID NO: 18441 - DNA, 350 bp, Homo sapiens
  SIMILAR (3)..(350): 471254mologous to Mus musculus MUS MUSCULUS GENOMIC DNA CONTAINING N ALLELE OF FV1 GENE,accession number A67510,Smith- Waterman Score=257.
gcccttggtgtgaactgtttaaagagttatacaaaataaatgcatttgacactcctgattcattgctcatgagaggcaaggagtttagtgaccctatacatcatacctttgaccatatgtggagaactaaggaacataatgaagctggttggttgctcctaagttcagtggataaagtgatgaaagaaaatgatgaactcggggattctatctcccagcttcagaagcagatactgagcctcaaatctgccaagattgccctgagtgagagtctaatctcctgtagagaaagaactgaaattgtggaaaaatagacataagctcttatcatgttagtggctgacctgcaa

SEQ ID NO: 18442 - DNA, 481 bp, Homo sapiens
  misc_feature (1)...(481): n = a,t,c or g
agctcgtacataagctcctactttaactggaggacaacaatgatgttttgggtcccctggaatcaacgtcagctcaaagccagtgtccagtagtccccaaagtgtctgatcattcccctcttcccagtgcacagttatcctggtaaaaggccctaggtctccttggggaaggatgaggtaaagattcactgcataaattgtcaataaagtagtacttcctcaagggggcccagcctccccttcattgaaggggttctgggtctataaactggctcaagtctggaaattgattgaggggccatgattccctatttttataattcaaattagtcttttgtctatttgacctagaagttttctgtttgtataaattaagtaggaatgcagtaggcttcctatcagtttcacttctagcggacgcgtnnnnnacccggnanttccnnnccngtcgctcatgcgtacgaanatcaggangagccat

SEQ ID NO: 18443 - DNA, 3274 bp, Homo sapiens
  SIMILAR (1)..(3096): 971254mologous to Homo sapiens unknown,accession number AF149422,Smith-Waterman Score=5241.
atggtaaagggatcaattcaacaagaggagctaactatcctaaatatttatgcacccaatacaggagcacccagattcataaagcaagtcctgagtgacctacaaagagacttagactcccacacattaataatgggagactttaacaccccactgtcaacattagacagatcaacgagacagaaagtcaacaaggatacccaggaattgaactcagctctgcaccaagcagacctaatagacatctacagaactctccaccccaaatcaacagaatatacatttttttcagcaccacaccacacctattccaaaattgaccacatacttggaagtaaagctctcctcagcaaatgtaaaagaatagaaattataacaaactatctctcagaccacagtgcaatcaaactagaactcaggattaagaatctcactcaaagccgctcaactacatggaaactgaacaacctgctcctgaatgactactgggtacataacgaaatgaagacagaaataaagatgttctttgaaaccaacgagaacaaagacaccacataccagaatctctgggacgcattcaaagcagtgtgtagagggaaatttatagcactaaatgcctacaagagaaaggaggaaagatccaaaattgacaccctaacatcacaattaaaagaactagaaaagcaagagcaaagacattcaaaacctagcagaaggcaagaaataactaaaatgagagcagaactgaaggaaatagagacacaaaaaacccttcaaaaaatcaatgaatccagtagctggttttttgaaaggatcaacaaaattgatagaccgctagccagactaataaagaaaaaaagagagaagaatcaaatagacacaataaaaaatgataaaggggatatcaccaccgatcccacagaaatacaaactaccatcagagaatactacaaacacctctacacaaataaactagaaaatctagaagaaatggatacattcctcgacacatacactctcccaagactaaaccaggaagaagttgaatctctgaatagaccaataacaggctctgaaattgtggcaataaccaatagcttaccaaccaaaaagagtccaggaccagaaggattcacagccgaattctaccagaggtacaaggaggaattggtaccattccttctgaaactattccaatcaatagaaaaagagggaatcctccctaactcattttatgaagccagcatcattctgataccaaagccgggcagagacacaaccaaaaaagagaattttagaccaatatccttgataaacattgatgcaaaaatcctcaataaaatactggcaaaccgaatccagcagcacatccaaaagcttatccaccatgatcaagtgggcttcatccctgggatgcaaggctggttcaatatacgcaaatcaataaatgtaatccagcatataaacagagccaaagacaaaaaccacatgattatctcaatagatgcagaaaaagcctttgacaaaattcaacaacgcttcatgctaaaaactctcaataaattaggtattgatgggacgtatttcaaaataataagagctatctatgacaaacccacagccaatatcatactgaatgggcaaaaactggaagcattccctttcaaaactggcacaagacagggatgccctctctcaccactcctattcaacatagtgttggaagttctggccagggcaatcaggcaggagaaggaaataaagggtattcaattaggaaaagaggaagtcaaattgtccctgtttgcagacgacatgattgtttatctagaaaaccccatcgtctcagcccaaaatctccttaagctgataagcaacttcagcaaagtctcaggatacaaaatcaatgtacaaaaatcacaagcattcttatacaccaacaacagacaaacagagagccaaatcatgagtgaactcccattcacaattgcttcaaagagaataaaatacctaggaatccaatttacaagggatgtgaaggacctcttcaaggagaactacaaaccactgctcaaggaaataaaagaggacacaaacaaatggaagaacattccatgctcacgggtaggaagaatcaatatcgtgaaaatggccatactgcccaaggtaatttacagattcaatgccatccccatcaagctaccaatgactttcttcacagaattggaaaaaactactttaaagttcatatggaaccaaaatagagcccgcatcgccaagtcaatcctaagccaaaagaacaaagctggaggcatcacactacctgacttcaaactatactacaaggctacagtaaccaaaacagcatggtactggtaccaaaacagagatatagatcaatggaacagaacagagccctcagaaataatgccgcatatctacaactgtctgatctttgacaaacctgagaaaaacaagcaatggggaaaggattccctatttaacaaatggtgctgggaaaactggctagccatatgtagaaagctgaaactggatcccttccttacaccttataccaaaatcaattcaagatggattaaagatttaaacgttagacctaaaaccataaaaaccctagaagaaaacctaggcattaccattcaggacataggcgtgggcaaggacttcatgtccaaaacaccaaaagcaatggcaacaaaagccaaaattgacaaatgggatctaattaaactaaagagcttctgcacagcaaaagaaactaccatcagagtgaacaggcaacctacaacatgggagaaaattttcgcaacctactcatctgacaaagggctaatatccagaatctacaatgaactcaaacaaatttacaagaaaaaaacaaataaccccatcaaaacgtgggcgaaggacatgaacagacacttctcaaaagaagacatttatgcagccaaaaaacacatgaagaaatgctcatcatcactggccatcagagaaatgcaaatcaaaaccactatgagatatcatctcacaccagttagaatggcaatcattaaaaagtcaggaaacaacaggtggaatattggtggacttgtccccaagttaaattatgatttaaagagacacttagaaaaagaggaaaagcctactaaaactgagcaggctatcagcaaagacaaaaatgcagagaagaacaaccgtttatctcttcagggagaaattattattgcaattatattgataacagaacctgggt

SEQ ID NO: 18444 - DNA, 2432 bp, Homo sapiens
  SIMILAR (1084)..(2430): 941254mologous to Homo sapiens putative p150,accession number U93564,Smith-Waterman Score=2244.
atggaagacgaaatgaatgaaatgaagcgagaagggaagtttagagaaaaaagaataaaaagaaatgaacaaagccaccaagaaatatgggactatgtgaaaacaccaaatctacgtctgattggtgtacctgaaactgacggggagaatggaaccaagttggaaaacactctgcaggatattatccaggagaacttccccaatctagcaaggcaggccaacattcagattcaggaaatacagagaacaccacaaagatactcctcgagaagagcaactccaagacacataatcatcagattcaccaaagttgaaatgaaggaaaaaatgttaagggcagccagagagaaaggtcaagttacccacaaagggaagcccatcagactaaaagcggatctctcggcagaaactctacaagccagaagacagagctggttttttgaaaagatcaacaaaatcgatagaccacaagcaagactaataaagaagaaaagagagaagaatcaaatagacacaataaaaaatgataaaggggatatcaccaccgatcccacagaaatacaaattaccatcagagaatactacaaacacctctatgcaaataaactagaaaatctagaagagatggataaattcctcgacacatacaccctcccaagactaaaccaggaagaagttgaatctgtgaatagaccaataacaggctctgaaattgaggcaataaccaatagcttaccaaccaaaaaaagtccaggaccagatggattcacagccgaattctaccagaggtacaaggaggagctggtaccattccttctgaaactattccaaccaatagaaaaagagggaatcctccctaactcattttatgaggccagcatcatcctgataccaaaacctggcagagacacaaccaaaaaagggaattttagaccaatatccttgatgaacattgatgcaaaaatcctcaataaaatactggcaaaccaaatccagcagcacatcaaaaagcttatccaccatgatcaagtgggcttcatccctgggatgcaaggctgtgttggaagttctggccagggcaataggcaggagaaggaaataaagggtattcaattaggaaaagaggaagtcaaattgtccctgtttgcagatgacatgattgtatatctagaaaaccccactgtctcagcccaaaatctccttaagctgataagcaacttcagcaaagtctcaggatacaaaatcaatgtacaaaaatcacaagcattcttatacaccaacaacagacaaacggagagccaaatcatgagtgaactcccattcacaattgcttcaaagagaataaaatacctaggaatccaacttacaagggatgtgaaggacctcttcaaggagaactacaaaccactgctcaatgaaataaaagaggatacaaacaagtggaagaacattccatgctcatggataggaagaatcaatatcgtgaaaatggccatactgcccaaggtaatttatacattcaatgccatccccatcaagctaccaatgactttcttcacagaattggaaaaaactactttaaagttcatatggaaacaaaaaagatcccacatcgccaagtcaatcctaagccaaaagaacaaagctggagacatcacactacctgacttcaaactacactacaaggctacagtaaccaaaacagcatggtactggtaccaaaacagagatatagatcaatggaacacaacagagccctcagaaataatgctgcatatctacaaccatctgatctttgacaaacctgacaaaaacaagcaatggggaaatgattccctatttaataaatggtgctgggaaaactggctagccatatgtagaaagctgaaactggatcccttccttacatcttatacaaaaatcaattcaagatggattaaagacttaaatgttagacctaaaaccataaaaaccctagaagaaaacctaggcaataccattcaggacataggcatgggcaaggacttcatgtctaaaacaccaaaagcagtggcaacaaaagccaaaattgacaaatgggatgtaattaaactaaagagcttctgcacagcaaaggaaactaccatcagagtgaacaggcaacctacagaatgggagaaaattttcgcaacctactcatcggacaaagggctaatatccagaatctacaatgaactcaaacaaatttacaagaaaaaaacaaacaaccccatcaaaaagtgggcaaaggatatgaacagacacttctcaaaagaagacatttatgcagccaaaagacacatgaaaaaatgctcatcatcactggccatcagagaaatgcaaatcaaaaccacaatgagataccatctcacaccaattagaatggtgatcattaaaaagtcaggaaacaacag

SEQ ID NO: 18445 - DNA, 3255 bp, Homo sapiens; identical to SEQ ID NO: 14893
  SIMILAR (1)..(3093): 991254mologous to Homo sapiens unknown,accession number AF148856,Smith-Waterman Score=5349.

SEQ ID NO: 18446 - DNA, 3139 bp, Homo sapiens; identical to SEQ ID NO: 17177
  SIMILAR (1)..(2961): 981254mologous to Homo sapiens unknown,accession number AF149422,Smith-Waterman Score=5090.

SEQ ID NO: 18447 - DNA, 3213 bp, Homo sapiens; identical to SEQ ID NO: 2322
  SIMILAR (1)..(1821): 851254mologous to Homo sapiens putative p150,accession number U93563,Smith-Waterman Score=2589.

SEQ ID NO: 18448 - DNA, 3348 bp, Homo sapiens; identical to SEQ ID NO: 6068
  SIMILAR (1)..(3093): 981254mologous to Homo sapiens unknown,accession number AF149422,Smith-Waterman Score=5291.

SEQ ID NO: 18449 - DNA, 3156 bp, Homo sapiens; identical to SEQ ID NO: 10078
  SIMILAR (1)..(3036): 941254mologous to Homo sapiens putative p150,accession number U93563,Smith-Waterman Score=4979.

SEQ ID NO: 18450 - DNA, 3325 bp, Homo sapiens; identical to SEQ ID NO: 10079
  SIMILAR (1)..(3156): 951254mologous to Homo sapiens putative p150,accession number U93565,Smith-Waterman Score=5296.

SEQ ID NO: 18451 - DNA, 3145 bp, Homo sapiens; identical to SEQ ID NO: 17181
  SIMILAR (1)..(2958): 971254mologous to Homo sapiens unknown,accession number AF148856,Smith-Waterman Score=5040.

SEQ ID NO: 18452 - DNA, 548 bp, Homo sapiens; identical to SEQ ID NO: 3869
  SIMILAR (154)..(546): 751254mologous to Mus musculus Pro-Pol-dUTPase polyprotein,accession number Y12713,Smith-Waterman Score=481.

SEQ ID NO: 18453 - DNA, 3229 bp, Homo sapiens; identical to SEQ ID NO: 14519
  SIMILAR (1)..(3003): 971254mologous to Homo sapiens unknown,accession number AF149422,Smith-Waterman Score=5062.

SEQ ID NO: 18454 - DNA, 3352 bp, Homo sapiens; identical to SEQ ID NO: 14901
  SIMILAR (1)..(2748): 971254mologous to Homo sapiens unknown,accession number AF149422,Smith-Waterman Score=4641.

SEQ ID NO: 18455 - DNA, 1968 bp, Homo sapiens
  SIMILAR (1)..(1287): 931254mologous to Homo sapiens putative p150,accession number U93563,Smith-Waterman Score=2052.
atgggagactttaacaccccactgtcaacatcagacagatcaacaagacagaaagttaacaaggatacccaggaaatgaactcagctctgcaccaagcggacctaatagacatctacagaactcgccaccccaaatcaacagaatatacatttctttcagcaccacaccacacctattccaaaactgaccacatactgggaagtaaagctctcctcagcaaatgtaaaagaacagaaatgataacaaactatctctcagaccacagtgcaatcaaactagaactcaggattaagaaactcactcaaaactgctcaactacatggaaactgaacaacttgctcctgaatgactactgggtacataacgaaatgaaggcagaaagaaagatgttctttgaaaccattgagaacaaagacacaacataccagaatctctgggatgcattcaaagcagtgtgtagagggaaatttatagcactaaatgcccacaagagaaagcaggaaagatccaaaattgacaccctaacatcacaattaaaagaactagaaaagcaagagaaaacacattcaaaaactatcagaaggcaagaaataactaaaatcagagcagaactgaaggaaatagagacacaaaaaacccttcaaaaaattaatgaatccaggagctggttttttgaaaggatcaacaaaattgatagaacactagcaagactaataaagaagaaaagagagaagaatcaaatagacagaataaaaaatgataaaggggatatcaccaccgatcccacacaaatacaaactaccatcagagaatactacaaacacctctacgcaaataaaccagaaaatctagaagaaatggataaattcctcgacacgtataccctcccaagactaaaccaggaagaagttgaatctctgaatagaccaatatcaggctctgaaattgtggcaataatcaatagcttaccaatcaaaaagagtccaggaccagatggattcacagccgaattctaccagagttacaagaaggaactggtaccactgcttctgaaactattccaatcaatagaaaaagagggaatcctccctaactctttttatgaggccagcatcatcctgttaccaaagcggggcagagacacaaccaaaaaagagaatttcagaccaatatccttgatgaacattgatgcaaaaatcctcaataaaatactggcaaaacgaatccagcagcacatcaaaaagcttatccaccatgatcaagtgggcttcatccctgggatgcaagagaataaaatacctaggaatccaacttacaagggacatgaaggacctcttaaaggagaactacaaacaactgctcaacgaaataaaagaggatacaaacaaatggaagaacattccatgctcatgggtaggaagaatcaatattgtgaaaatggccatactgcccaagaattggaaaaaactactttaaagttcatatggaaccaaaaaagagcctgcattgccaagtcaatcctaagccaaaagaagaaagctggaggcatcacgctacctgacttcaaactatactacaaggctacagtaaccaaaacagcacggctgtatacgaagcatggcaccagcatctgctgcggaagcttcggggagcttttacccatgcagaaggccaagcgagagcttgcacatcacatggcaaaagcaggagcaagagtcaaggggcagctcggccatgtgactcaacatcagcttgggtctattgaatggttcaataaatattcactgagcacctactacacagtagacaccaagccgcagttttctcatccaactaaggataataaaacaggtctgacatgtagaaacagaaccacagtaggtgtggacctgcaagctaaaggaaatttagttgtgaagcatctttccagcttgcaacattgttatgaatttatttgccacatttag

SEQ ID NO: 18456 - DNA, 3099 bp, Homo sapiens; identical to SEQ ID NO: 13948
  SIMILAR (1)..(2922): 961254mologous to Homo sapiens unknown,accession number AF148856,Smith-Waterman Score=4909.

SEQ ID NO: 18457 - DNA, 3303 bp, Homo sapiens; identical to SEQ ID NO: 10101
  SIMILAR (1)..(3156): 961254mologous to Homo sapiens putative p150,accession number U93565,Smith-Waterman Score=5371.

SEQ ID NO: 18458 - DNA, 3095 bp, Homo sapiens; identical to SEQ ID NO: 14743
  SIMILAR (1)..(2958): 961254mologous to Homo sapiens putative p150,accession number U93563,Smith-Waterman Score=4954.

SEQ ID NO: 18459 - DNA, 2678 bp, Homo sapiens
  SIMILAR (248)..(2326): 961254mologous to Homo sapiens putative p150,accession number U93563,Smith-Waterman Score=3410.
accaaatctacgtctgattggtgtacctgaaactaacggggagaatggaaccaagttggaaaacactctgcaggatattatccaggagaacttccccaatctagcaaggcaggccaacgttcagaatcaggaaatacagagaacaccacaaagatactcctcgagaagagcaactccacgacacataattgtcagattcaccaaagttgaaatgaaggaaaaaatgttaagggcagccagagagaaagcaccacaccacacctattccaaaattgaccacatacttggaagtaaagctctcctcagcaaatgtaaaagaacagaaattataacaaactatctctcagaccacagtgcaatcaaactagaactcaggattaagaatctcactcaaaaccgctcaactacatggaaactgaacaacctgctcctgaatgactactgcgtacataacgaaatgaaggcagaaataaagatgttctttgaaaccaacgagaacaaagacacaacataccagaatctctgggacgcattcaaagcagtgtgtagagggaaacttatagcactaaatgcccacaagagaaagcaggaaagatccaaaattgacaccctaacatcacaattaaaagaactagaaaagcaagagcaaacacattcaaaagctagcagaaggcaagaaataactaaaatcagagcagaactgaaggaaatagagacacaaaaaacccttcaaaaaattaatgaatccaggagctggttttttgaaaggatcaacaaaatatatagaccactagcaagactaataaagaaaaaaagagagaagaatcaaatagacgcaataaaaaatgataaaggggatatcaccaccgatcccacagaaatacaaattaccatcagagaatactacaaacacctctatgcaaataaactagaaaatctagaagaaatggataaattcctcaacacatacactctcccaagactaaaccaggaagaagttgaatctctgaatagaccaataacaggatctgaaattgtggcaataatcaatagcttaccaaccaaaaagagtccaggaccagatggattctcagccgaattctaccaaaggtacaaggaggaactggtaccattccttctgaaactattccaatcaatagaaaaagagggaatcctccctaactcattttatgaggccagcatcattctgataccaaagccgggcagagacacaaccaaaaaagagaattttagaccaatatccttgatgaacattgatgcaaaaatcctcaataaaatactggcaaaacgaatccagcagcacatcaaaaagcttatccaccatgatcaagtgggcttcatccctgggatgcaaggctggttcaatatatgcaaatcaataaatgtaatccagcatataaacagagccaaagacaaaaaccacatgattatctcaatagatgcagaaaaggcctttgacaaaattcaacaacccttcctgctaaaaactctcaataaattaggtattgatgggtcgtatttcaaaataataagagctatctatgacaaacccacagccaatatcatactgaatgggcaaaaactggaagcattccctttgaaaactggcacaagacagagatgccctctctcaccactcctattcaacatagtgttggaagttctggccagggcaatcaggcaggagaaggaaataaagggtattcaattaggaaaagaggaagtcaaattgtccctgtttgcagacgacatgattgtatatctagaaaaccccactgtctcagcccaaaatctccttaagctgataagcaacttcagcaaagtctcaggatacaaaatcaatgtacaaaaatcacaagaattcttatacaccaacaacatacaaacagagagtcaaatcatgagtgaactcccattcacaattgcttcaaagagaataaaatacctaggaatccaacttacaagggatgtgaagaacctcttcaaggagaactacaaaccactgctcaatgaaataaaagaggatacaaacaaatggaagaacattccatgctcatgggtaggaagaatcaatatcgtgaaaatggccatactgcccaaggtaatttacagattcaatgccatccccatcaagctaccaatgcctttcttcacagaattggaaaaagctactttaaagttcatatggaaccaaaaaagagcccgcattgccaagtcaatcctaagccaaaagaacaaagctggaggcatcacactacctgacttcaaactatactacaaggctacagtaaccaaaacagcatggcttcagcacgcagtgccggctaatgatggcaccacaagatccccatcaatagacagcattcagaaggaccccagcgagtttgcctggcgtgatcctgagttgcctgaggtcattcacatccttcagcaccagttcccatctgttcaggcaaatgcagcagcctacctgcagcacctgtggtttggtgacaacaacgtgaagatgaaggtgtgtaggttatggggaatcaagcttctggtttaccttttgggccacagagttttggaagttcagaagaatgcttgtgatgcccttcgaaatctctttttcggcaagtctacaggtgaaaataaaataacaatgaaggatgttg

SEQ ID NO: 18460 - DNA, 2481 bp, Homo sapiens
  SIMILAR (1)..(1065): 971254mologous to Homo sapiens putative p150,accession number U93563,Smith-Waterman Score=1768.
atgaaggcagaaataaagatgctctttgaaaccaaggagaacaaagacaccacataccagaatctctgggacgcattaaaagcagtgtgtagagggaaatttatagcactaaatgcccacaagagaaagcaggaaagatccaaaattgacaccctaacatcacaattaaaagaactagagaagcaagagcaaacactttcaaaagctagcagaaggcaagaaataactaaaatcagagcagaactgaaggaaatagagacacaaaaaacccttcaaaaaattaatgaatccaggagctggttttttgaaaggatcaacaaaattgatagaccgctagcaagactaataaagaaaaagagagagaagaatcaaatagacgcaataaaaaatgataaaggggatatcaccaccgatcccacagaaatacaaactaccatcagagaatactacaaacacctctacgcaaataaactagaaaatctagaagaaatggataaattcctcgacacatacactcttccaagactaaaccaggaagaagttgaatctctgaatagaccaataacaggagctgaaattgtggcaataatcaatagtttaccaaccaaaaagagtccaggaccagatggattcacagccgaattctatcagaggtacaaggaggaactggtaccattccttctgaaactattccaatcaatagaaaaagagggaatcctccctaactcattttatgaggccagcatcattctgataccaaagccgggcagagacacaaccaaaaaagagaattttagaccaatatccttgatgaacattgatgcaaaaatcctcaataaaatactggcaaaccgaatccagcagcacatcaaaaagcttatccaccatgatcaggtgggcttcatccctgggatgcaaggctggttcaatatacgcaaatcaataaatgtaatccagcatataaacagagccaaagacaaaaaccacatgattatctcaatagatgcagaaaaagcctttgacaaaattcaacaacccttcatgctaaaaactctcaagaaattagagaataaaatacctaggaatccaacttacaaaggatgtgaaggacttcttcaaggagaactacaaaccactgctcaaggaaataaaagaggatacaaacaaatggaagaacattccatgctcatgggtaggaagaatcaatatcgtgaaaatggccatactgcccaagaattggaaaaaactactttaaagttcatatggaaccaaaaaagagcctgcatcgccaaggcaatcctaagccaaaagaacaaagctggaggcatcacactacctgacttcaaactatactacaaggctacagtaaccaaaacagcatggtactggtaccaaaacagagatatagatcaatggaacagaacagagacctcagaaataacgccgcatatctacaactatccaatctttgacaaacctgagaaaaacaagcaatggggaaaggattccctatttaataaatggtgctgggaaaactggctagccctatgtagaaagctgaaactggatcccttccttacaccttatacaaaaatcaattcaagatggattaaagacttaaacgttagacctaaaaccataaaaaccctagaagaaaacctaggcatcaccattcgggacataggcatgggcaaggacttcatgtccaaaacatcaacagcaatggcaacaaaagccaaaattgacaaatgggatctaattaaactaaagagcttctgcacagcaaaagaaactaccatcagagtgaacaggcaacctacaaaatgggagaaaattttcgcaacctactcatctgacaaagggctaatatccagaatctacaatgaactcaaacaaatttacaagaaaaaaacaaacaaccccatcaaaaagtgggcgaaggacatgaacagacacttctcaaaagaagacatttatgcagccaaaaaacacatgaaaaaatgctcatcatcactggccatcagagaaatgcaaatcaaaaccacaatgagataccatctcacaccagttagaatggcgatcattaaaaagtcaggaaacaacagaacaccaacccgacccatacaaacatctcatctctcagctgcatgcttgaagctgaacgctacagcagcagagacttctatttcctctagaatagcccctcgagtggccagtctacttctgacaagactctacctctgctccagagttgaagccccaggcagggcattcagtggccaagcctcggatacctggctatatccaccaagcaccagccagaagaaatatccagtccctttagttcctgaagtgggagatggggctctgcctcctaccaagattcaacactgtggggatccttcaaaacaagaagggagtttagatgtgggaggggaaaaaaccaaagccaaaccaaacagaagtctactactgttctaa

SEQ ID NO: 18461 - DNA, 3507 bp, Homo sapiens; identical to SEQ ID NO: 14588
  SIMILAR (1)..(3249): 981254mologous to Homo sapiens unknown,accession number AF148856,Smith-Waterman Score=5590.

SEQ ID NO: 18462 - DNA, 3121 bp, Homo sapiens
  SIMILAR (699)..(2924): 921254mologous to Homo sapiens putative p150,accession number U93563,Smith-Waterman Score=3519.
agcacccagattcataaagcaagtcctgagtgacctacaaagagacttagactcccacacaataataatgggagactttaacaccccactgtcaacattagacagatcaacaagacagaaagtccacaaggatacccaggaattgaactcagctctgcaccaagcggacctaatagacatctacagaactctccaccccaaatcaacagaatatacatgtttttcagcaccacaccacacctattccaaaattgaccacatagttggaagtaaagcactcctcagcaaatgtaaaagatcagaaattataacaaactgtctctcagaccacagtgcaatcaaactagaactcaggattaagaaactcactcaaaaccgctcaactacatggaaactgaacaacctgctcctgaatgactactgggtacataacgaaatgaaggcagaaataaggatgttctttgaaaccaacgagaacaaagacacaacataccagaatctctgggacacattcaaagcagtgtgtagagggaaatttatagcactaaatgcccacaagagaaagcaggaaagatccaaaattgacaccctaacatcacaattaaaagaactagaaaagcaagagcaaacacattcaaaagctagcagaaggcaagaaataactaaaatcagagcagaactgaaggaaatagagacacaaaaaaccctttcaaaaaattaatgaattccaggagctggtttttttgaaaggatcaacaaaattgatagaccgctagcaagactaataaagaaaaaaagagagaagaatcaaatagacggcaataaaaaatgataaaggggatatcaccactgatcccacagaaatacaaactaccatcagagaatactacaaacacctctacgtaaataaactagaaaatctagaagaaatgaataaattcctcgacacatgcactctcccaagactaaaccaggaagaagttgaatctctgaatagaccaataacaggagctgaaattgtggcaattatcaatagtttaccaaccaaaaagaatccaggaccagatggattaacagccgaattctaccagaggtacaaggaggaactggtaccattccttctgaaactattccaatcaatagaaaaagagggaatcctccctaactcattttatgaggccagcatcattctgataccaaagccgggcagagacacaaccaaaaaagagaattttagaccaatatccttgacgaacattgatgcaaaaatcctcaataaaatactggcaaaccgaatccagcagcacatcaaaaagcttatccaccatgatcaagtgggcttcatccctgggatggaaagctggttcaatatacgcaaatcaataaatgtaatccagcatataaacagagccaaagacaaaaaccacatgattatctcaatagatgcagaaaaggcctttgacaaaattcaacaacccttcatgctaaaaactctcaataaattaggtattgatgggacgtatttcaaaataataagagctatctatgacaaacccacagccaatatcatactgaatgggcaaaaactggaagcattccctttgaaaactggcacaagacagggatgccctctctcactgctcctattcaacatagtgttggaagttctggccagggcaatcaggcaggagaaggaaataaagggtattcaattaggagaggaagtcacattgtccctgtttgcagacgacatgattgtttatctagaaaaccccattgtctcagcccaaaatctccttaagctaataagcaccttcagcaaagtctcaggatacaaaatcaatgtacaaaaatcacaagcattcttatacaccaacaacagacaaacagagagccaaatcatgagtgaactcccattcacaattgcttcaaagagaataaaatacctaggaatcctacttacaagggatgtgaaggacctcttcaaggagaactacaaaccactgctcaaggaaataaaagaggatacaaacaaatggaagaacattccatgctcatgggtaggaagaatcaatatcgtgaaaatggccatactgcccaaggtaatttacagattcaatgccatctccatcaagctaccaatgactttattcacagaattggaaaaaactactttaaagttcatatggaagcaaaaaagagcccgcatcgccaagtcaatcctaagccaaaagaagtgtgctggaggcatcacactacctgacttcaaactatactgcaaagctacagtaaccaaaacagcatggtactggtaccaaaacagagatatagatcaatggaacagaacagatccctcagaaataacgccgcatacctacaactatctgatctttgacaaacctgagaaaaacaagcaatggggaaaggattccctatttaataaatggtgctgggaaaactggctagccatatgtagaaagctgaaactggatcccttccttacaccttatacaaaaatcaattcaagatggattaaagatttaaacattagacctaaaaccataaaaaccctagaagaaaacctaggcattaccattcaggacataggcatgggcaaggacttcatgtccaaaacaccaaaagcaatggcaacaaaagccaaaattgacaaatgggatctaattaaactaaagagcttctgcacagcaaaagaaactaccatcagagtgaacaggcaacctacaacatgggagaaaattttcgcaacctactcatctgacaaagggctaatatccagaatctacaatgaactcaaacaaatttacaagaaaaaaacaaacaaccccatcaaaaagtgggcgaaggatatgaacagacacttctcaaaagaagacatttatgcagccaaaaaacacatgaaaaagatggtgatgtacagatgggtttttggtgtggatgtcctttctgtttgttagttttccttctaacagacaggaccctcagctgcaggtctgttggagtttgctagaggtccactccagaccctgtttgcctgggtaccagcagtggtgtctgcagaacagcagattttcatgaaccgtgaatgctgctgtctgatcgt

SEQ ID NO: 18463 - DNA, 1077 bp, Homo sapiens
  SIMILAR (553)..(927): 491254mologous to Mus musculus Pro-Pol-dUTPase polyprotein,accession number Y12713,Smith-Waterman Score=308.
ttttgcccctgccctaaagatttgtggaactttgaacttgagagagatgatttagggtatctggtggaagaagtttctaagcagcaaagcattcaagaggtgacttgggtgctgttaaaggcattcagttttataagggaagcagagcataaaaggttggaaaatttgcagcctgataatgtgatagaaaagaaaatcctattttctgaggagaaatttaagctggctgcaaaaatttggataagtaatgaggagctgaatattaatccccaagacaatggggaaaatgtctgcagggcatgtcagaggtcttcacagcagctcctcctgtcacagacctggaggcctagaaggaaaaaatggtttcatggtctgggcccaaggcccccttgctctgtgcagcctaaggacttggtgccttgcgtcccagccactccagccatggctaaaaggggccaaggtacagtttgagccattgcttcagagagtgcaagccccaaggcttggcagcttccatgtggtgctgctcagcaatttgcagccctgcctggattgggtaattataaattcccactgaccttaatcacagggtatggtagtaataagagccccccctagggatatcttgtattccagacatactcgtccttacctctattaagattgccacctggacactttgggttcctcctacctttaagtcaacaggctaagaagggagttacagtgttggctggggtgattgacccagactatcaagatgaaatcagtctaccactccacaacagaggtaaggaagagtatgcatggaatacaggagatccattagggcatctcttagtattaccatgccctgaatccactccagatggttcagcccaattggcactaccagtggttcccatgggacaggatcagagtgggcttcccatggagattctcagactaatggggaaatcaaatgccaacctccagttctctcctccaacttccaataaagtggatctgtaaaaattctctgtgagtggcattatgacagcttaaaaggagatggtggagcagtctgaaataattgtt

SEQ ID NO: 18464 - DNA, 2373 bp, Homo sapiens
  SIMILAR (196)..(2298): 971254mologous to Homo sapiens putative p150,accession number U93567,Smith-Waterman Score=3519.
atgtcaagtgaatgggagtggttgaggtgctcagaagttaaaggtcagagagacgtgaggccagggtgtttggggtgggactttcgtgtgtatattgttgaggacacccaggatgaggacagaacttggagtgtcaaggaagcctgtgagctggtccttagagttcaggaaatgatcatcacaagggtggtagatgctgcaccacaccacacctattccaaaattgaccacatagttggaagtaaagctctcctcagcaaatgtaaaagaacagaaattataacaaactgtctctcagaccacagtgcaatcaaactagaactcaggattaagaatctcactcaaagccgctcaactacatggaaactgaacaacctgctcctgaatgactactgggtacataacgaaatgaaggcagaaataaagatgttctttgaaaccaacgagaacaaagacaccacataccagaatctctgggacgcattcaaagcagtgtgtagagggaaatttatagcactaaatgcctacaagagaaagcaggaaagatccaaaattgacaccctaacatcacaattaaaagaactagaaaagcaagagcaaacacattcaaaagctagcagaaggcaagaaataactaaaatcagagcagaactgaaggaaatagagacacaaaaaacccttcaaaaaatcaatgaatccaggagctggttttttgaaaggatcaacaaaattgatagaccgctagcaagactaataaagaaaaaaagagagaagaatcaaatagacgcaataaaaaatgataaaggggatatcaccaccgatcccacagaaatacaaactaccatcagagaatactacaaacaactctacgcaaataaactagaaaatctagaagaaatggatacattcctcgacacatacactctcccaagactaaaccaggaagaagttgaatctctgaatagaccaataacaggctctgaaattgtggcaataatcaatagtttaccaaccaaaaagagtccaggaccagatggattcacagccgaattctaccagaggtacaaggaggaactggtaccattccttctgaaactattccaatcaatagaaaaagagggaatcctccctaactcattttatgaggccagcatcattctgataccaaagccaggcagagacacaaccaaaaaagagaattttagaccaatatccttgatgaacattgatgcaaaaatcctcaataaaatactggcaaaccgaatccaacagcacatcaaaaagcttatccaccatgatcaagtgggcttcatccctgggatgcaaggctggttcaatatacgcaaatcaataaatgtaatccagcatataaacagagccaaagacaaaaaccacatgattatctcaatagatgcagaaaaggcctttgacaaaattcaacaacccttcatgctaaaaactctcaataaattaggtattgatgggacgtatgtcaaaataataagagctatctatgacaaacccacagccaatatcatactgaatgggcaaaaactggaagcattccctttgaaaactggcacaagacagggatgccctctctcaccgctcctattcaacatagtgttggaagttctggccagggcaatcaggcaggagaaggaaataaagggtattcaattaggaaaagaggaagtcaaattgtccctgtttgcagacgacatgattgtttatctagaaaaccccatcgtctcagcccaaaatctccttaagctgataagcaacttcagcaaagtctcaggatacaaaatcaatgtacaaaaatcacaagcattcttatacaccaacaacagacaaacagagagccaaatcatgggtgaactcccattcacaattgcttcaaagagaataaaatacctaggaatccaacttacaagggatgtgaaggacctcttcaaggagaactacaaaccactgctcaaggaaataaaagaggatacaaacaaatggaagaacattccatgctcatgggtaggaagaatcaatatcgtgaaaatggccatactgcccaaggtaatttatagattcaatgccatccccatcaagctaccaatgactttcttcacagaattggaaaaaactactttaaagttcatatggaaccaaaaaagagcccgcattgccaagtcaatcctaagccaaaagaacaaagctggaggcatcacactacctgacttcaaactatactacaaggctacagtaaccaaaacagcatgttcatgggatctgcagggttggttccttctggaggctctgagggagaaactgtcttatgcctctctcctagcttctaatgattgtcggcagtctttg

SEQ ID NO: 18465 - DNA, 3813 bp, Homo sapiens; identical to SEQ ID NO: 14516
  SIMILAR (1)..(3135): 971254mologous to Homo sapiens unknown,accession number AF148856,Smith-Waterman Score=5279.

SEQ ID NO: 18466 - DNA, 4107 bp, Homo sapiens
  SIMILAR (1)..(2967): 991254mologous to Homo sapiens unknown,accession number AF149422,Smith-Waterman Score=5125.
atgggagactttaacaccccactgtcaacattagacagatcaacgagacagaaagtcaacaaggatacccaggaattgaactcagctctgcaccaagcagacctaatagacatctacagaactctccaccccaaatcaacagaatatacatttttttcagcaccacaccacacctattccaaaattgaccacatagttggaagtaaagctctcctcagcaaatgtaaaagaacagaaattataacaaactatctctcagaccacagtgcaatcaaactagaaatcaggattaagaatctcactcaaagccactcaactacatggaaactgaacaacctgctcctgaatgactactgggtacataacgaaatgaaggcagaaataaagatgttctttgaaaccaacgagaacaaagacaccacataccagaatctctgggacgcattcaaagcagtgtgtagagggaaatttatagcactaaatgcctacaagagaaagcaggaaagatccaaaattgacagcctaacatcacaattaaaagaactagaaaagcaagagcaaacacattcaaaagctagcagaaggcaagaaataactaaaatcagagcagaactgaaggaaatagagacacaaaaaacccttcaaaaaatcaatgaatccaggagctggttttttgaaaggatcaacaaaattgatagaccactagcaagactaataaagaaaaaaagagagaagaatcaaatagacacaataaaaaatgataaaggggatatcaccaccgatcccacagaaatacaaactaccatcagagaatactacaaacacctctacgcaaataaactagaaaatctagaagaaatggatacattcctcgacacatacactctcccaagactaaaccaggaagaagttgaatctctgaatagaccaataacaggctctgaaattgtggcaataatcaatagtttaccaaccaaaaagagtccaggaccagatggattcacagccgaattctaccagaggtacaaggaggaactggtaccattccttctgaaactattccaatcaataggaaaagagggaatcctccctaactcattttatgaggccagcatcattctgacaccaaagccgggcagagacacaaccaaaaaagagaattttagaccaatatccttgatgaacattgatgcaaaaatcctcaataaaatactggcaaaccgaatccagcagcacatcaaaaagcttatccaccatgatcaagtgggcttcatccctgggatgcaaggctggttcaatatacgcaaatcaataaatgtaatccagcatataaacagagccaaagacaaaaaccacatgattatctcaatagatgcagaaaaagcctttgacaaaattcaacaacccttcatgctaaaaactctcaataaattaggtattgatgggacgtatttcaaaataataagagctatctatgacaaacccacagccaatatcatactgaatgggcaaaaactggaagcattccctttgaaaactggcacaagacagggatgccctctctcaccgctcctattcaacatagtgttggaagttctggccagggcaatcaggcaggagaaggaaataaagggtattcaattaggaaaagaggaagtcaaattgtccctgtttgcagacgacatgattgtttatctagaaaaccccatcgtctcagcccaaaatctccttaagctgataagcaacttcagcaaagtctcaggatacaaaatcaatgtacaaaaatcacaagcattcttatacaccaacaacagacaaacagagagccaaatcatgggtgaactcccattcacaattgcttcaaagagaataaaatacctaggaatccaacttacaagggatgtgaaggacctcttcaaggagaactacaaaccactgctcaaggaaataaaagaggacacaaacaaatggaagaacattccatgctcatgggtaggaagaatcaatatcgtgaaaatggccatactgcccaaggtaatttacagattcaatgccatccccatcaagctaccaatgactttcttcacagaattggaaaaaactactttaaagttcatatggaaccaaaaaagagcccgcatcgccaagtcaatcctaagccaaaagaacaaagctggaggcatcacactacctgacttcaaactatactacaaggctacagtaaccaaaacagcatggtactggtaccaaaacagagatatagatcaatggaacagaacagagccctcagaaataatgccgcatatctacaactatctgatctttgacaaacctgagaaaaacaagcaatggggaaaggattccctatttaataaatggtgctgggaaaactggctagccatatgtagaaagctgaaactggatcccttccttacaccttatacaaaaatcaattcaagatggattaaagatttaaacgttagacctaaaaccataaaaaccctagaagaaaacctaggcattaccattcaggacataggcgtgggcaaggacttcatgtccaaaacaccaaaagcaatggcaacaaaagccaaaattgacaaatgggatctaattaaactaaagagcttctgcacagcaaaagaaactaccatcagagtgaacaggcaacctacaacatgggagaaaattttcgcaacctactcatctgacaaagggctaatatccagaatctacaatgaactcaaacaaatttacaagaaaaaaacaaacaaccccatcaaaaagtgggcgaaggacatgaacagacacttctcaaaagaagacatttatgcagccaaaaaacacatgaagaaatgctcatcatcactggccatcagagaaatgcaaatcaaaaccactatgagatatcatctcacaccagttagaatggcaatcattaaaaagtcaggaaacaacaggagctggtattttgaaaagatcaacaaaattgatagactgctagcaagactaataaagaaaaaaagagagaagaatcaaatagacgcaataaaaaatgataaaggggatatcaccactgatcccacagaaatacaaactaccaccagagaatactataaacacctctatgcaaataaactagaaaatctagaagaaatggataaattcctcgacacatacaacctcccaagactaaagcaggaagaagttgaatctctgaatagaccaataagaggctctgaaattgtggcaataatcaatagcttaccaaccaaaaaaagtccaggaccagatggattcacagccgaattctaccacaggtacaaagaggagctggtaccattgcttctgaaactattccaatcaatagaaaaagaggtaatcctccctaactcattttatgaggccagcatcatcctgataccaaagcctgacagagacacagcaaaaaaagagaattttagaccaatatccttgatgaacatcgatgcaaaaatcctcaataaaatactggcaaaccgaatccagcagcacatcaaaaagcttatccaccatgatcaagtgggcttcatccctgggatgcaaggctggttcaacatacgcaaatcagtaaatgtaatccagcatataaacagaaccaaagacaaaaaccacatgatcatctcaatagatgcagaaaagtcctttgataaaattcaacaacacttcatgctaaaaactctcaataaattaggtattgatgggtcatatctcaaaataataagagctacctatgacaaacccacagccaatatcatactgaatgggcaaaaactggaagcattccctttgaaaactggcacaagacacggatgccccctctcaccactcctattcaacatagtgttggaagttctggccagagcaatcaggcaggagaaggaaataaagggtattcaattaggaaaagaggaagtcaaattgtccctgttcatagatgacatgattgtatatctagaaaaccccatcatctcagcccaaaatctccttaagctgataagcaacttcagcagtctcaggatacaaaatcaatgtacaaaaatcacaagcattcttgtacaccaataa

SEQ ID NO: 18467 - DNA, 3161 bp, Homo sapiens
  SIMILAR (414)..(2996): 971254mologous to Homo sapiens putative p150,accession number U93563,Smith-Waterman Score=4389.
ctttcccaagtttcaagatagctattcctaaaaatgatcatgggcatgaacaacatttttggggatatagagttccaaataatgccatggaagatacagcttatcaactggtccaccagtaccctacaagaatgcaggcccggagatgcaggatcgcgctgtcacagtggtcctcttcgcatcctctcccggcaaagagagatgctccggttaccagcggcgcgcatccccgcaggcgcctctcctctcgccgatacccacccaggcagtcccgacaggcgcgcctgcctacctggtggccggctgtcagcgaagcggcggtgcctcagccccttctcagctgctacagcgctcccagcgccatgttcccggtctccccgggcgcacgctggggaactactactggctggaagttctttgaaaccaacgagaacaaagacacaacataccagaatctctgggacgcattcaaagcagtgtgtagagggaaatttataccactaaatgcccacaagagaaagcaggaaagatccaaaattgacaccctaacatcacaattaaaagaactagaaaagcaagagcaaacacattcaaaagctagcagaaggcaagaaataactaaaatcagagcagaactgaaggaaatagagacacaaaaaacccttcaaaaaatcaatgaatccaggagctggttttttgaaaggatcaacaaaattgatagaccgctagcaagactaataaagaaaaaaagagagaagaatcaaatagacacaataaaaaatgataaaggggatatcaccaccaatcccacagaaatacaaactaccatcagagaatactacaaacacctctacgcaaaaaaactagaaaatctagaagaaatggatacattcctcgacacatacactctcccaagactaaaccaggaagaagttgaatctctgaatagaccaataacaggagctgaaattgtggcaatattcaatagtttaccaaccaaaaagagtccaggaccagatggattcacagccgaattctaccagaggtacaaggaggaactggtaccattccttctgaaaatattccaatcaatagaaaaagagggaatcctccctaactcattttatgaggccagcatcattctgataccaaagccaggcagagacacaaccaaaaaagagaattttagaccaatatccttgatgaacattgatgcaaaaatcctcaataaaatactggcaaaccgaatccagcagcacatcaaaaagcttatccaccatgatcaggtgggcttcatccctggaatgcaaggctggttcaatatacgcaaatcaataaatgtaatccagcatataaacagagccaaagacaaaaaccacatgattatctcaatagatgcagaaaaagcctttgacaaaattcaacaacccttcatgctaaaaactctcaataaattaggtattgatgggacgtatttcaaaataataagagctatctatgacaaacccacagccaatatcatactgaatgggcaaaaactggaagcattccctttgaaaactggcacaagacagggatgccctctctcaccgctcctattcaacatagtgttggaagttctggccagggcaatcaggcaggagaaggaaataaagggtattcaattaggaaaagaggaagtcaaattgtccctgtttgcagacgacatgattgtttatctagaaaaccccatcatctcagcccaaaatctccttaagctgataagcaacttcagcaaagtctcaggatacaaaatcaatgtacaaaaatcacaagcattcctatacaccaacaacagacaaacagagagccaaatcatgagtgaactcccattcacaattgcttcaaagagaataaaatacctaggaatccaacttacaagggatgtgaaggacctcttcaaggagaactacaaaccactgctcaaggaaataaaagaggatacaaacaaatggaagaacattccatgctcatgggtaggaagaatcaatatcgtgaaaatggccatactgcccaaggtaatttacagattcaatgccatccccatcaagctaccaatgactttcttcacagaattggaaaaaactactttaaagttcatatggaaccaaaaaagagcccgcatcgccaagtcaatcctaagccaaaagaacaaagctggaggcatcacactacctgacttcaaactatactacaaggctacagtaaccaaaacagcatggtactggtaccaaaacagagatatagatcaatggaacagaacagagccctcagaaataacgccacatacctacaactatctgatctttgacaaacctgagaaaaacaagcaatggggaaaggattccctatttaataaatggtgctgggaaaactggctagccatatgtagaaagctgaaactggatcccttccttacaccttatacaaaaatcaattcaagatggattaaagatttaaacgttagacctaaaaccataaaaaccctagaagaaaacctaggcagtaccattcaggacataggcgtgggcaaggacttcatgtccaaaacaccaaaagcaatggcaacaaaagccaaaattgacaaatgggatctaattaaactaaagagcttctgcacagcaaaagaaactaccatcagagtgaacaggcaacctacaacatgggagaaaattttcgcaacctactcatctgacaaaaggctaatatccagaatctacaatgaactcaaacaaatttacaagaaaaaaacaaacaaccccatcaaaaagtgggcgaaggacatgaacagacacttctcaaaagaagacatttatgcagccaaaaaacacatgaaaaaatgctcatcatcactggccatcagagaaatgcaaatcaaaaccactatgagatatcatctcacaccagttagaatggcaatcattaaaaagtcaggaaacaacaggatggctgctggagctccaaccaatccagtctctcatgacggcctaaaggaagtgacttctatgatggagcagagaacacatttttcaacatttgctgatattgccaagttggcagcaactgccagcgctttggaaagctgcaatgtacaatccagggcaccactgggcacagactag

SEQ ID NO: 18468 - DNA, 3195 bp, Homo sapiens; identical to SEQ ID NO: 14748
  SIMILAR (478)..(3024): 931254mologous to Homo sapiens putative p150,accession number U93563,Smith-Waterman Score=4104.

SEQ ID NO: 18469 - DNA, 1986 bp, Homo sapiens; identical to SEQ ID NO: 4451
  SIMILAR (100)..(1617): 881254mologous to Homo sapiens putative p150,accession number U93574,Smith-Waterman Score=2241.

SEQ ID NO: 18470 - DNA, 3159 bp, Homo sapiens; identical to SEQ ID NO: 3991
  SIMILAR (469)..(2925): 981254mologous to Homo sapiens putative p150,accession number U93563,Smith-Waterman Score=4170.

SEQ ID NO: 18471 - DNA, 3471 bp, Homo sapiens
  SIMILAR (850)..(3324): 971254mologous to Homo sapiens putative p150,accession number U93567,Smith-Waterman Score=4173.
atggcttcggtctcctctgcgaccttctcgggccacggggctcggtccctactgcagttcctgcggctggtagggcagctcaagagagtcccacgaactggctgggtatacagaaatgtccagaggccggagagcgtttcagatcacatgtaccggatggcagttatggctatggtgatcaaagatgaccgtcttaacaaagaccgatgtgtacgcctagccctggttcatgatatggcagaatgcatcgttggggacatagcaccagcagataacatccccaaagaagaaaaacataggcgagaagaggggaataaatgtcataagcagaaggcaatggggaaacatcttaaagaaccacatgttcttggacaagaaaccaaaggcttggagagcactgatgttctattgcctcttcctgctgctggtcaggatttgggaagagagaagaaaatcagggaggaagctatgaagcagataacccagctcctaccagaggacctcagaaaggagctctatgaactttgggaagacctagaatttgaatctccatcctgcttggactccttgtccctctgttgctctttgaaaccccagtctgagtcctctcctgtcctaccagaaggctgcgaaacactgattcagagactctgtgccgtggggactggggtcacagccgccctggccaccaggctctgcagagcctcagggctgccagcaccccatcagtgggcctcggaattacaaaggagcaggaaaaaggaagaggaagagggcaaaacctcaaaagacttccaatgtttcaagaaaatgttggactttgttgtgcgccactatcaagctttttccaaatttggtttccaaattactacggcaaagagaaagcaggaaagatccaaaattgacaccctaacatcacaattaaaagaactagaaaagcaagagcaaacacattcaaaagctagcagaaggcaagaaataactaaaatcagagcagaactgaaggaaatagagacacaaaaaacccttcaaaaaatcaatgaatccaggagctggttttttgaaaggatcaacaaaattgatagaccgctagcaagactaataaagagaaaaagagagaagaatcaaatagacacaataaaaaatgataaaggggatatcaccaccgatcccacagaaatacaaactaccatcagagaatactacaaacacctctacgcaaataaactagaaaatctagaagaaatggatacattcctcgacacatacactctcccaagactaaaccaggaagaagttgaatctctgaatagaccaataacaggctctgaaattgtggcaataatcaatagtttaccaaccaaaaagagtccaggaccagatggattcacagccgaattctaccagaggtacaaggaggaattggtaccattccttctgaaactattccaatcaatagaaaaagagggaatcctccctaactcattttatgaggccagcatcattctgataccaaagccgggcagagacacaaccaaaaaagagaattttagaccaatatccttgatgaacattgatgcaaaaatcctcaataaaatactggcaaaccgaatccagcagcacatcaaaaagcttatccaccatgatcaagtgggcttcatccctgggatgcaaggctggttcaatatacgcaaatcaataaatgtaatccagcatataaacagagccaaagacaaaaaccacatgattatctcaatagatgcagaaaaagcctttgacaaaattcaacaacccttcatgctaaaaactctcaataaattaggtattgatgggacgtatttcaaaataataagagctatctatgacaaacccacagccaatatcatactgaatgggcaaaaactggaagcattccctttgaaaactggcacaagacagggatgccctctctcaccgctcctattcaacatagtgttggaagttctggccagggcaatcaggcaggagaaggaaataaagggtattcaattaggaaaagaggaagtcaaattgtccctgtttgcagacgacatgattgtttatctagaaaacctcatcgtctcagcccaaaatctccttaagctgataagcaacttcagcaaagtctcaggatacaaaatcgatgtacaaaaatcacaagcattcttatacaccaacaacagacaaacagagagccaaatcatgggtgaactcccattcacaattgcttcaaagagaataaaatacctaggaatccaacttacaagggatgtgaaggacctcttcaaggagaactacaaaccactgctcaaggaaataaaagaggacacaaacaaatggaagaacattccatgctcatgggtaggaagaatcaatatcgtgaaaatggccatactgcccaaggtaatttacagattcaatgccatccccatcaagctaccaatgactttcttcacagaattggaaaaaactactttaaagttcatatggaaccaaaaaagagcccgcattgccaagtcaatcctaagccaaaagaacaaagctggaggcatcacactacctgacttcaaactatactacaaggctacagtaaccaaaacagcatggtactggtaccaaaacagagatatagatcaatggaacagaacagagccctcagaaataatgccgcatatctacaactatctgatctttgacaaacctgagaaaaacaagcaatggggaaaggattccctatttaataaatggtgctgggaaaactggctagccatatgtagaaagctgaaactggatccctttcttacaccttatacaaaaatcaattcaagatggattaaagatttaaacgttagacctaaaaccataaaaaccctagaagaaaacctaggcattaccattcaggacataggcgtgggcaaggacttcatgtccaaaacaccaaaagcaatggcaacaaaagccaaaattgacaaatgggatctaattaaactaaagagcttctgcacagcaaaagaaactaccatgagagtgaacaggcaacctacaacatgggagaaaattttcacaacctactcatctgacaaagggctaatatccagaatctacaatgaactcaaacaaatttacaagaaaaaaacaaacaaccccatcaaaaagtgggcgaaggacatgaacagacacttctcaaaagaagacatttatgcagccaaaaaacacatgaagaaatgctcatcatcactggccatcagagaaatgcaaatcaaaaccactatgagatatcatctcacaccagtcacagtccaggtaccagggactgtggagtttcctggccaaatagcccagtctattcctgacctgttcaggtcttttgccagctctgttctgaaagtgccttgcatcactggcggaccactcataggcccaagagaggaccaaagagcaggcattttgtag

SEQ ID NO: 18472 - DNA, 2337 bp, Homo sapiens; identical to SEQ ID NO: 2287
  SIMILAR (1108)..(2328): 921254mologous to Homo sapiens putative p150,accession number U93574,Smith-Waterman Score=1956.

SEQ ID NO: 18473 - DNA, 3855 bp, Homo sapiens; identical to SEQ ID NO: 6074
  SIMILAR (1105)..(3684): 951254mologous to Homo sapiens putative p150,accession number U93563,Smith-Waterman Score=4225.

SEQ ID NO: 18474 - DNA, 3057 bp, Homo sapiens; identical to SEQ ID NO: 7870
  SIMILAR (712)..(2940): 971254mologous to Homo sapiens putative p150,accession number U93568,Smith-Waterman Score=3707.
  misc_feature (1)...(3057): n = a,t,c or g

SEQ ID NO: 18475 - DNA, 2007 bp, Homo sapiens
  SIMILAR (766)..(1248): 761254mologous to Mus musculus Pro-Pol-dUTPase polyprotein,accession number Y12713,Smith-Waterman Score=642.
atgaggtctcggctgggcgcggtggctctggcctgtaatctcagcactttgggaggccgaggaggaaaagaaaggcatgcacatgaccttcctcatgtaacagcacagtctcaaggtcatcagggccaagggaaaatttcccggactgctctcaaagagcctacagtccacaaagtaacagcttccctatccccagtagtggcaacatcccctccccaacccatgctgccatcagactttccacctttgtctgaggagataaaccctatgctgcctgaggcaacagtgatagcctcccctaaggaaattgccaggcaagataatgttgattcccctcaggagccacccccaacaccccagttttcttctagacctataactagactaaagtcccagtgggcccccagagggccagagtgcgtaattggcatagacatacttagcagctggcagaacccccacattggctccctgactggtagggtgagggctattatggtgggaaaggccaaatggaagccattagagctgcctctacctagaaaaatagtaaatcaaaaacaatatcacatccttggagggactgtggaaattagtgccaccattaaggacttgaaagacacagaggcggtgactcccaccacatccccattcaactctcccatttggcctgtgcagaagacagatggatcttggagaatgacagtggattattgtaaacttaaccaagtggtgactccaattgcagctgctgtaccagatgtggttcattgcttgagcaaatcaacacatctcctggtacctggtttgagtggagtccaaaagaaggctctgcagcaggttcaggctgctgtgcaagctgctctgccatttgggccatatgacccagcagatccaatggtgcttgaggtgtcagtggcagatagggatgctatttggagcctttggaacgccgccattggtgaatcacagcggaggcctctaggattttggagcaaggctctcctgtcttctgcagataactactctccttttgagaggcagctcttggcctcttactgggctttggtggaaactgaacgtttgacggtgggtcatcaagtcaccctgcgacctgaactgcctatcatgaattgggtgctttctgacccatctagccataaagttagtggtgcacagcagcgttccatcatcaaattgaagtggtatatacatgattgggttcgagcaggtcctgaaggcacaaccacctctgtcatcacccaatgggcccatgaacaaagtggccacggtggtagggatggaggtcatgcatgggctcagcaacatggacttccactcacgaaggctgacctggctacggccactgccaggattcacaggtccaggaatcaaggggtgaaagtggaagtggcaccactcaccatcacccctagtgatccactagcaaagtttttgcttcttatttccgcgacatctactagtctagaggtcacagttccagagggagaaatgctgccaccaagagacacaacaaagattgccacctttgggactcagactggcttccttgctcttcagcttgcagatggcctattgtgggaccttgtgatcataccaggaaaggggaaacccagcagagacctagtggagagtcccagcccctattccacctacgagggtattgatgggtggcccgatgagcctgcaccaacagcaacaaagcccccagtcatgccagccccagctctaccaccagacacccgcagtggcagcaaagccccaactgtcccaaccccttacccacaaatggagcaccaccaagtccaattagccagcaacaacagcaacaccgaagctctgggccatcttagtccccagtccagctgggtgcagactcctgggcagaatagtggcccagcaataccgaaccatctagggaaggacatgatttcacctccacaaatggcaccagcaggggttaagtgggagtcccagaagtactag

SEQ ID NO: 18476 - DNA, 2835 bp, Homo sapiens; identical to SEQ ID NO: 2292
  SIMILAR (1159)..(2799): 961254mologous to Homo sapiens putative p150,accession number U93564,Smith-Waterman Score=2754.

SEQ ID NO: 18477 - DNA, 3705 bp, Homo sapiens
  SIMILAR (181)..(2010): 951254mologous to Homo sapiens putative p150,accession number U93565,Smith-Waterman Score=2977.
atgcagaaaaagcatgacaaaatccgaaattctttcatgataaaaactctcaaaaaactacgtacagaaggaatttacctcaatacaataaaggcaacatataaaaagcccataactaacatcatactcaatggtgaaaaccagaaagcttttgctctaagatcgggaacaagattctggatattagccctttgtcagatgagtaggttgcgaaaattaacaaactatctctcagaccacagtgcaatcaaactagaactcaggattaagaatcccactcaaagccgcccaactacatggaaactgaacaacctgctcctgaatgactactgggtacataatgaaatgaaggcagaaataaagatgttctttgaaaccaacgagaacaaagacacaacataccagaatctctgggacgcattcaaagcagtgtgtagagggaaacttatagcactaaatgcccacaagagaaagcaggaaagatccaaaattgacaccctaacatcacaattaaaagaactagaaaagcaagagcaaacacattcaaaagctagcagaaggcaagaaataactaaaatcagagcagaactgaaggaaacagagacacaaaaaacccttcaaaaaatcaatgaatccaggagctggttttttgaaaggatcaacaaaattgatagaccgctagcaagactaataaagaaaaaaagagagaagaatcaaatagacacaataaaaaatgataaaggggatatcaccaccgatcccacagaaatacaaactaccatcagagaatactacaaacacctctacacaaataaactagaaaatctagaagaaatggataaattcctcgacacatacactctcccaagactaaaccaggaagaagttgaatctctgaatagaccaataacaggagctgaaattgtggcaataatcaatagcttaccaaccaaaaggagtccaggaccagatggattcacagccgaattctaccagaggtacaaggaggaactggtaccattccttctgaaactattccaatcaatagaaaaagagggaatcctccctaactcattttatgaggccagcatcattctgataccaaagccgggcagagacacaaccaaaaaagagaattttagaccaatatccttgatgaacattgaggtaaaaatcctcaataaaatactggcaaaccgaatccagcagcacatcaaaaagcttatccaccatgatcaagtgggcttcatccctgggatgcaaggctggttcaatatatgcaaatcagtaaatgtgatccagcatataaacagagccaaagacaaaaaccacatgattatctcaatagatgcagaaaaagcctttgacaaaattcaacaacccttcatgctaaaaactctcaataaattaggtattgatgggatgtatttcaaaataataagagctatctatgacaaacccacagccaatatcatactgaatgggcaaaaactggaagcattccctttgaaaactggcacaagacagggatgccctctctcaccactcctattcaacatagtgttggaagttctgaccagggcaattaggcaggagaaggaaataaacggtattcaattaggaaaagaggaagtcaaattgtccctgtttgcagatgacatgattgtatatctagaaaaccccattgtctcagcccaaaatctccttaagctgataagcaacttcagcaaagtctcaggatacaaaatcaatgtacaaaaatcacaagcattcttatacaccaacaacagacaaacagagagccaaatcatgagtgaactcccattcacaattgcttcaaagagaataaaatacctaggaatccaacttacaagggatgtgaaggacctcttcaaggagaactacaaaccactgctcaaggaaataaaagaggatgcaaacaaatggaagaacattccatgctcatgggtaggaagaatcaatatcgtgaaaatgaccatactgcccaagtctgagaaggtttcagtatgcccctcccttggtgcccacgtgattttcaagccatacaaggactggcctgtatgtgccagaactctcaccccagctcgatcacctaatctcattaaaaacagggcctgtcacccttctctgctctccaagctatttttggatcagcttataatcctgtcctattctccccagaaagcctcattatgcaccggaagtgaccgcctcgcggctgcttcctctcctggagtccagagtcccgttgctccgccgcgatattcagtaaaccactgggagtccggcagcatggaggcagcgcgccctcccccgacggcagggaagttcgtggtggtcggcggcggcatcgcgggcgtcacttgtgcggagcagttggctactcactttccatcggaagatattctcttggtaacagcttctcctgttattaaagcagttacaaatttcaagcagtggcagcagcgctggtgtctgataagtggtgcctatggagcagatagagctgaggcccaaaacacaggcatacacggaggaattaaagttctgggatctgggactgtaatgatattggtgcctagggtgcagatttctaaaatattggaagaattcgatgttgaagaacaatcaagtaccatgttaggaaaacgctttcccaacattaaggttatagaatctggcgtaaagcaactgaagagtgaagaacactgcattgtaacagaagatggcaatcagcacgtatataagaaactctgtctgtgtgctggagctaaaccaaagttgatatgtgaaggaaatccttatgtattaggaatccgtgatacagacagtgctcaggaatttcagaaacagcttactaaagctaaaagaataatgatcatagggaacggtggtattgcacttgagttagtgtatgaaattgaaggctgtgaagtgatttgggccattaaagataaagctatagggaatactttcttcgatgcaggagcagctgaattcttgacttcaaagctcattgctgaaaaatcagaggctaaaattgcacataaaagaaccagatatacaactgaaggaaggaaaaaggaagctagaagcaaatctaaagcagataatgtaggaagtgcattgggaccagattggcatgaaggcttgaatcttaaaggaacaaaagagtttgatctaggagaagatggtggcctgaaagtggatgatcatatgcacacatcccttcctgatatctatgctgccggtgacatctgtactacatcctggcagctgagcccagtctggcagcagatgaggctgtggacccaggctagacagatgggatggtatgcagcaaagtgcatggctgcagcgagttcaggagactctattgacatggatttcagctttgaactgtttgctcatgtgacaaaattttttaactataaggttgtactgctgggaaaatacaatgcacagggcttaggttcagatcatgaattaatgctgagatgtaccaaaggacgagaatacatcaaagtcgtcatgcaaaatggacgaatgatgggagctgtcttaattggtgaaaccgatttagaagaaacatttgaaaacctaatcttaaaccaaatgaatctttcatcatatggagaagatctgctagatccaaatattgatatagaagattattttgactaa

SEQ ID NO: 18478 - DNA, 3139 bp, Homo sapiens
atggggaaaaaacagaacagaaaaactggaaactctaaaaagcagagtgcctctcttcctccaaaggaacgcagcttctcaccagcaactgaacaaagctggacggagaatgactttgatgagctgagagaagaaggcttcagacgatcaaattactatgagctacgggaggacattcaaaccaaaggcaaagaagttgaaaactttgaaaaaaatttagaagaatcaccacaccacacctattccaaaattgaccacatacttggaagtaaagctctcctcagcaaatgtaaaagaacagaaattataacaaactatctctcagaccacagtgcaatcaaactagaactcaggattaagaatctcactcaaaaccgctcaactacatggaaactgaacaacctgctcctgaatgactactgggtacctaacgaaatgaaggcagaaataaagatgttctttgaaaccaacgagaacaaagacacaacataccagaatctctgggaggcattcaaagcagtgtgtagagggaaatttatagcactaaatgcccacaagagaaagcaggaaagagctaaaattgacaccctaacatcacaattaaaagaactagaaaagcaagagcaaacacattcaaaagctagcagaaggcaagaaataactaaaatcagagcagaactgaaggaaagagagacacaaaaaacccttcaaaaaattaatgaatccaggagctggttttttgaaaggatcaacaaaattgatagaccactcgcaagactaataaagaaaaaaagagagaagaatcaaatagaggcaataaaaaatgataaaggggttatcaccaccgatcccacagaaatacaaactaccatcagagaatactacaaacacctctacacaaataaactagaaaatctagaagaaatggataaattccttgacacatacactctcccaagaccaaaccaggaagaagttgaatctctgaatagaccaataacaggatctgaaattgtggcaataatcaatagcttaccaaccaaaaagagtccaggaccagatggattcacagccaaattctaccagaggtacaaggaggaactggtatcattccttctgaaactattccaatcaatagaaaaagagggaatcctccctaactcattttatgaggccagcatcattctgaaaccaaagccgggcagagacataaccaagaaagagaattttagaccaatatccttgatgaacattgatgcaaaaatcctcaataaaatactggcaaaacgaatccagcagcacatcaaaaagcttatccaccatgatcaagtgggcttcatccctgggatgcaaggctggttccatataagcaaatcaataaatgtaatccagcatataaacggagccaaagacaaaaaccacatgattatctcaatagatgcagaaaaggcctttgacaaaattaaacaacacttcatgctaaaaactctcaataaattaggtattgatgggaggtatttcaaaataataagagctatctatgacaaacccacagccaatatcatactgaatgggcacaaactggaagcattccctttgaaaactggcacaagacagggatgccctctctcaccactcccattcaacatagtgttggaagttctggccagggcaattaggcaggagaaggaaataaagggtattcaattaggaaaagaggaagtcaaattgtctctgtttgcagacgacatgattgtatatctagaaaaccccatcgtctcagcccaaaatctccttaagctgataagcaacttcagcaaagtctcaggatacaatatcaatgtgcaaaaatcacaagcattcctgtacaccaacaacagacaaacagagagccaaatcatgagtgaactcccattcacaatggcttcaaagagaataaaatacctaggaatccaacttacaagggatgtgaaggacctcttcaaggagaactacaaaccactgctgaaggaaataaaagaggatacaaacaaatggaagaacattccatgctcatgggtaggaagaatcaatatcgtgaaaatggccatactgcccaaggtaatttacaggttcagtgccatccccatcaagctaccaatgactttcttcacagaattggaaaaaactactttaaagttcatatggaaccaaaaaagagcccgcatcgtcaagtcaatcctaagccaaaagaacaaagctggaggcaccacactacctgacttcaaactatactacaaggctacagtaaccaaaatagcatggtactggtaccaaaacagagatatagatcaatggaacagaacagagccctcagaaataatgccgcatatctacaactatctgatctttgacaaacctgagaaaaacaagcaatggggaaaggattccttatttaataaatggtgctgggaaaactggctagccatatgtagaaagctgaaactggatcccttccttacaccttatacaaaaatcaattcaagatggattaaagacttaaacgttagacctaaaaccataaaaaccctagaagaaaacctaggcattaccattcaggacataggcatgggcaaggacttcatgtctaaaacaccaaaagcaatggcaacaaaacccaaaattgacaaatgggatctaatgaaactaaagagcttctgcacagcaaaagaaactaccatcagagtgaacaggcaacctacaaaatgggagaaaatttttgcaacctactcatctgacaaagggctaatatccagaatctacaatgaactcaaacaaatttacaagaaaaaaacaaacaaccccatcaaaaagtgggcaaaggacatgaacagacacttctcaaaagaagacatttatgcagccaaaaaacacatgaaaaaatgctcaccatcactggccatcagagaaatgcaaatcaaaaccacaatgagataccatctcccaccagttagaatggcaatcattaaaaagtcaggaaacaacagaaaaagtttacagatctctgctctaggaaattataccactcagccttatgttaggtttggttttgactctcttgtagtgtttacaagacttttaccaaaaaagtttatcaaca

SEQ ID NO: 18479 - DNA, 2920 bp, Homo sapiens
  SIMILAR (248)..(1438): 911254mologous to Homo sapiens putative p150,accession number U93563,Smith-Waterman Score=1859.
accaagtctacgtctgattggtgtacctgaaagtgatggggagaatggaaccaagttggaaaacactctgcaggatattatccaggagaacttccccaatctagcaaggcaggccaacattcagattcaggaaatacagagaacgccacaaagatgctcctcgagaagagcaactccaacacacgtaattgtcagattcaccaaagttgaaatgaaggacaaaatgttaagggcagccagagagaaagaccacagtgcaatcaaactagaactcaggattaagaaactcactcaaaaccgctccactacatggaaactgaacaacctgctccagaatgactactgggtacataacgaaatgaaggcagaaataaagatgttctctgaaaccaacggaaacaaagacacaacataccagtatctctggcacacattcaaagcagtgtgtagagggaaatttatagcactaaatgcccacaagagaaagcaggaaagatccaaaattgacaccctaacgtcacaattaaaagaactagaaaagcaagagcaaacacattcaaaagctagcagaaggcaagaaataactaaaatcagagcagaactgaaggaaatagagacacaaaataccgttcaaaaaattaatgaatccaggagctggttttttgaaaagatcaacaaaactgatagactgctagcaagactaataaagaagaaaagagagaagaatcaaatagatgcaataaaaaatgataaaggggatatcaccaccgatcccacagaaatacaaactaccatcacagaatactacaaacacctctacgcaaataaactagacaatctagaagaaatggataaattcctcgacacatacaccatcccaagactaaaacaggaagaagttgaatctctgaatagaccaataacagactctgaaattgtggcaataatcaatagcttaccaaccaaaaaaagtccaggagcagatggattcacagccaaattctaccagacgtacaaggaggagctggtaccattccttctgaaactattccaatcaatagaaaaagagggaatcctccctaactcactttatgaggccagcatcatcctgataccaaagcctggcagagacacaacaaaaaaagagagttttagaccaatatccttgatgaacgctgatgcaaaaatcctcaatacaatactggcaaaccgaatccagcagcacatcaaaaagcttatctaccatgatcaagtgggcttcatccctgggatgcaaggctggttcaatatacgcaaatcaataaatgtaatccagcatataaacagagccaaagacaaaaaccacatgattatctcaatagatgcaggaaaagcctttgacaaaattcaacaatccttcatgctaaaagctctcaataaattagatattgatgggacggcaattaggcaggagaaggaaataaagggtattcaattaggaaaagaggaagtcaaattgtccctgtttgcagacgacatgattgtatatctagaaaaccccattgtctcagcccaaaatctccttaagctgataagcaacttcagcaaagtctcaggatacaaaatcaatgtgcaaaaatcacaagcattcttatacaccaacaacagacaaacagagagccaaatcatgagtgaactcccattcacaattgcttcaaagagaataaaatacttaggaatccaacttacaagggatgtgaaggacctcttcaaggagaactacaaaccactgctcaaggaaataaaagaggatataaacaaatggaagaacattccatgctcatgggtaggaagaatcaatatcgtgaaaatggccatactgcccaagaattggaaaaaaactactttaaagttcatatggaatcaaaaaagagcccgcatcaccaaggcaatcctaagccaaaagaacaaagctggaggcatcacactacctgacttcaaactatactacaaggctacagtaaccaaaacagcatggtactggtaccaaaacagagatatagatcaatggaacagaacagagccctcagaaataatgccacatatctgcaactatctgatctttgacaaacctgagaaaaacaagcaatggggaaaggattccctatttaataaatggtgctgggaaaactggctagccatatgtagaaagctgaaactggatcccttccttacaccctatacaaaaatcaattcaagatggattaaagacttaaacattagacctaaaaccataaaaaccctagaagaaaacctaggcattaccattcgggacataggcatgggcaaggacttcatgtccaaaacaccaaaagcattggcaacaaaagccaaaattgacaaatgggatctaattaaactaaagagcttctgcacagcaaaagaaactaccattagagtgaacaggcaacctacaaaatgggagaagattttcgcaacctactcatctgacaaagggctaatatccagaatctacaatgaactcaaacaaatttacaagaaaaaaacaaacaaccccatcaaaaagtgggtgaaggacatgaacagacacttctcaaaagaagacatttatgcagccaaaaaacacatgaaaaaatgctcatcatcactggccatcagagaaatgcaaatcaaaaccacacttcccactgggcggttaatagaaacattccaaagcaatgagcaccagtcagaagtaaagctcttaaaacaggacaagaagaaatgggtgggaagctggaatgagaacattcatcagcagctcaaagcacagacttctaagggaatctttcctcaccctctgcctctttgttgtgtcatgatttccaatggttctcaaagtgtggcctgcaaaatcttgtggttctccaataccccttag

SEQ ID NO: 18480 - DNA, 3290 bp, Homo sapiens
  SIMILAR (1428)..(3008): 951254mologous to Homo sapiens putative p150,accession number U93563,Smith-Waterman Score=2693.
atggtaaagggatcaattcaacaagaagagctaactatcctaaatatatatgcacccaatacaggagcaccaagattcataaagcaagtcctgagcgacctacaaagagacttagactcccatacattaataatgggagattttaacaccccactgtcaacattagacagatcaacgagacagaaggtcaacaaggatacccaggaattgaactcagctctgcagcaagcagacctaatagacatctacagaactctccaccccaaatcaacagaatatacatttttttcagcaccacaccacacctattccaaaattgaccacatacttggaagtaaagctctcctcagcaaatgtaaaagaacagaaattataacaaactgtctctcagaccacagtgcaatcaaactagaactcaggattaagaatctcactcaaaaccgctcaactacatggaaactgaacaacctgctcctgaatgactactgggtacataatgaaatgaaggcagaaataaagatgttctttgaaaccaatgagaacaaagacacaacataccagaatctctgggacgcattcaaagcagtgtgtagagggaaatttatagcactaaatgcccacaagagaaagcaggaaagatccaaaattgacaccctaacatcacaattaaaagaactagaaaagcaagagcaaacacattcaaaagctagcagaaggcaagaaataattaaaatcagagcagaactgaaggaaatagagacacaacaaacccttcaaaaaattaatgaatccaggagctggttttttgaaaggatcaacaaaattgatagaccgctagcaagactaataaagaaaaaaagagagaagaatcaaatagacgcaataaaaaatgataaaggggatatcaccaccgatcccacagaaatacaaactaccatcagagaatactacaaacacctctacgcaaataaactagaaaatctagaagaaatggataaattccttgacacatacaccctcccaagactaaaccaggaagaagttgaatctctgaatagaccaataacaggatctgaaattgtggcaataatcaatagcttaccaaccaaaaagagtccaggaccagatggattcacagccgaattctaccagaggtacaaggaggaactggtaccattccttctgaaactattccaatcaatagaaaaagagggaatcctccctaactcatttcatgaggccagcatcattctgataccaaagccaggcagagacacaacaaaaaaagagaatttcagaccaatatccttgatgaacattgatgcaaaaatcctcagtaaaatactggcaaaacgaatccagcagcacatcaaaaagcttatatacaccatgatcaagtgggcttcatccctgggatgcaaggctggttcaatatactgttggatgttctggccagggcaattaggcaggagaaggaaataaagggtattcaattaggaaaagaggaagttaaattgtccctgtttgcagacgacatgattgtatatctagaaaaccccattgtctcagccgaaaatctccttaagctgataagcaacttcagcaaagtctcaggatacaaaatcaatgtacaaaaatcacaagcattcttatacaccaacaacagacaaacagacagccaaatcatgagtgaaatcccattcacaattgcttcaaagagaataaaatatctaggaatccaacttacaagggatgtgaaggacctcttcaaggagaactacaaaccactgctcaaggaaataaaagaggatacaaacaaatggaagaacattccatgttcatgggtaggaagaatcaatatcatgaaaatggccatactgcccaaggtaatttacagattcaatgccatccccatcaagctaccaatgcctttcttcacagaattggaaaaaactactttaaagttcatatggaaccaaaaaaaaccccgcatcgccaagtcaatcctaagccaaaagaacaaagctggaggcatcacactacctgacttcaaactatactacaaggctacagtaaccaaaacagcatggtactggtgccaaaacagagatatagatcaatggaacagaacagagccctcagaaataacgccgcatatctacaactatctgatctttgacatacctgagaaaaacaagcaatggggaaaggattccctgtttaataaatggtgctgggaaaactggctagccatatgtagaaagttgatactggatcccttccttacaccttatataaaaatcaattcaagatggattaaagacttaaacgttggacctaaaaccataaaaaccctagaagaaaacctaggctttaccattcaggacataggcatgggcaaggacttcatgtctaaaacaccaaaagcaatggcaacaaaagccaaaattgacaaatgggatctaattaaactcaagagcttctgcacagcaaaagaaactaccatcagagtgaacaggcaacctacaaaatgggagaaaattttcgcaacctactcatctgacaaagggctaatatccagaatctacaatgaactcaaacaaatttacaagaaaaaaacaaacaaccccatcaaaaagtgggtgaaggacatgaacagacacttctcaaaagaagacatttatgcagccaaaaaacacatgaaaaaatgctcatcatcactggccatcagagaaatgcaaatcaaaaccacagtgagataccatctcacaccagttagaatggtgatcattaaaaagtcaggaaacaacaggtgctggagaggatgtggagaaataggaacacttttacactgttggtgggactgtaaactagttcatccattgtggaagtcagtgtggcgattcctcagggatctagaactagaaataccatttgacccagccatcctattactgggtatatacccaaaggattataaatcatgctgctataaagacacatgcacacatgagaaagcagagatccagaaaagtaaaggaatcagagattatggagaaataggtactagaactgaggatatggactcccagttcagacctctttccgttgttcgggcacaaattatcccctttgaatttccctgggaaggaatacctctgggtggacccttcccccggcattcctgcagctaccctgtgggcctagcccttttgtaccacagtagctcagcagctggaccagtgagaggacacctctccctgcagtggaattccaggatgactagttga

SEQ ID NO: 18481 - DNA, 3640 bp, Homo sapiens
  SIMILAR (712)..(3522): 981254mologous to Homo sapiens putative p150,accession number U93563,Smith-Waterman Score=4815.
atggggaaaaaacagaacagaaaaactggaaactctaaaacgcagagcgcctctcctcctccaaaggaacgcagttcctcaccagcaacagaacaaagctggatggagaatgattttgacgagctgagagaagaaggcttcagacgatcaaattactctgagctatgggaggacattcaaaccaaaggcaaagaagttgaaaactttgaaaaaaatttagaagaatgtataactagaataaccaatacagagaagtgcttaaaggagctgatggagctgaaaaccaaggctcgagaactacatgaagaatgcagaagcctcaggagccgatgcgatcaactggaagaaagggtatcagcaatggaagatgaaatgaatgaaatgaagcgagaagggaagtttagagaaaaaagaataaaaagaaatgagcaaagcctccaagaaatatgggactatgtgaaaagaccaaatctacgtctgattggtgtacctgaaagtgatgtggagaatggaaccaagttggaaaacactctgcaggatattatccaggagaacttccccaatctagcaaggcaggccaacgttcagattcaggaaatacagagaatgccacaaagatactcctcgagaagagcaactccaagacacataattgtcagattcaccaaagttgaaatgaaggaaaaaatgttaagggcagccagacagaaagcaccacaccacacctattccaaaattgaccacatagttggaagtaaagctctcctcagcaaatgtaaaagaacagaaattataacaaactatctctcagaccacagtgcaatcaaactagaactcaggattaagaatctcactcaaagccgctcaactacatggaaactgaacaacctgctcctgaatgactactgggtacataacgaaatgaaggcagaaataaagatgttctttgaaaccaacgagaacaaagacaccacataccagaatctctgggacacattcaaagcagtgtgtagagggaaatttatagcactaaatgcctacaagagaaagcaggaaacatccaaaattgacaccataacatcacaattaaaagaactagaaaagcaagagcaaacacattcaaaagctagcagaaggcaagaaataactaaaatcagagcagaactgaaggaaatagagacacaaaaaacccttcaaaaaatcaatgaatccaggagctggttttttgaaaggatcaacaaaattgatagaccgctagcaagactaataaagaaaaaaagagagaagaatcaaatagacacaataaaaaatgataaaggggatatcaccaccgatcccacagaaatacaaactaccatcagagaatactacaaacacctctacgcaaataaactagaaaatctagaagaaatggatacattcctcgacacatacactctcccaagactaaaccaggaagaagttgaatctctgaatagaccaataacaggctctgaaattgtggcaataatcaatagtttaccaaccaaaaagagtccaggaccagatggattcacagccgaattctaccagaggtacaaggaggaactggtaccattccttctgcaactattccaatcaatagaaaaagagggaatcctccctaactcattttatgaggccagcatcattctgataccaaagccgggcagagacacaaccaaaaaagagaattttagaccaatatccttgatgaacattgatgcaaaaatcctcaataaaatactggcaaaccgaatccagcagcacatcaaaaagcttatccaccatgatcaagtgggcttcatccctgggacgcaaggctggttcaatatacgcaaatcaataaatgtaatccagcatataaacagagccaaagacaaaaaccacatgattatctcaatagatgcagaaaaagcctttgacaaaattcaacaacccttcatgctaaaaactctcaataaattaggtattgatgggacatatttcaaaataataagagctatctatgacaaacccacagccaatatcatactgaatgggcaaaaactggaagcattccctttgaaaactggcacaagacagggatgccctctctcaccgctcctattcaacatagtgttggaagttctggccagggcaatcaggcaggagaaggaaataaagggtattcaattaggaaaagaggaagtcaaattgtccctgtttgcagacgacatgattgtttatctagaaaaccccatcgtctcagcccaaaatctccttaagctgataagcaacttcagcaaagtctcaggatacaaaatcaatgtacaaaaatcacaagcattcttatacaccaataacagacaaacagagagccaaatcatgagtgaactcccattcacaattgcttcaaagagaataaaatacctaggaatccaacttacaagggatgtgaaggacctcttcaaggagaactacaaaccactgctcaaggaaataaaagaggacacaaacaaatggaagaacattccatgctcatgggtaggaagaatcaatatcgtgaaaatggccatactgcccaaggtaatttacagattcaatgccatccccatcaagctaccaatgactttcttcacagaattggaaaaaactactttaaagttcatatggaaccaaaaaagagcctgcatctccaagtcaatcctaagccaaaagaacaaagctggaggcatcacactacctgacttcaaactatactacaaggctacagtaaccaaaacagcatggtactggtaccaaaacagagatatagatcaatggaacagaacagagccctcagaaataatgccacatatctacaactatctgatctttgacaaacctgagaaaaacaagcaatggggaaaggattccctatttaataaatggtgctgggaaaactggctagccatatgtagaaagctgaaactggatcccttccttacaccttatacaaaaatcaattcaagatggattaaagatttaaacgttagacctaaaaccataaaaaccctagaagaaaacctaggcattaccattcaggacataggcgtgggcaaggacttcatgtccaaaacaccaaaagcaatggcaacaaaagccaaaattgacaaatgggatctaattaaactaaagagcttctgcacagcaaaagaaactaccatcagagtgaacaggcaacctacaacatgggagaaaattttcacaacctactcatctgacaaagggctaatatccagaatctacaatgaactcaaacaaatttacaagaaaaaaacaaacaaccccatcaaaaagtgggcgaaggacatgaacagacacttctcaaaagaagacatttatgcagccaaaaaacacatgaagaaatgctcatcatcactggccatcagagaaatgcaaatcaaaaccactatgagatatcatctcgcaccagttagaatggcaatcattaaaaagtcaggaaacaacagaataaaaagactcacagactcagaaaggaggaaaatgaaatcagaggacaggttgacatgtgaggactccagaaaccttattactttcatacaatggaataaagaacaagaagaagaaagaaaaacca

SEQ ID NO: 18482 - DNA, 1223 bp, Homo sapiens
  SIMILAR (664)..(38): 821254mologous to Mus musculus Pro-Pol-dUTPase polyprotein,accession number Y12713,Smith-Waterman Score=912.
catgggcatttgagccacttccttgtttagttaaacaagtgccttcaggaactgctcgagcctgatcacatatataccacttcaatttgatgatggaatgctgttgtgcatgacccactttatgtctagatgggtcagaaagcacccagttcatgataggcagttcaggttgcatggtgacttgatgacccatagtcaaaccttcagtttccatcaaagcccagtaacaggccaagagccgtctctcaaaaggagagtagttatctgcagaaaatggaagggccttgctccaaagtcctagaggcctccattgtgattcacctatgggggcctgccaaaggctccaaacagcaaccctatctgccactgacatctcaagcaccgttggatctgccgagtcatatggcccaaatggcagagcagcttgcacagcagcctggacctgttgcagagccttctcctgttccagaccccactcaaaactggcagcctttcgggtcacttgatacatgggctggagtaacacacccaaatgaggaatgtgttccctccaaaatccaaataggcccactaggtgttgggcctctttcttggttgtaggaggggccaaatgcagcaacttatccttcaccttagaggaatatctcgacaggccccacaccactggactcctagaaattttacaggtaccaggatatgtgttaatttgcttaagcaatgaaaccacatctggtacaacagctgcaattggagtcatcacttgggtaagcttacaataatccactgtcattctccaacatccatctgtcttctgcacagaccaaatgggagagttgaacggggatgtggtgggaatcaccacccctgcgtctttcaaatccttgatggtggcactaatctctgcaatccctccagggatgcgatattgtttttgatttactatttttataggaagaagcggctcaaatggcttccatttggcctttcccaccataatagccttcaccctgttctacagatttctgcttatataaaccagaaaactcaagtagttctttttgagtgtagtacacctcttcatgggtcacactctgaacctcatctctaggggcctgctgggactttagtctacttataggtctagaagcaatcaggggtgttgagggtgagtactgaggagaatcaacattaccttgcctggaaactgcctcagcggaggccat

SEQ ID NO: 18483 - DNA, 4227 bp, Homo sapiens
  SIMILAR (790)..(2313): 951254mologous to Homo sapiens putative p150,accession number U93572,Smith-Waterman Score=2493.
atgcacattgttgtagaaacagctctgtcagcttcatggcagaacaaggccaagcccccagctagggttctgcttcaggtggtccccaatgtgtggttccttgtggctgttgtgtgggaactgtatccatctttggatctcatggatcgttccatagaatgcagttcctcaccagcaacggaacaaagctggacagagaatgactatgacaagctgagagaagaaggcttcagacgatcaaattactctgagctacaggaggacattcaaaccaaaggcaaagatgttgaaaactttgaaaaaaatttagaagaatgtataactagaataactaatacacagaagtgcttaaaggagctgatggagctgaaaaccaaggctcgagaactacgtgaagaatgcagaagcctcaggagccgatgcgatcaactggaagaaagggtatcagtgatggaagatgaaatgaatgaaatgaagcaagaagggaagtttagagaaaaaagaataaaaagaaatgagcaaagcctccaagaaatatgggactatgtgaaaagaccaaatctacgtctgattggtgtacctgaaagtgatggggagaatggaaccaagttgaaaaacactctgcaggatattatccaggagaacttccccaatctagcaaggcaggccaaagttcagattcaggaaatacagagaatgccacaaagatattccttgacaagagcaactccaagacacataattgtcagattcaccaaagttgaaatgaaggaaaaaatgttaagggcagccagagagaaaggagcacccagattcataaagcaagtcctgagtgacctacaaagagacttagactcccacacattaataatgggagactttaacaccccactgtcaacattagacagatcaacgagacagaaagtcaacaaggatacccaggaattgaactcagctctgcaccaagtggacctaatagacatctacagaactctccaccccaaatcaacagaatacacatttttttcagcaccacaccacacgtattccaaaattgaccacatacttggaagtaaagctctcctcagcaaatgtaaaagaacagaaattataacaaactatctctcagaccacagtgcaatcaaactagaactcaggattaagaatctcactcaaaaccgctcaactacatggaaactgaacaacctgctcctgaatgactactgggtacataacgaaatgaagctagaaataaagatgttctttgaaaccaacgagaacaaagacacaacataccagaatctctgggacgcattcaaagcagtgtatagagggaaatttatagcactaaatgcccacaagagaaagcaggaaagatccaaaattgacaccctaacatcacaattaaaagaactagaaaagcaagagcaaacacattcaaaagctagcagaaggcaagaaataactaaaatcagagcagaactgaaggaaatagagacacaaaaaacccttcaaaaaattaatgaatccaggagctggttttttgaaaggatcaacaaaatagatagactgctagcaagactaataaagagaaaaagagagaagaatcaaatagatgcaataaaaaatgataaaggggacatcaccaccaatcccacagaaatacaaactaccatcagagaatactacaaacacctctacgcaaataaactagaaaatctagaagaaatggataaattcctcgacacatacactctcccaagactaaaccaggaagaagttgaatctctgaatagaccaataacaggatctgaaattgtggcaataatcaatagcttaccaaccaaaaagagtccaggaccagatggattcacagccgaattctaccagaggtacaagaaggaactggtaccattccttctgaaactattccaatcaatagaaaaagagggaatcctccctaactcattttatgaggccagcatcattctgataccaaagccaggcagagacacaaccaaaaaagagaattttagaccaatatccttgatgaacattgatgcaaaaaccctcaataaaatactggcagaccgaatccagcagcacatcaaaaagcttatccaccatgatcaagtgggcttcatccctgggatgcaaggctggttcaatatacacatatcaataaatgtaatccagcatataaacagagccaaagacaaaaaccacatgattatctgcatagatgcagaaagggcctttgacaaaattcaacaacccttcatgctaaaaactcttaataaattagtgttggaagttctggccagggcaattaggcaggagaaggaaataaagggtattcaagtaggaaaagaggaagtcaaattgtccctgtttgcagatgacatgattgtatatctagaaaaccccattgtctcagcccaaaatctccttaagctgataagcaacttcagcaaagtctcaggatacaaaatcaatgtacaaaagtcacaagcattcttatacaccaataacagacaaacagagagccaaatcatgagtgaactcccattcacaattgcttcaaagagaataaaatacctaggaatccaacttacaagggatgtgaaggacctcttcaaggagaactacaaaccactgctcaacgaaataaaagaggatacaaacaaatggaagaacattctatgctcatgggtaggaagaattaatatcgtgaaaatggccatactgcccaaggtaatttacagattcaatgccatccccatcaagctaccaatgcctttcttcacagaattggaagaaactactttaaagttcatatggaaccaaaaaagagcccgcattgccaaggcaatcctaagccaaaagaaaaaagctggaggcatcacactacctgacttcaaactatactacaaggctacagtaaccaaaacagcatggtactggtaccaaaacacagatatagaacaatggaacagaacagagccctcagaaataatgctgcatatctacaactatctgatctttgaccaacctgagaaaaacaagcaatggggaaaggattccctatttaataaatggtgctgggaaaactggctagccatatgtagaaagctgaaactggatcccttccttacaccttatacaaaaatcaattcaagatggattaaagacttaaacgttagacctaaaaccataaaaaccctagaagaaaacctaggcattaccattcaggacataagcatgggtaaggacttcatgtctaaaacaccaaaagcaaaggcaacaaaagccaaaattgacaaatgggatctaattaaactaaagagtttctgcacagcaaaagaaactaccatcagagtgaacaggcaacctacaaaatgggagaaaattttcgcaacctactcatctgacaaagggctaatatccagaatctacaatgaactcaaacaaatttacaagataaaaacaaacaaccccatcgaaaagtgggtgaaggacatgaacagacacttctcaaaagaagacatttatgcagccaaaaaatacatgaaaaaatgctcatcatcactggccatcagagaaatgcaaatcaaaagcttccagaggaaggatcaggcagcaatatttgctattctgcagcctccactggtgataaccaggcaaacagggtctggagtggacctgaagcaaactccaacagacctgaagctgagggacctaactgttagaagaaaaatgaacaaacagaaagaaagatagagagaaaccagaggagaagttaaaaattctaaaaaccagagcacctctgctcctccaaaggactgcagttccttggccgatcccaaaaaaatacaaactaccatcagagaatactataaacacctctatccaaataaactagaaaatcaagaagaaatggataaatttctggacacatacaccctcccaagattaaaccaggaagaagttgaatctctgaatagaccaataacaggttctgaaattgaggcaataggaaattatcaaagaaataattgaagaaatttacttccaaagaagtaagttttacttctttgcagaattaaagtcttctgcactgagagcttagcaaaatggataaaatggacccataccaagacattcatcatggaatttcacactattggaaatgcaaagattctgcaggcttcttcgtttacggaagta

SEQ ID NO: 18484 - DNA, 3060 bp, Homo sapiens
  SIMILAR (358)..(2970): 871254mologous to Homo sapiens putative p150,accession number U93565,Smith-Waterman Score=3906.
atggtaaagggatcaattcaacaagaggagctaactatcctaaacatttatgcacccaatacaggagcacccagattcataaagcaagtcctgagtgacctacaaagagacttagactcccacacattaataatgggagactttaacaccccactgtcaacattagacagatcaacgagacagaaagtcaacaaggatacccaggaattgaactcagctctgcaccaagcagacctaatagacatctacagaactctccaccccaaatcaacagaatatacatttttttcagcaccacaccacacctattccaaaattgaccacatagttggaagtaaagctctcctcagcaaatgtaaaagaacagaaattataacaaactatctctcagaccacagtgcaatcaaactagaactcaggattaagaatctcactcaaagccgctcaactacatggaaactgaacaacctgctcctgaatgactactgggtacataacgaaatgaaggcagaaataaagatgttctttgaaaccaacgagaacaaagacaccacataccagaatctctgggacgcattcaaagcagtgtgtagagggaaatttatagcactaaatgcctacaagagaaagcaggaaagatccaaaattgacaccctaacatcacaattaaaagaactagaaaagcaagagatcaacaaaattgatagaccgctagcaagactaataaagaaaaaaagagagaagaatcaaatagacacaataaaaaatgataaaggggatatcaccaccgatcccacagaaatacaaactaccatcagagaatactacaaacacctctacacaaataaactagaaaatctagaagaaatggatacattcctcgacacatacactctcccaagactaaaccaggaagaagttgaatctctgaatagaccaataacaggatctgaaattgtggcaataatcaatagtttaccaaccaaaaagagtccaggaccagatggattcacagccgaattctaccagaggtacaaggaggaactggtaccattccttctgaaactattccaatcaatagaaaaagagggaatcctccctaactcattttatgaggccagcatcattctgataccaaagccgggcagagacacaaccgaaaaagagaattttagaccaatatccttgatgaacattgatgcaaaaatcctcaataaaatactggcaaaccgaatccagcagcacatcaaaaagcttatccaccatgatcaagtgggcttcatccctgggatgcaaggctggttcaatatacgcaaatcaataaatgtaatccagcatataaacagagccaaagacaaaaaccacatgattatctcaatagatgcagaaaaagcctttgacaaaattcaacaacccttcatgctaaaaactctcaataaattaggtattgatgggatgtatttcaaaataataagagctatctatgacaaacccacagccaatatcatactgaatgggcaaaaactggaagcattccctttgaaaactggcacaacacagggatgccctctctcaccgctcctattcaacatagtgttggaagttctggccagggcaatcaggcaggagaaggaaataaagggtattcaattaggaaaagaggaagtcaaattgtccctgtttgcagacgacatgattgtttatctagaaaaccccatcgtctcagcccaaaatctccttaagctgataagcaacttcagcaaagtctcaggatacaaaatcaatgtacaaaaatcacaagcattcttatacaccaacaacagacaaacagagagccaaatcatgagtgaactcccattcacaattgcttcaaagacaataaaatacctaggaatccaacttacaagggatgtgaaggacctcttcaaggagaactacaaaccactgctcaaggaaataaaagaggacacaaacaaatggaagaacattccatgctcatgggtaggaagaatcaatatcgtgaaaatggccatactgcccaaggtaatttacagattcaatgccatccccatcaagctaccaatgactttcttcacagaattggaaaaaactactttaaagttcatatggaaccaaaaaagagcccgcatcgccaagtcaatcctaagccaaaagaacaaagctggaggcatcacactacctgacttcaaactatactacaaggctacagtaaccaaaacagcatggtactggtaccaaaacagagatatagatcaatggaacagaacagagccctcagaaataatgccgcatatctacaactatctgatctttgacaaacctgagaaaaacaagcaatggggaaaggattccctatttaataaatggtgctgggaaaactggctagccatatgtagaaagctgaaactggatcccttccttacaccttatacaaaaatcaatccaagatggattaaagatttaaacgttagacctaaaaccataaaaaccctagaagaaaacctaggcattacctttcaggacataggcgtgggcaaggacttcatgtccaaaacaccaaaagcaatggcaacaaaagccaaaattgacaaatgggatctaattaaactaaagagcttctgcacagcaaaagaaactaccatgagagtgaacaggcaacctacaacatgggagaaaattttcgcaacctacgcatctgacaaagggctaatatccagaatctacaatgaactcaaacaaatttacaagaaaaaaacaaacaaccccatcaaaaagtgggcgaaggacatgaacagacacttctcaaaagaagacatttatgcagccaaaaaacacatgaagaaatgctcatcatcactggccatcagagaaatgcaaatcaaaaccactatgagatatcatctcacaccagttagaatggcaatcattaaaaagtcaggaaacaacagaatgattccagctaaacctcaaagcagctgcactaaggagctccctacagccacaggatatgtatctctggagtcacagggccacaactga

SEQ ID NO: 18485 - DNA, 3285 bp, Homo sapiens
  SIMILAR (2129)..(3052): 901254mologous to Homo sapiens putative p150,accession number U93563,Smith-Waterman Score=1509.
atggggaaaaaacagagcagaaaaactgcaaactctaaaaagcagagcacctctcctcctccaaaggaacacagttcctcaccagcaacggaacaaagctggacggagaatgactttgacgagctgagagaagaaggcttcagacgatcaaattactctgagctacgggaggacattcaaaccaaaggcaaagaagttgaaaactttgaaaaaaatttagaagaatgtataactacaataaccaatacagagaagtgcttaaaggagctgatggagctgaaagccaaggctcaagaactacgtgaagaatgcagaagcctcaggagccgatgcaatcaactggaagaaagggtatcagcgatggaagatgaaatgaatgaaatgaagcgagaagggaagtttagagaaaaaagaataaaaagaaatgagcaaagcctccaagaaatatgggactatgtgaaaagaccaaatctacgtctgactggtgtacctgaaagtgatggggagaatggaaccaagttggaaaacactctacaggatattatccaggagaacttccccaatctagcaaggcaggccaacattcagattcaggaaatacagagaatgccacaaagatactcctcgagaagagcaacaccaagacacataattgtcagattcaccaaagttgaaatgaaggaaaaaatgttaagggcagccagagagaaagacagatcaacgagacagaaagtcaacaagaatacccaggaattgaactcagctctccaccaagcggacctaatagacatctacagaactctccaccccaaatcaacagaatatacgtttttttcagcaccacaccacacctattccaaaattggccacatagttggaagtaaagctctcctcagcaaatgtaaaagaacagaaattataacaaactatctctcagaccacagtgcaatcaaactagaactcaggattaagaatctcactcaaaaccgctcaactacatggaaactgaacaacctgctcctgaatgactactgggtacataacgaaatgaaggcagaaataaagatgttctttgaaaccaacgagaacaaagacacaacataccagaatctctgggacacattcaaagcagtgtgtagagggaaatttatagcactaaatgcccacaagagaaagcaggaaagatccaaaattgacaccctaacatcacaattaaaagaactagaaaagcaaaagcaaacacattcaaaagctagcagaaggcaagaaataactaaaatcagagcagaactgaaggaaatagagacacaaaaaacccttcaaaaaaatcaatgaatccaggagctggttttttattttttatttttgaaaagatcaacaaaattgatagaccgctagcaagactaataaagaagaaaagagagaagaatcaaatagatgcaataaaaaatgataaagaggatatcaccaccaatcccacagaaatacaaactaccatcagagaatactataaacacctctatgcaaataaactcgaaaatctagaagaaatggataaattcctcgacccatacactttcccaagactaaaccaggaagaagttgaatctctgaatagaccaataacaggatctgaaattgtggcaataatcaatagcttaccaaccaaaaagagtccaggaccagatggattcacagctgaattctaccagaggtacaaggaggaactggtaccattccttctgaaattattccaatcaatagaaaaagagggaatcctccctaactcattttatgaggccagcatcattctgataccaaagcctggcagagacacaaccaaaaaagagaattttagaccaatatccttgatgaacattgatgcaaaaatcctcaataaaatactggcaaaacgaatccagcagcacatcaaaaagcttatccaccatgatcaagtgggcttcatccctgggatgcaagggctggttcaatatacgcaaatcaataaacgtaatccagcatataaacagagccaaagacaaaaaccacatgattatctcaatagatgcagaaaaggcctttgacaaaattcaacaacccttcatgctaaaaactctcaataaattagagaataaaatacctaggaatccaacttacaagggatgtgaaggacctcttcaaggagaactacaaaccactgctcaaggaaataaaagaggacacaaacaaatggaagaacattccatgctcatgggtaggaagaatcaatatcatgaaaatggccatactgcccaaggtaatttatagattcaatgccatccccatcaagctaccaatgcctttcttcacagaattggaaaaaactactttaaagttcatatggaaccaaaaaagagcctgcatcaccaactcaatcctaagccaaaagaacaaagctggaggcatcacactacctgacttcaaactatactacaaggctacagtaaccaaaacagcatggtactggtaccaaaacagaaatatagatcaatggaacagaacagagccctcagaaataacgccgcatatctacaactatgtgatctttgacaaacctgacaaaaacaagaaatggggaaaggattccctatttaataaatggtgctgggaaaactggctagccatatgtagaaagctgaaactagatcccttccttacaccttatacaaaaatcaattcaagatggattaaagacttaaacgttagacctaaaaccataaaaaccctagaagaaaacccaggcagtaccattcaggacataggcatgggcaaggacttcatgtctaaaacaccaaaagcaatggcaacaaaagacaaaattgacaaatgggatctaattaaactaaagagcttctgtacagcaaaagaaactaccatcagagtgaacaggcaacctacagaatgggagaaaatttttgcaacctactcatctgacaaagggctaataatatccagaacctacatgaactcaaacaaatttacaagaaaaaaacaaagaaccccatcaaaaagtgggcgaaggacatgaacagacacttctcaaaagaagacatttatgcagccaaaaaacacatgaaaaaatgctcatcatcactggccatcagagaaatgcaaatcaaaaccactatgagatatcatctcacaccagttagaatggcaatcattaaaaagtcaggaaacaacagaggatctgaagcccagatcaatgctgtcttggtgcttcggacccagcctcatattgagtga

SEQ ID NO: 18486 - DNA, 7444 bp, Homo sapiens
  SIMILAR (1129)..(3936): 981254mologous to Homo sapiens putative p150,accession number U93563,Smith-Waterman Score=4773.
atggggaaaaaacagaacagaaaaactggaaactctaaaacgcagagtgcctctcctcctccaaaggaacgcagttcctcaccagcaacggaaaaaagctggatggagaatgactttgacgagctgagagaagaaggtttcagacgatcaaattactctgagctacgggaggacattcaaaccaaaggcaaagaagttgaaaactttgaaaaaaatttagaagaatgtataactagaataaccaatacagagaagtgcttaaaggagctgatggagctgaaaaccaaggctcgagaactacgtgaagaatgcagaagcctcaggagccgatgtgatcaactggaagaaagggtatcagcaatggaagatgaaatgaatgaaatgaagcgagaagggaagtttagagaaaaaagaataaaaagaaatgagcaaagcctccaagaaatatgggactatgtgaaaagaccaaatctacgtctgactggtgtacctgaaagtgacggggagaatggaaccaagttggaaaacactctgcaggatattatccaggagaacttccccaatctagcaaggcaggtcaatgttcagattcaggaaatacagagaacgccacaaagatactcctcgagaagagcaactccaagacacataattgtcagattcaccaaagttgaagtgaaggaaaaaatgttaagggcagccagagagaaaggtcgggttaccctcaaagggaagcccatcagactaacagcggatctctcggcagaaaccctacaagccagaagagagtgggggccaatattcaacattcttaaagaaaagaattttcaacccagaatttcatatccagccaaactaagcttcataagtgaaggagaaataaaacactttacagacaagcaaatgctgagagattttgtcaccaccaggcctgccctaaaagagctcctgaaggaagtgctaaacatggaaaggaacaaccagtaccagccgctgcaaaatcatgccaaaatacagatcaacgagacagaaagtcaacaaggatacccaggaattgaactcagctctgcaccaagcggacctaatagacatctacagaactctccacaccaaatcaacagaatatactttttttcagcaccacaccacacctattccaaaattgaccacatagttggaagtaaagctctcctcagcaaatgtaaaagaacagaaattataacaaactatctctcagaccacagtgcaatcaaactagaactcaggattaagaatctcaatcaaagccgctcaactacatggaaactgaacaacctgctcctgaatgactactgggtacataacgaaatgaaggcagaaataaagatgttctttgaaaccaacgagaacaaagacacaacataccagaatctctgggacgcattcaaagcagtgtgtagagggaaatttatagcactaaatgcccacaagagaaagcaggaaagatccaaaattgacaccctaacatcacaattaaaagaactagaaaagcaagagcaaacacattcaaaagctagcagaaggcaagaaataactaaaatcagagcagaactgaaggaaatagagacacaaaaaacccttcaaaaaatcaatgaatccaggagctggttttttgaaaggatcaacaaaattgatagaccgctagcaagactaataaagaaaaaaagagaggagaatcaaatagacacaataaaaaatgataaaggggatatcaccaccgatcccacagaaatacaaactaccatcagagaatactacaaacacctctatgcaaataaactagaaaatctagaagaaatggataaattccttgacacatacactctcccaagactaaaccaggaagaagttgaatctctgaatagaccaataacaggagctgaaattgtggcaataatcaatagtttaccaaccaaaaagagtccaggaccagatggattcacagctgaattctaccagaggtacaaggaggaactggtaccattccttctgaaactattccaatcaatagaaaaagagggaatcctccctaactcattttatgaggccagcatcattctgataccaaagccgggcagagacacaaccaaaaaagagaattttagaccaatatccttgatgaacattgatgcaaaaatcctcaataaaatactggcaaaccgaatccagcagcacatcaaaaagcttatccaccatgatcaagtgggcttcatccctgggatgcaaggctggttcaatatacgcaaatcaataaatgtaatccagcatataaacagagccaaagacaaaaaccacatgattatctcaatagatgcagaaaaagcctttgacaaaattcaacaacccttcatgctaaaaactctcaataaattaggtattgatgggacgtatttcaaaataataagagctatctatgacaaacccacagccaatatcatactgaatgggaaaaaactggaagcattccctttgaaaactggcacaagacagggatgccctctctcactgctcctattcaacatagtgttggaagttctggccagggcaatcaggcaggagaaggaaataaagggtattcagttaggaaaagaggaagtcaaattgtccctgtttgcagacgacatgattgtttatctagaaaaccccatcgtctcagcccaaaatctccttaagctgataagcaacttcagcaaagtctcaggatacaaaatcaatgtacaaaaatcacaagcattcttatacaccaacaacagacaaacagagagccaaatcatgagtgaactcccattcacaattgcttcaaagagaataaaatacctaggaatccaacttacaagggatgtgaaggacctcttcaaggagaactacaaaccactgctcaaggaaataaaagaggatacaaacaaatggaagaacattccatgctcatgggtaggaagaatcaatatcgtgaaaatggccatactgcccaaggtaatttacagattcaatgccatccccatcaagctaccaatgactttcttcacagaattggaaaaaactactttaaagttcatatggaaccaaaaaagagcccgcatcgccaagtcaatcctaagccaaaagaacaaagctggaggcatcacactacctgacttcaaactatactacaaggctacagtaaccaaaacagcatggtactggtaccaaaacagagatatagatcaatggaacagaatagagccctcagaaataacgccgcatacctacaactatctgatctttgacaaacctgagaaaaacaagcaatggggaaaggattccctatttaataaatggtgctgggaaaactggctagccatatgtagaaaactgaaactggatcccttccttacaccttatacaaaaatcaattcaagatggattaaagatttaaacgttagacctaaaaccataaaaaccctagaagaaaacctaggcattaccattcaggacataggcgtgggcaaggacttcatgtccaaaacaccaaaagcaatggcaacaaaagccaaaattggcaaatggtacctaattaaactaaagagcttctgcacagcaaaagaaactaccatcagagtgaacaggcaacctacaacatgggagaaaattttcgcaacgtactcatctgacaaagggctaatatccagaatctacaatgaactcaaacaaatttacaagaaaaaaacaaacaaccccatcaaaaagtgggcgaaggacatgaacagacacttctcaaaagaagacatttatgcagccaaaaaatacgtgaaaaaatgctcatcatcactggccatcagagaaatgcaaatcaaaaccactatgagataccatctcacaccagttagaatggcaatcattaaaaagtcaggaaacaacagcaaaaagaacaaagctggaggaatcatgccagctgacttcaaactatactacaaggctatgggaacaaaaacagcatgggacatggatgaaactgaaaaccatcatgctcagcaaactaacacaagaacagaaaaacaaacaccacatgttctcactcataagtgggagttgaacaatgagaacacttggatacaggaaggcgaacatcacacaccggggctggtgtgagatggtatctcattgtggttttgatttgcatttctctgatggccagtgatgatgagcattttttcatgtattttttggctgcataaatgtcttcttttgagaagtgtctgttcatgtccttcgcccactttttgatggggttgtttgtttttttcttgtaaatttgtttgagttcattgtagattctggatattagccctttgtcagatgagtaggttgcgaaaattttctcccatgttgtaggttgcctgttcactctgatggtagtttcttttgctgtgcagaagctctttagtttaattagatcccatttgtcaattttggcttttgttgccattgcttttggtgttttggacatgaagtccttgcccacgcctatgtcctgaatggtaatgcctaggttttcttctaggatttttatggttttaggtctaacgtttaaatctttaatccatcttgaattgatttttgtataaggtgtaaggaagggatccagtttcagctttctacatatggctagccagttttcccagcaccatttattaaatagggaatcctttccccgttgcttgtttttctcaggtttgtcaaagatcagataattgtaggtatgcggcgttatttctgagggctctgttctgttccattgatctatatctctgttttggtaccagtaccatgctgttttagttactgtagccttgtagtatagtttgaagtcaggtagtgtgatgcctccagctttgttcttttggcttaggattgacttggcgatgcgggctcttttttggttccatatgaaatttaaagtagttttttccaattctgtgaagaaagtcattggtagcttgatggggatggcattgaatctgtaaattaccttgggcagtatggccattttcacgatattgattcttcctacccatgagcatggaatgttcttccatttgtttgtatcctcttttatttccttgagcagtggtttgtagttctccttgaagaggtccttcacatcccttgtaaattggattcctaggtattttattctctttgaagcaattgtgaatgggagttcactcatgatttggctctctgtttgtctgttgttggtgtataagaatgcttgtgatttttgtacattgattttgtatcctgagactttgctgaagttgcttatcagcttaaggagattttgggctgagacgatggggttttctagataaacaatcatgtcgtctgcaaaaagggacaatttgacttcctcttttcctaattgaataccctttatttccttctcctgcctgattgccctggccagaacttccaacactgtgttgaataggagtggtgagagagggcatccctgtcttgtgccagttttcaaaggaatgcttccagtttttgcccattcagtatgatattggcagccttgcatcccagggatgaagcccacttgatcatggtggataagctttttgatgtgctgctggattcggtttgccagtattttattgaggatttttgcatcaatgttcatcaaggatattggtctaaaattctcttttttggttgtgtctctgcccggctttggtatcagaatgatgctggcctcataaaatgagttagggaggattccctctttttctattgattggaatagtttcagaaggaatggtaccagttcctccttgtacctctggtagaattcggctgtgaatccatctggtcctggactctttttggttggtaaactattgattattgccacaatttcagctcctgttattggtctattcagagattcaacttcttcctgctttagtcttgggagagtgtatgtgtcgaggaatttatccatttcttctagattttctggtttatttgcgtagaggtgtttatagtattctctgatggtagtttgtatttctgtgggatcggtggtgatatcccctttatcattttttattgtgtctatttgattctcctctctttttttctttattagtcttgctagcggtctatcaattttgttgatcctttcaaaaaaccagctcctggattcattgattttttgaagggttttttgtgtctctatttccttcagttctgctctgattttagttatttcttgccttctgctagcttttgaatgtgtttgctcttgcttttctagttcttttaattgtgatgttagggtgtcaattttggatctttcctgctttctcttgtgggcatttagtgctataaatttccctctacacactgctttgaatgcgtcccagagattctggtatgttgtgtctttgttctcgttggtttcaaagaacatctttatttctgccttcatttcgttatgtacccagtagtcattcaggagcaggttgttcagtttccatgtagttgagcggctttgagtgagattcttaatcctgagttctagtttgattgcactgtggtctgagagatagtttgttataatttctgttcttttacatttgctgaggagagctttacttccaactatgtggtcaattttggaataggtgtggtgtggtgctgaaaaaaatgtatattctattgatttggggtggagagttctgtagatgtctattaggtccgcttggtgcagagatgagttcaattcctgggtatccttgttgactttctgtctcattgatctgtctaatgttaacagtgaggtgttaaagtctcccattattaatgtgtgggagtctaagtctctttgtaggtcactcagaacttgctttatgaatctgggtgctcctgtattgggtgcatatatatttaggatagttagctcttcttgttgaattgatccctttaccattatgtaatggccttctttgtctcttttgatcttcccttcttgcttcatttcattcatttcatcttccattgctgataccctttcttccagttgatcgcatcggctcctgaggcttctgcattcttcacgtagttctcgagccttggttttcagctccatcagctcctttaagcacttctctgtattggttattctagttatacattcttctaaatttttttcaaagttttcaacttctttgcctttggtttgaatgtcctcccgtagctcagagtaatttgatcgtctgaaaccttcttctctcagctcgtcaaagtcattctccatccagctttgatccgttgctggtgaggaactgcgttcctttggaggaggagaggcgctctgcattttagagtttccagtttttctgttctgttttttccccat

SEQ ID NO: 18487 - DNA, 5095 bp, Homo sapiens
  SIMILAR (3098)..(5092): 871254mologous to Homo sapiens putative p150,accession number U93563,Smith-Waterman Score=2932.
atggaaggtgaaatgaatgaaatgaagcgagaagggaagtttagagaaaaaagaataaaaagaaatgagcaaagcctccaagaaatatgggactatgtgaaaagaccaaatctacgtctgattggtgtacctgaaagtgatggggagaatggaaccaagttggaaaacactctgcaggatattatccaggagaacttccccaatctagcaaggcaggccaacgttcagattcaggaaatacagagaacgccacaaagatactcctcgagaagagcaactccaagacacataattgtcagattcaccaaagttgaaatgaaggaaaaaatgttaagggcagccagagagaaagacagatcaacgagacagaaagtcaacaaggatacccaggaattgaactcagctctgcaccaagcggacctaatagacatctacagaactctccacctcaaatcaacagaatatacatttttttcagcaccacaccacacttattccaaaattgaccacatacttggaagtaaagctctcctcagcaaatgtaaaagaacagaaattataacaaactatctctcagaccacagtgcaatcaaactggaactcaggattaagaatctcactcaaaaccgctcaactacatggaaactgaacaacctgctcctgaatgactactgggtacataacaaaatgaaggcagaaataaaaatgttctttgaaaccaacgagaacaaagacacaacataccagaatctctgggacacattcaaagcagtgtgtagagggaaatttatagcactaaatgcccacaagagaaagcaggaaagatccaaaattgacaccctaacatcacaattaaaagaactagaaaagcaagagcaaacacattcaaaagctagcagaaggcaagaaataactaaaatcagagcagaactgaaggaaatagagacacaaaaaacccttcaaaaaattaatgaatccaggagctggttttttgaaaggatcaacaaaattgatagaccgctagcaagactaataaagaaaaaaagagagaagaatctaatagacgcaataaaaaatgataaaggggatatcaccaccgatcccacagaaatacaaactaccatcaggagaatactacaaacacctctacgcaaataaactagaaaatctagaagaaatggataaattcctcgacacatacactctcccaagactaaaccaggaagaagttgaatctctgaatagaccaataacaggctctgaaattgtggcaataatcaatagtttaccaaccaaaaagagtccaggaccagatggattcacagccgaattctaccagaggtacaaggaggaactggtaccattccttctgaaactattccaatcaatagaaaaagagggaatcctccctaactcatgttatgaggccagcatcattctgataccaaagccaggcagagacacaacaaaaaaagagaattttagaccaatatccttgatgaacattgatgcaaaaatcctcaataaaatactggcaaaacgaatccagcagcacatcaaaaagcttatccaccatgatcaagtgggcttcatccctgggatgcaaggctggttcaatatacgcaaatcaataaatgtaatccagcatataaacagagccaaagacaaaaaccacatgattatctcaatagatgcagaaaaagcctttgacaaaattcaacaacccttcatgctaaaaactctcaataaattagaattggaagaaactactgtaaagttcatatggaaccaaaaaagagcccacatcgccaagtcaatcctaagccaaaagaacaaagctggaggcatcacactacgtgacttcaaactatactacaaggctacagtaaccaaaacagcatggtactggtaccaaaacagagatatagatcaatggaacagaacagagccctcagaaataacgctgcatatctacaactatctgatctttgacaaacctgagaaaaacaagcaatggggaacggattccctatttaataaatggtgctgggaaaactggctagccatatgtagaaagctgaaactggatcccttccttacaccttatacaaaaatcaattcaagatggattaaagacttaaacgttagacctaaaaccataaaaaccctagaagaaaacctaggcattaccattcaggacataggcatgggcaaggacttcatgtctaaaacaccaaaagcaatggcaacaaaagccaaaattgacaaatgggatctaattaaactaaagagcttctgcacagcaaaagaaactaccatcagagtgaacaggcaacctacaaaatgggagaaaattttcacaacctactcatctgacaaagggctaatatccagaatctacaatgaactcaaacaaatttacaagaaaaaaacaaacaaccccatcaaaaagtgggcaaaggacatgaacagacacttctcagaagaagacatttatgcagccaaaaaacacatgaaaaaatgctcatcatcactggccatcagagaaatgcaaatcaaaaccacaatgagataccatctcacaccagttagaatggcaatcattaaaaagtcaggaaacaacaggtgctggagaggatgtggagaaataggaacacttttacactgttggtgggactgtaaactggttcaaccattgtggaagtcagtgtggcaattactcagggatctagaactagaaataccatttgacccagccatcccattactgggtatatacccaaatgactataaatcatgctgctataaagacacatgcacacgtatgtttattgcggtattattcacaatagcaaagacttggaaccaagccaaatgtccaacaatgatagactggattcagaaaatgtggcacatatacaccatggaatactatgcagccataaaaaaggatgagttcatgtcctttgtagggacatggatgaaattggaaatcatcattctcagtaaactatcgcaagaacaaaaaaccaagcaccgcatattctcactcatagaaataaaaactaccataagagaatactataaacacttctacacaaataaactagaaaatctagaagaaattgataaattcctggaaacatacaccctcctaagtctaaaccaggaggaagtcgaatctctgaatagaccaataacaagtagtgaaattgaggaagtaattaatagcttaccaaccaaaaaagtccaggaccagacaaagtcacaaccagattctatcagagaccacagtacaattaaactacaactcaggattaagaatctcactcaaaactgctcaactacatggaaactgaacaacctgctcctgaatgactactgggtacataacgaaatgaaggcagaaataaagatgttctttgaaaccgacgagaacaaagacacaacataccagaatctctggaacacattcaaagcagtgtgtagagggaaatttataccactaaatgcccacaagagaaagcaggaaagatccaaaattgacaccctaacatcacaattaaaagaactagaaaagcaagagcaaacacattcaaaagctagcagaaggcaagaaataactaaaatcagagcagaactgaaggaaatagagacacaaaaaacccttcaaaaaattaatgaatccaggagctggttttttgaaaggatcaacaaaattgatagaccgctagcaagactaacaaagaaaaaaagagagaagaatctaatagacgcaataaaaaatgacaaaggggatgtcatcaccgatcccacagaaatacaaactaccatcagagaatactacaaacacctctatgcaaacaaactagaaaatctagaagaaatggataaattcctcgacacataccctctcccaagactaaaccaggaagaagttgaatctctgaatagaccaataacaggatctgaaattgtggcaataatcaatagcttaccaaccaaaaagagtccaggaccagatggattcacagccgaattctaccagaggtacaacgaggaactggtaccattccttctgaaactattccaatcagtagaaaaagagggaatcctccctaactcattttatgaggccagcatcattctgatacccaagccgggcagagacacaaccaaaaaagagaattttagaccaatatccttgatgaacattgatgcaaaaatcctcaataaaatactggcaaaccgaatccagcagcacatcaaaaagcttatccaccatgatcaagtgggcttcatccctgggatgcaaggctggttcaatagacacaaatcaataaatgtaatccagcatataaacagagccaaagacaaaaaccacatgattatctcaatagatgcagaaaaggcctttgacaaaattcaacaacctttcgtgctaaaaactcccaataaattaggtattgatgggacgtatttcaaaataataagagctatctatgacaaacccacagctaatatcatactgaatgggcaaaaactggaagcattccctttgaaaactggcacaagacagggataccctctctcaccactcctattcaacatagtgttgcaagttctggccaaggcaattaggcaggagaaggaaataaagggtattcaattaggaaaagaggaagtcaaattgtccccgtttgcagacgacatgattgtatatctagaaaaccccattgtctcagcccaaaatctccttaagctaataagcaacttcagcaaagtctcaggatacaaaatcaatgtacaaaaatcacaaacattcttatacatcagcaacagacaaacaatgagccaaatcatgagtgaactctcattcacaattgcttcaaagagaataaaatacctaggaatccaacttacaagggatgtgaaggacctcttcaaggagaactacaaaccactgctcaaggaaataaaagaggatacaaacaaatggaagaacattccatgctcatgggtaggaagaatcaatatcgtgaaaatggccatactgcccaaggtaatttacagattcaatgccatccccatctag

SEQ ID NO: 18488 - DNA, 2660 bp, Homo sapiens
  SIMILAR (2016)..(1690): 711254mologous to Mus musculus Pro-Pol-dUTPase polyprotein,accession number Y12713,Smith-Waterman Score=402.
ctaatgaacattgatgcaaaaatcctcaataaaatactggcaaaccaaatccagcagcacatcaaaaagcttatccactatgatcaagtcagcttcatccccaggatgaagcctgacaaaaataagcaatgaggaaaggatagcatgttgatcactacaggtcgacgaacatgggcttagatcaagctctccacggcaagaccgcgggacgataatgacgaaatgctgagcgtaacaagacgaagcgatagccatgacctggcggacatgcgctgctgacgacgctgatgcggagataagatcgatcgacccgacgggcacagtcgacagggaggacgagaaagcacactgtgagacgagcaagtggtagtgattgtcctcgatggaggcggagcatgtacgatgatcgacagcgtagccaatggatgcgaagtgcggacggcaattgaggctggaagcatcgacgagaatcgatgatctccgatacctggacttggaagctttcttaactgctgcttctctctgaggtgtcagactctgggaccacagatttcttgctatagcattgtcccatctcaagccagacccactgggatcccctgtccctgcaactgctgctccatcttccctgttgcttgtccaaagacaccagctactttctcccagccagttgctgtatctctccctggatgcatttgtagacccaggtgaacctgtatccgcttcactttctgctctgacaggaagtacaggtaggatccctgcagtccacagctcagaatcattcctggattttggtctgtatgtcctggactcacccaatctagtcacacggctcatcctgggaaagttcactatgttttcattgtgatgaacgcgaggtgactgtgcccatgtctgagagtctaggtgagtgtgtctgtgctgtttcaccatagtatattgatgtgtgagaagcagagaacctggatttctattttcataggtctctatagtaagagaatccatataaggagctgaactttggaactcaccctgagaaatctcatccgtaccgggatctgacttagttgatgagatcctggactttgagctgatagctataatgacatgagactttggggactcttcctttcttctgttgtggagtagtagactgatttcatcttgatagtctgggtcagtcatcccaactaacactgtaactcccttcttagcctgttgacttaaatgtaggaggagcccaaactgtccaggtggcaatcttaacttccagtttaatggaatcattgttgcatctcctggtggcagcattcctccctctggaactaagactgctaggccagcagaacataatgtcgtgggaacaggaagcaaaaattttgctagtggatcactaggggtgatggtgggtggtgccacttccaccccttgattcctggacctgtgaatcctagcagtgaattccatgagcacgagcccattttgcacttctttaggcaaaaagcgagtgccttgatcagaggcaatgctggatggaataccatgatggtggataaggcattctttgagtccatggatggtagtcttggaaaaagtgttgcgtgcaggataggcaaacccatatccagagtaagtgtctattccagtaaggtcaaacgtctgccctttccatgatagaggaggtccgatataatcaaccaataagtccagtgtgtttgctacttcttgctcaccagatccaatcagcataatgtcatcaatgtaatggaccagtgtgatatcttgtgaaagcaaaaagcaatcaagatctttccaaataagattatgatgcaaagctggaaagttgatatgcccctgaggtaggactgtaaaggtatattgctggccttgccagttgaagtcaaattgcttcttatgggccttatggatagagatggagaaaaaggcacttgccaagccagtggctgcataccaggtaccaggagatgtgttaatttgctcaagcaatgaaaccccacatctggtacaacagctgcaattggagtcaccacttggttaagcttacaataatccactgtcattctccaagatccatctgtcttctgacctctataagctcctactttaactggaggaccacagtgacattttgggtcccctggaatcaacgtcagctcagagccagtgtccagtagtccccaaagtgtctgatcatttcccttttcccaatgcacagttaccctggtaaaaggccagaggtctccctggcgaggctgtgcatgcatcttctgttgcaggtcagccactagcatgataagagcttgtgtctgtttgtccacaatttcagttctttttctacaggagataagcctctcagtcagggcaatcctagcagatttgaggttcaatatctgcttctgaagctgggagacagaatccttgagttcataattttctttcatcactttttccactgaatttaggggcaaccaaccagctttattatgttccttggttctccacatatggtcaaaggtattatgtgtagagtcactaaactccttgcctctcatgagcaatgaatcaagtgtgtcaaatgcatttattttggataactccctaaacagctcatgccaaggactatcagtgttctccat

SEQ ID NO: 18489 - DNA, 13234 bp, Homo sapiens
  SIMILAR (10877)..(13003): 951254mologous to Homo sapiens putative p150,accession number U93567,Smith-Waterman Score=3560.
atggggaaaaaacagagcagaaaaactggaaactctaaaaagcagagcacctctcctcctccaaaggatcgcagttcctcaccagcaatggaacaaaggtggacagagaatgactttgacgagttgagagaagaaggcttcagacgatcaaactacgagctacaggaggaaattcaaaccaaaggcaaagaagttaaaaactttgaaaaaaatttagatgaatgtataactagaataaccaatagagagaagtgcttaaaggagctgatgaagctgaaagccaagcctcgagaactatgtgaagaatgcagaagcctcaggagccaatgcgatcaagtggaagagagggtatcagtgatggaaaatgaaatgaatgaaatgaagcgagaaaggaagtttagagaaaaaagaataaaaagaaacgaacaaagactccaagaaatatgggactatgtgaaaagaccaaatctacgtctgattggtgtacctaaaagtgatggggagaatggaaccaagttggaaaacactctgcaggatattatccaagagaacttccccaatctagcaaggcaggccaacattcagattcaggaaatacagagaacgccacaaagatactcctcgagaagagcaactccaagacacataattgtcagattcaccaaagttaaaatgaaggaaaaaatgttaagagcagccagagagaaagactttaaaccaacaacgatcaaaagagacaaagaaggccattacataatggtaaagggatcaattcaacaagaagaactaactatcctaaatatatatgcacccaatacaggagcacccagattcataaagcaagtcctgagtgacctacaaagagacttagactcccacacattaataatgggagactttaacaccccactgtcaacattagacagatcaacgagacagaaagtcaacaaggatacccaggaattgaactcagctctgcaccaagcagacctaatagacatctacagaactctccaccccaaatcaacagaatatacatttttttcagcaccacaccacacctattccaaaattgaccacatacttggaagtaaagctctcctcagcaaatgtaaaagaacagaaattataacaaactatctctcagaccacagtgcaatcaaaccagaactcaggattaagaaactcactcaaaactgctcaactacatggaaactgaacaacctgctcctgaatagtcattcaggatacataacgaaatgaaggcagaaataaagatgttctttgaaaccaacgagaacaaagacacaacataccagaatctctgggacgcattccaagcagtgtgtagagggaaatttatagcactaaatgcccacaagagaaagcaggaaaagatccaaaattgacactctaacatcacaattaaaagaactagaaaagcaagagcaaacacattcaaaagctagcagaaggcaagaaataactgaaaatccgagcagaactgaaggaaattggggacacaaaaaaaccccttcaaaaaattaatgaatcccaggagctgggttttttgaaaggatcaacaaaattgatagaccgcttagcaaggacttaataaagaaaaaaagagagaagaaatcaaatagacacaataaaaaaatgataaagggaatatcaccaccaccgatcccacaggaaatacaaactacccatccagagattactacaaacacctctacgcaaataaactagaaaatctagaagaaatggataaattccttgacacatacgctctcccaagactaaaccaggaagaagttgaatctctgaatagaccaataacagggctctgaaattgtggcagtaatcaatagcttaccaacccaaaaaaagtccaggaccagatggattcacagccgaattccaccagaggtacaaggaggagctggtaccattccttctgaaactattccaatcaatagaaaaagagggaatcctccctaactcattctatgaggccagcatcatcctgataccaaagctgggcagagacacaaccaaaaaagagaattttagaccaatatccttgatgaacattgatgcaaaaatcctcaataaaatactggcaaaacgaatccagcagcacatcaaaaaagcttattcaccatgatcaagtgggcttcatccctgggatgcaaggctggtccactatacacaaatcaataaatgtaatccagcacataaacagaaccaaagataaaaaacacatgattatctcaatagatgcagaaaaggcatttgacaaaattcaacaacccttcatgctaaaaactctcaataaattaggtattgatgggacgtatctcaaaataataagcgctatctatgacaaacccacagccaatatcatactgaatgggcaaaaactggaagcactccctttgaaaactggcacaagacagggatgccctctttcaccacatactaccattaacatagtattctgccccatagtgttctggccagggcaatcaggcaagagaaggaaataaagggtattcaattaggaaaagaggaagtcaaattgtccctgtttgcagacgacatgattgtatatctagaaaaccccattgtctcagtccaaaatctccataagctgataagcaacttcagcaaagtctcaggatacaaaatcaatgtgcaaaaatcacaagcattcttatacaccaataacagagaaacagagaaccaaatcatgagtgaactcccattcacaattgcttcaaagagaataaaatacctaggaatccaccttacaagggacgtgaaggacctcttcaaggagaactacaaaccactgctcaatgaaattaaagaggatacaaacaaatggaagaacattccatgctcatgggtaggaagaatcaatattgtgaaaatggccatactgcccaaggtaatttatagattcaatgccatccccatcaagctaccaatgactttcttcacagaattggaaaaaaactactttaaagttcatatggaaccaaaaaagagcccacatcgccaagtcaatcctaagccaaaagaacaaagctggaggcatcatgctacctgacttcaaactataccacaaggctacagtaaccaaaacagcatggcactggtaccaaaacagcatggtactggtaccaaaacagagatatagatcaatggaacagaacagagccctcagaaataatgccgcatatctacaactatctgatctttgacaaacctttgcttgagaaaaacaagcaatggggaaaggattccctatttaataaatggtgctgggaaaactggctagccatatgtagaaagctgaaactggatcccttccttacaccttatacaaaaatcaattcaagatggattaaagatttaaacgttagacctaaaaccataaaaaccctagaagaaaacctaggcattaccattcaggacataggcgtgggcaaggacttcatgtccgaaacaccaaaagcaatggcaacaaaagccaaaattgacaaatgggatctaattaaactaaagagtttctgcacagcaaaagaaactaccatcagagtgaacaggcaacctacaacatgggagaaaattttcgcaacctactcatctgacaaagggctaatatccagaatctacaatgaactcaaacaaatttacaagaaaaaaaaaaaaacaaccccatcaaaaagtgggcaaaggacatgaacagacacttctcaaaagaagacatttatgcagccaaaaaacacatgaagaaatgctcatcatcactggccatcagagaaatgcaaatcaaaaccactatgagatatcatctcacaccagttagaatggcaatcattaaaaagtcaggaaacaacaggaaacatgagtctgtgatgaaagatataagtgaatccaaattcaagtttaattttggaaaccatatgagcacctgggggaaggggaggtttttggcagagcttcagcaggctgaaacatccctgcctgatggctctgaagagaacagagatctcccagcacagcatttgagctctgataagggacagactgcctccttaagtgggtccctgacccctgacccccgagcagcctaactgggaggcaccccccagcaggggcacactgacacctcacacggcagggtattccaacagacctgcagctgagggtcctgtctgttagaaggaaaactaacaaacagaaaggacatccacaccgaaaacgcatctgtacatcaccatcatcaaagaccaaaagtagataaaaccacaaagatggggaaaaaacagaacagaaaaactggaaactctaaaacgcagagcacctctcctcctccaaaggaacgcagttcctcaccagcaacggaccaaagctggatggagaatgattttgacgagctgagagaagaaggcttcagacgctcaaattactctgagctacgggaggacattcaaaccaaaggcaaagaagttgaaaactttgaaaaaaatttagaagaatgtataactagaataaccaatacagagaagtgcttaaaggagctgatggagctgaaaaccaaggctcgagaactacgtgaagaatgcagaagcctcaggagccaatgcgatcaactggaagaaagggtatcagcaatggaagatgaaatgaatgaaatgaagcaagaagggaagtttagagaaaaaagaataaaaagaaacgagcaaagcctccaagaaatatgggactatgtgaaaagaccaaatctacgtctgattggtgtacctgaaagtgatgcggagaatggaaccaagttggaaaacactctgcaggatattatccaggagactttccccaatctagcaaggcaggccaacgttcagattcaggaaatacagagaacgccacaaagatactcctcgagaagagcaactccaagacacataattgtcagattcaccaaagttgaaatgaaggaaaaaatgttaagggcagccagagagaaaggtcgagttaccctcaaagggaagcccatcagactaacagcggatctctcggcagaaaccctacaagccagaagagagtgggggccaatattgaacattcttaaagaaaagaattttcaacccagaatttcatatccagccaaactaagcttcataagtgaaggagaaataaaatactttacagacaagcaaatgctgaccgattttgtcaccagcaggcctgccctaaaagagctcctgaaggaagcgctaaacatggaaaggaacaaccggtaccagccactgcaaaatcatgccaaaatgtaaagaccatcgagactaggaagaaactgcatcaactaacgagcaaaatcaccagctaacatcataatgacaggatcaaattcacacataacaatattaactttaaatgtaaatggactaaattctccaattaaaagacacagactggcaagttggataaagagtcaagacccatcagtgtgctgtattcaggaaacccatctcatgtgcagagacacacataggctcaaaataaaaggatggaggaagatctaccaagcaaatggaaaacaaaaaaaaggcaggggttgcaatcctagtctctgataaaacagactttaaaccaacaaagatcaaaagagacaaagaaggccactgcataaaggtaaagggatcaattcaacaagaggagctaactatcctaaatatttatgcacccaatacaggagcaccaagattcataaagcaagtcctgagtgacctacaaagagacttagactcccacacattaataatgggagactttaacaccccactgtcaacattagacagatcaacgagacagaaagtcaacacggatacccaggaattgaactcagctctgcaccaagcggacctaatagacatctacagaactctccaccccaaatcaacagaatatacatttttttcagcaccacaccacacctattccaaaattgaccacatagttggaagtaaagctctcctcagcaaatgtaaaagaacagaaattataacaaaccatctctcagaccacagtgcaatcaaactagaactcaggattaagaatctcactcaaagccgctcaactacatggaaactgaacaacctgctcctgaatgactacttgggtacataacgaaatgaaggcagaaataaagatgttctttgaaaccaacgagaacaaagacacgacataccagaatctctgggacgcattcaaagcagtgtgtagagggaaatttctagcactaaatgcccacaagagaaagcaggaaagatccaaaattgacacccctaacatcacaattaaaagaactagaaaagcaagagcaaacacattcaaaagctagcagaaggcaagaaataacttaaaatcagagcagaactgaaggaaatagagacaaaaaaaaacacttcaaaaaattaatgaatccaggagctggtttttttgaaaggatcaacaaaattgatagaccgctagcaagactaacaaagagaaaaagagagaagaatcaaatacacgcaataaaaaatgataaaggggatatcaccaccgatcccacagaaatacaaactaccatcagagaatactacaaacacctctatgcaaataaactagaaaatctagaagaaatggataaattcctcaacacatacactctcccaagactaaaccaggaagaagttgaatctctgaatagaccaaataacagggatctgcaattgtggcaataatcaatagtttaccaaccaaaaagagtccaggaccagatggattcacagccgaattccaccagaggtacaaggaggaactggtaccattccttctgaaactattccaatcaatagaaaaagaaggaatcctccctaactcattttatgaggccagcatcattctgataccaaagccgggcagagacacaaccaaaaaagagaattttagaccaatatccttgatgaacattgatgcaaaattcctcaataaaatactggcaaacccgaatccagcagcaccatcaaaaagcttatccaccatgatcaaatgggcttcatccctggggatgcaaggctcctttcaatatacacaaatcaataaatgtaatccagcatataaacaagagccaaagacaaaaaccacatggttatcttcaataggatgcaggaaaagggccttttgacaaaattcaacaacccttcatgctaaaaactatcaataaaataggtattgatgggatgtatttcaaaataataagagctatctatgacaaaaccacagccaatatcatactgaatgggcaaaaactggaagcattccctttgaaaaccggcacaagacagggatgccctctctcacctcaccactcctattcaacatagtgttggaagttctggccagggcaatgaggcaggagaaggaaataaagggtattcaattaggaaaagaggaagtcaaattgtccctgtttgcagacgacatgattgtatatctagaaaaccccattgtctcagcccaaaatctccttaagctgataagcaacttcagcaaagtctcaggatacaaaatcaatgtacaaaaatcacaagcattcttatacaccaacaacagacaaacagagagccaaatcatgagtgaactcccattcacaattgcttcaaagagaataaaatacctaggaatccaacttacaagggatgtgaaggacctcttcaaggagaactacaaaccactgctcaaggaaataaaagaggacacaaacaaatggaagaacattccatgctcatgggtaggaagaatcaatatcgtgaaaatggccatactgcccaaggtaatttatagattcaatgccacccccatcaagctaccaatgactttcttcacagaattggaaaaaactactttaaagttcatatggaaccaaaaaaagagcccgtattgccaagtcaatcctaagccaaaagaacaaagctggaggcatcacactacctgacttcaaactatactacaaggctacagtaaccaaaacagcatggtactggtaccaaaacagagatatagatcaatggaacagaacagagccctcagaaataacgccgcatatctacaactatctgatctttgacaaacctgagaaaaacaagcaatggggaaaggattccctatttaataaatggtgctgggaaaactggctagccatatgtagaaagctgaaactggatcccttccttacaccttatacaaaaatcaattcaagatggattaaaaaaaaagatttaaacgttagacctaaaaccataaaaaccctagaagaaaacctaggcattaccattcaggacataggcgtgggcaaggacttcatgtccaaaacaccaaaagcaatggcaacaaaagccaaaattgacaaatgggatctaattaaactaaagagcttctgcacagcaaaagaaactaccatcagagtgaacaggcaacctacaaaatgggagaaaattttcgcaacctactcatctgacaaagggctaatatccagaatctacaatgaactcaaacaaatttacaagaaaaaaaacaaacaaccccatcaaaaagtgggcgaaggacatgaacagacacttctcaaaagaagacatttatgcagccgaaaaaacacatgaaaaaaatgctcatcatcactggccatcagagaaatgcaaatcaaaaccactatgagatatcatctcacaccagttagaatggcaatcatgaaaaaagtcaggaaacaacaggcttatgagggtgcacggaaagaagagattcctgtggcagaaacaaggggtgtgtgaggtggaaatacaggcgcaacgcgagtcggcccgcgatggaacggacagggaggacgcggaaagtccgcacgctgaagtcacagtgcccaggggcacgcgcactgaaattttaaccttgtgggcctcaagggatcgtcctgcgtcagcgtgtggagtaactgtcccaaaaggcagcactacccacccaggtggcatggacagggtctgtggtgtggacactgctgtgctccactggatgaaacaggttcagggaattagcaatctggaagtggagacaggacccagacgcagggacatggatgaagctggaagccgtcactctcagcaaactaacataggaacagaaaaccaaacaccgcatgttctcactcataagtggcagctgaacagaaactctgcctgtgacaagctgcacaagcctcactcagtgcctggcggggttgcagctggagacgtgggaggaaaaacaatttctaatcctggtgtttgtgcaatagagtatcaggtggacggttcacctcacatttgggaagatgtgaacaaaggtgtctacattgaagaggacagagctcctctcatggaacgcagttcctcaccagcaatggaacaaagctggatggagaatgactttgacgagctgagagaagaaggcttcagacgatcaaattactctgagctacgggaggacattcaaaccaaaggcaaagaagttgaaaactttgaaaaaagttcagaagaatatataactagaatagccaatacacagaagtgcttaaaggagctgatggagctgaaaaccaaggctccagaactacgtgaagaatgcagaagcctcaggagccaatgcgatcaactggaagaaagggcatcagtgatagacacacatagtctcaaaataaaaggatggaggaagatctaccaagcaaatggaaaacaaaaaaaggcaggggttgcaatcctagtctctgataaaacagactttaaaccaacaaagatcaaaagagacaaagaaggccattacataatggtaaagggatcaaatcaacaagaagagctaactatcctaaataaatatgcacccaatacaggagcacccagattcataaagcaagtcctgagtgacctacaaagagacttagactcccatacattaataatgggagactttaacaccccactgtcaacattagacagatcaacaagacagaaagtcaacaaggatacccaggaattgaactcagctctgcaccaagcggacctaatagacatctacagaactctccaccccaaatcaacagaatatacatttttttcagcaccacaccacacctatttcaaaactgaccacatagttggaagtaaagttctcctcagcaaatgtaaaagaacagaaattataacaaactgtctctcagaccacagtgcaatcaaactagaactcaggattaagaaactcactcaaaaccactcaactacatggaaactgaacaacttgctcctgaatgactactgcgtacataacgaaatgaaggcagaaataaagatgttttttgaaaccaacgagaacaaagacacaacataccagaatctctgggacgcattcaaagcagtgtgtagagggaaatttatagcactaaatgcccacaagagaaagcaggaaagatccaaaattgacaccctaacatcacaattaaaaaaactagaaaagcaagagcaaacacattcaaaagctagcagaaggcaagaaataactaaaatcagagcagaactgaaggaaatagagacacaaaaaacccttcaaaaaattaatgaatccaggagctggttttttgaaaggatcagcaaaactgataaaccgctagcaagactaataaagaagaaaagagagaagaatcaaatagatgcaataaaaaatgataaaggggatatcaccaccgatcccacagaaatacaaactaccatcagagaatactacaaacacctctacgccaaataaacttgaaaatctagaaggaatggataaattcctcgacacatacactctcccaagactaaaccaggaagaagttgaatctctgaatagaccaataacaggagctgaaattgtggcaataatcaatagcttaccaaccaaaaagagtccaggaccagatggattcacagccgaattctaccacaggtacaaggaggaactggtaccattccttctgaaactattccaatcaatagaaaaagagggaatcctccctaactcattttatgaggccagcatcatcctgataccaaagccaggcagagacacaacaaaaaaagagaattttagaccaatatccttgatgaacattgatggaaaaatcctcaataaaatactggcaaaccgaatccagcagcacatcaaaaagcttatccaccatgatcaagtgggcttcatccctgggatacaaggctggttcaatatacgcaaatcaatcaatgtaatccagcatataaacagaaccaaagacaaacaccacatgattatctcaatagatgcagaaaaggcctttgacaaaattcaacagcccttcatgctaaaaactctcaataaattaggtattgatgggacgtatctcaaaataataagagctatctatgacaaacccacagccaatatcatactgaatgggcaaaaactggaagcattccctttgaaaactggcacaagacagggatgccctctctcaccactcctattcaacatagtgttggaagttctggccagggcaattaggcaggagaaggaaataaagggtattcaattaggaaaagaggaagtcaaattgtccctgtttgcagacgacatgattgtatatctagaaaaccccattgtctcagcccaaaatctccttaagctgataagcaacttcagcaaagtctcaggatacaaaatcaatgtacaaaaatcacaagcattcttatacaccaacaacagacaaacagagagccaaatcatgagtgaactcccattcacaattgcttcaaagagaataaaatacctaggaatccaacttacaagggatgtgaaggacctcttcaaggagaactacaaaccactgctcaaggaaataaaagaggatacaaacaaatggaagaacatgccatgctcatgggtaggaagaatcaatatcgtgaaaatggccatactgcccaaggtaatttacagattcaatgccatccccatcaagctaccaatggctttcttcacagaattggaaaaaactactttaaagttcatatggaaccaaaaaagagcccgcatcgccaagtcaatcctaagtcaaaagaacaaagctggaggcatcacactacctaacttcgaactatactacaaggctacagtaaccaaaacagcatggtactggtaccaaaacagatatatagaccaatggaacagaacagagccctcagaaataacaccgcatatctacaactatctgatctttgacaaacctgggaaaaacaagcaatggggaaaggattccctatttaataaatggtgctgggaaaactggctagccatatgtagaaagctgcaactggatcccttccttacaccttatacaaaaatcaattcaagatggattaaagacttaaacgttagacctaaaaccataaaaaccctagaagaagacctaggcattaccattcaggacataggcatgggcaaggacttcatgtctaaaacaccaaaagcaatggcaacaaaagacaaaattgacaaatgggatctaattaaactcaagagcttctgcacagcaaaagaaaccaccatcagagtgaacaggcaacctacaaaatgggagaaaattttcgcaacctactcatttgacaaagggctaatatccagaatctacaatgaactccaacaaatttacaagaaaaaaacaaacaaccccatcaaaaagtgggcgaaggacatgaacagacacttctcaaaagaagacatttatgcagccaaaaaacacatgaaaaaatactcatcatcactggccattagagaaatgcaaatcaaaaccacaatgagataccatctcacacccgttagaatggcaaccattaaaaactcaggaaacaacaggtcattgtgtttttataaggaaaacctaagcctttgtctggcgatccttctctctgttcctgtgcaagaaggaggggccagaagttttctggccccagcaggaggcgtggcaggccgagcaacaagtcactatggcggacacatggcgactgcagagaggctgtcagtggagctatctgggcaagccctgaaggaattccaaaagggccctttatctccaaaacagtttaag

SEQ ID NO: 18490 - DNA, 312 bp, Homo sapiens
  SIMILAR (121)..(312): 901254mologous to Homo sapiens HTPHLP,accession number AF267853,Smith-Waterman Score=293.
atgcaggaccccaacgcagacactgagtggaatgacatcttaacgcaaaaagggtatcttaccccccaaggaaagtctgaaagaattggaagaggaggcagaagaggagcagcgcatcctccagcagaatctgccccgatatttgtttacctggaaggagatatcaaggctcagtttattggtcctctggtgtttggtggcatgaacctgacaagagatgagttggaatggaaactgtctgaatctggagcaattatgatggacctggaggaaaaccctaagaagccgattgaagatgtattgctgtcatca

SEQ ID NO: 18491 - DNA, 1201 bp, Homo sapiens
  SIMILAR (142)..(633): 731254mologous to Homo sapiens HTPHLP,accession number AF267853,Smith-Waterman Score=553.
aagaggcgtggcggcgctgtgcgcgtgcacaaaagagagctgaggggcgggggcgctgcggcacagctggttttgagcaactgaactggaaacaagatgcatgtttcccaacgcatacactgaatgggaatgacatcttaacgcaaaaagggtatcttaccccccaaggaaagtctgaaagaattggaagaggaggcagaagaggagcagcgcatcctccagcagtcagtggtgaaaacatatgaagatatgactttggaagagctggaggatcatgaagacgagtttaatgaggaggatgaatgtgctattgaaatgtgcagacagcagagactggctgagtggaaagcaactaaactgaagaataaattcggagaagttttggagatctcagggaaggattatgttcaagaagttaccaaagctggcgaagggctttgtgggtcatctttgcacctttacaaacaaggaattcccctctgtgccctggataaatcagcacctcagttggactttgccaggaagtttccctgatgtcaaatttatcaaagccatttcaacaacctgcatacccaattatactgataggaatctgccccacgatattggtttaccctggaaggagatatcaagggctcagtttattggtcctctggtgtttggccggcatgaaccctgaccaagagatgagttgggaatggaaactgtctgaatctggagcaattatgacagacctggaggaaaaccctaagaagccgattgaagacgtgttgcttgtcctcagtgcggcgctctggtcctcatgaagaggggacagcgattccgagggtgacttgagggctacagcttctatcacatgccgaactttcttgtgacaaattgtctggatttctttaagaaaaggaaaagcaagaatgaatccttctggtttttagttttgtataaattatgtttcaaatctttacattttagaaataataattgctggaaattctgttaaatattttggaactcttttttttttttaaattatagtatttcctctaaaaaaaattaaaaccgagccatttgtatggcaaatgtctgttttcctcatttatattttaagtaagccataaaacctagtcactattttttgacatataactataaaaagaaatacagttttaaatgtgaataaattatacagtggaaaattgca

SEQ ID NO: 18492 - DNA, 2313 bp, Homo sapiens
  SIMILAR (1204)..(1506): 961254mologous to synthetic construct bsr,accession number AB041927,Smith-Waterman Score=484.
atggggtttcgccatgttggccaggctggtctcaaactcctgacctcagatcctaaggagattgttttcaaatttatggtgaaatttttcccagtggaccctggacatctgcgggaagaacttacaaggccccgatcgaaaagcctgggagggccgccgaactacccccggagggaggagccagtccgaacccaaggcgccaccgccgcagaagcggagcgaggcagcattcgcctccatggcccactcgccggtggctgtccaagtgaatgggatgcaggtgaggaagcgcacgccgcccccgccgcccacgtgactgcttgggagcccggtgcgccctcggtgctgggcaccggcgacaagggacggccccagggctcccctgagggcagggccggtcactatggccagcttcacaacatcacaaatactccaggattaacaggcactcagcttcaagtaaagttcgtgctgatattttacatatttattactcaagtccttgccatctttctggctatcaaaggaataaaaccgcttggggaggttactgggttaaatgaagtaaaggcaagttgttctgccacagaaagtgaacaaggacaattagtgttgaaacatgtgggagtgaggcaggaaaattgctgttgtagtcagaggtgtagtcaagatctgataaaaactgcagtgcctggtgatgactactccttgatgtccgtcatccactccccagtcacactaacccaggtgacccagaggaaagtggtcttctcttcagcactaggagtgaatcttgattacctaagccagtcaaggttatcgctaatgctggtaagggcgatcggtgcgtgcctcttcggttattaccccagctggagaatggagggatgtgctgctaggcgatcaggttgggcatcgtcaggtatttcacggtctcgacgttgtaaagagacggccagtgccaagcttgcatgccagcagtggctccaagtagcgaagcgagcaggactgggcggcggccaaagcggtcggacagtgctccgagaacgggtgcgcatagaaattgcatcaacgcatatagcgctagctgtggaatgtgtgtcagttagggtgtggaaagtccccaggctccccagcaggcagaagtatgcaaagcatgcatctcaattagtcagcaaccagaaatcggaggaagaagaatatatgaaaacatttaacatttctcaacaagatctagaattagtagaagtagcgacagagaagattacaatgctttatgaggataataaacatcatgtgggagcggcaattcgtacgaaaacaggagaaatcatttcggcagtacatattgaagcgtatataggacgagtaactgtttgtgcagaagccattgcgattggtagtgcagtttcgaatggacaaaaggattttgacacgattgtagctgttagacacccttattctgacgaagtagatagaagtattcgagtgattccaacctatggaactgatgaatgggagcagtggtggaatgcctttaatgaggaaaacctgttttgctcagaagaaatgccatctagtgatgatgaggctactgctgactctcaacattctactcctccaaaaaagaagagaaagggaatgacaatggataaaagtgagctggtacagaaagccaaactcgctgagcaggctgagcgatatgatgatatggctgcagccatgaaggcagtcacagaacaggggcatgaactctccaacgaagagagaaatctgctctctgttgcctacaagaatgtgaaaacagagaggaatgagaagaagcagcagatgggcaaagagtaccgtgagaagatagaggcagaactgcaggacatctgcaatgatgttctgtactctcccccttttccaatggatgtggcttcctgtgagcagactgctgtgattgttgtgtctcttctggggtctagctgctcagcgagtctacctggctctgggctggtactgggggttgtctgcacagagtcctgtgatgtgaaccatctatgggtctctcagccagcaataccagcgcctgtttcagtggcgatatcggagggtgcaatggactctgtgaaggtccttagctttggtggtttaatgttctttgtgctgattggcctcttgccaggaggtggagctttccagaaagcatcagctgtagtagtgtggagaggaattggtggtgggcagggtcctagaactcccttgtcttccactaccagggtggataggaaaggaccaccaggtgggggtggggctaggagtgtctga

SEQ ID NO: 18493 - DNA, 1761 bp, Homo sapiens
  SIMILAR (381)..(1007): 631254mologous to Homo sapiens HS1,accession number X57346,Smith-Waterman Score=574.
ccctttataatcgccgccgccgccgccgctgcagccactgcaggcaccgctgccgccgcctgagtagtgggcttaggaaggaagaggtcatctcgctcggagcttcgctcggaagggtctttgttccctgcagccctcccacggtgagtgcggcgcggggtccgaccggggcccccgggggcccaaactcgaagcccctctctggctgctgcgacgacgggtttaaccttgggagacagcagtgggggaaccccctcccattttgcagtaaaaccatttcatcatccttgcactggacttggagtcaggtaaatttggttgaaatcttgcctgcaatattttctagctttctgaatcttcagcatgttaatctctggttcttggctgcagccatgaaggcagtcacagaacaggggcatgaactctccaacgaagagagaaatctgctctctgttgcctacaagaatgtggtaggcgcccgccgctcttcctggcgtgtcatctccagcattgagcagaaaacagagaggaatgagaagaagcagcagatgggcaaagagtaccgtgagaagatagaggcagaactgcaggacatctgcaatgatgttctggtaagaggccagtgcttctgttttgaacagtggtttctaaatagtattaatttaatgtataaatgcagactctcaaattattttaggtatctttctgaagtggcatctggagacaacaaacaaagtaagtaatatctttaaaaagaaattcgaccagtaatggagccagtcttctttcacagggactttttaacgattttaattcgtcttggtctggcactaaatttctcagtcttttactatgagattctaaactctcctgaaaaggcctgtagcctggcaaaaacggtgagaaagaccctttgtgatatctaaccatagcaaaacagtgcttgtgttattaacttcattttattcctgaacatacttagggacaatctcactgtaagtactacttccacagggtttatagtctctttcctattcacctacttaataattcactgttatcttcaagaggggatttgtaccattaaatgtagttacagttttaagttgttaaatttgttataaatgactgctgaagttttgacctttgcaatcatccctatctgcagtgacacaggaataattttaaactgtcgagtgagataagattatacatactgggccacttacctagggaacttttagtagccctgctttgattatacttcctttctcttgcagctgtggacatcggaaaaccagggagacgaaggagacgctggggagggagagaactaatgtttctcgtgctttgtgatccgttcagtgtcactctgtaccctcaacatatatcccttgtgcgataaaaaaaaaaaaaaaaaaaaaaaagagaatcgtacgtcgactttcgatttttcacagcctcagcctaggaaaaatggttcatgggataaacagctggtatttgtatctaaaactcagattggtcacataaatgccacggcattccgaagttttgattttgattaacattgacaggattactgtgtgtttaatttttttaaaaactgaacactgtgattatggggttttgtaatttagcagaactcttactggtaggaaaaaatagacctgaattatgtgtaacttttttgggaaggtttaatctgatatcaaaataatcattgaaatacaattccattgtaaagttgtacagaaagtt

SEQ ID NO: 18494 - DNA, 1649 bp, Homo sapiens
  SIMILAR (551)..(1129): 431254mologous to Homo sapiens HS1,accession number X57346,Smith-Waterman Score=200.
  misc_feature (1)...(1649): n = a,t,c or g
tcagacactcctagccccacccccacctggtggtcctttcctatccaccctggtagtggaagacaagggagttctaggaccctgcccaccaccaattcctctccacactactacagctgatgctttctggaaagctccacctcctggcaagaggccaatcagcacaaagaacattaaaccaccaaagctaaggaccttcacagagtccattgcaccctccgatatcgccactgaaacaggcgctggtattgctggctgagagacccatagatggttcacatcacaggactctgtgcagacaacccccagtaccagcccagagccaggtagactcgctgagcagctagaccccagaagagacacaacaatcacagcagtctgctcacaggaagccacatccattggaaaagggggagagtacagaacatcattgcagatgtcctgcagttctgcctctatcttctcacggtactctttgttccctgcagccctcccacgggaatgacaatggataaaagtgagctggtacagaaagccaaactcgctgagcaggctgagcgatatgatgatatggcttgcagcagtgaaaggcatgtcacagaacaaggggcatgaacgtctccaacgaagagaagaaatcttgctctcttgttgcctacaaagaatgttggtaggcgcccgccgcttccttcctgggcgtgtcatctccagcatttgagcatgaaaacagagaaggaatgagaagaaagcagcagatgggcaaaagagtacccgtgagaagatagaaggcagaacttgcaggacattctgcaattgatgtttctgggagctgttgggacaaatatctttattccccaatgctacacaacccagaaaagtaaaggtgttctactttgaaaaatgaaaaggagattatttttaggtatcttttctgaaagtggcaatcgtgaagacaacaaacccaaccaacttgtgtcggaacttccccagccagggnttacccaggaagcaatttgaaaatttagttaagaaagaaaatgcagccctacacaccccaattcggtcttggtgctggcacctaaatttcctcagtctttttactatgagattcctaaactccccctgaaaaaggcctggtaagcctgggcaaaaacgggcattttgattgaagcaatttgctgaatttggatacgctggaatggaagagtcttattaaagacagcacttctgattcatggcagttacttaggggacaatcctcactctgtgggacatccggaaaaccaggggagacgaaggagacgctggggagggagagaactaatgtttctcggtgctttggtgatccgtttcagtgtcactctgtaccctcaacatatatcccttgtgcgataaaaaaaaaaaaaaaaaaaaaaaggaaatttgcccggcaattttgattttttcaaaccctcaccctagaaaaaagggtcctggggaaaaccggcgggttttggtttttaaaacccaaatgggccccataagtgcccgggttttccaaatttttgattttgattaactttgccgggattacggggggttaaatttttaaaaaacggaacactgggataagggggttttggaatttagcaaaacttttactgggaaaa

SEQ ID NO: 18495 - DNA, 336 bp, Homo sapiens
gctgcaagcgagctcagccctggcctggctgaccctggaggtgctggcctatgctcatgtactggctcaccttccacctggtgcggtgagcgcgcccgctgaacctcccgctgctgctgctgctgctgggggccactgtggccgccgaactcatctcctgcctgcaggccccaaggtccaccctgtctggccacaggcaccgcctccatcccatgtcccgcccagccccgcccccaacccaaggtgctgagagatctccagctgcacaggccaccgccccagggcgtggccgctgttacagaaacaataaaccctgatgggcatggaaaaaaaaaa

SEQ ID NO: 18496 - DNA, 397 bp, Homo sapiens
  SIMILAR (168)..(257): 1001254mologous to Homo sapiens Human secreted protein clone fh116_11 protein sequence SEQ ID NO:110,accession number Y94952,Smith-Waterman Score=164.
  misc_feature (1)...(397): n = a,t,c or g
cggacgcgtgggcggacgcgtgggtggacactgtcaacaccgacctcaccaccatcgacctggtggccttcttgggctacaaatatgtcgggtgagtacccccgcccttcacgccagccccagcccttgggccttgtcctcacacagcctcctctccctcccccaggatgattggcggggtcctcatgggcctgctcttcgggaagattggctactacctggtgctgggctggtgctgcgtagccatctttgtgttcatnnnnnnnnnnnnnnnnnnnnnnnnnnnnnnnnnnnnnnnnnnnnnnnnnnnnnnnnnnnnnnnnnnatccggacgctgcggctgaagatcttggcagacgcagcagctgagggggtcccggtgcgtggggcccggaac

SEQ ID NO: 18497 - DNA, 600 bp, Homo sapiens
  SIMILAR (217)..(423): 981254mologous to Homo sapiens Human secreted protein clone fh116_11 protein sequence SEQ ID NO:110,accession number Y94952,Smith-Waterman Score=354.
ggaattcggatgaatggcagagcttgcacctgccagtccatctgacatcaaagccagtgtctctaatggtgacaccaccctcctctgcagcaggaggcagagctgtgggatgaatgaggttcgccaggtctcccttacctatcctgggtccccagctccttctcactctcttcccttgcagcctcgaagcggaggatccctgtgtcccagccgggcatggccgacccccaccagcttttcgatgacacaagttcagcccagagccggggctatggggcccagcgggcacctggtggcctaagttatcctgcagcctctcccacgccccatgcagccttcctggctgacccggtgtccaacatggccatggcctatgggagcagcctggccgcgcagggcaaggagctggtggataagaacgtgagtgggcggggctggtgggagtggggggatgcacggggccacagggcttcagacttgagctctgcctccccagatcgaccgcttcatccccatcaccaagctcaagtattactttgctgtggacaccatgtatgtgggcagaaagctgggcctgctgttcttcccctacctacacca

SEQ ID NO: 18498 - DNA, 1230 bp, Homo sapiens
  SIMILAR (733)..(1200): 501254mologous to Homo sapiens high-risk human papilloma viruses E6 oncoproteins targeted protein E6TP1 alpha; putative GAP protein alpha,accession number AF090989,Smith-Waterman Score=312.
atgatgtccagtcctgtcagtcagaacctggaggatgttttcttcactgaggttttgaaagataaaacatgcacaaggcaggtggacacgaacaccaaaaatgtctttgggcaaccgaggttgagggcatccctccgagacctccggtcaccacggaagaactacaaatccaccatcgaggatgacctgaagaaactcatcatcatggacaacctggggccagagcaggagagagacacgggacagtcaccgcagaagggcctgcagcggacgctgtcggacgagagcctgtgcagcgggcgccgggagcccagcttcgccagccccgctggcctagagccagggctgcccagcgacgtgctcttcaccagcacctgcgccttcccgtccagcacgctgcctgcacgccgccagcaccagcacccccacccgcccgtcggccccggtgccacccctgccgccggcagcggctttcccgagaagaaatgtactgcgcacaccacccgcatcaaaagccacgagccagctggagttggccgtgccccagatgcaccctgtaaccccccttacccacctcctaacccccccacaactgaaagacagggcttcaaggagtcacagagccccaggccagagcccgagcctggtgcctgggactctctcaatagccgcagcagggatttagcactggctgttccgtctgcctggaatgttcctcccccagccaccatctcagcctcggagctctcgctggctgatgggcgggaccgccccctgcggcgcctggaccctgggctgatgcccctgcctgacacagctgctggcctcgagtggtccagcctggtgaacgcagccaaggcatacgaagtgcaaagagccgtctcactcttctctctgaacgacccggccctgagcccggacatcccgcctgcacacagtcctgtccacagccacctgagcctggagaggggacccccgacccccaggaccacccctaccatgagcgaggagccacccctggatctgacaggcaaggtgtaccagctggaggtgatgctgaaacagctgcacactgacctgcagaaggagaagcaggacaaggtggtgctccagtcagaggtggccagcctgcggcagaacaaccagcggctgcaggaggagtcgcaggccgccagcgagcagctgcgcaagtttgcggagatcttctgcagggagaagaaggagctctga

SEQ ID NO: 18499 - DNA, 1566 bp, Homo sapiens
  SIMILAR (1135)..(791): 691254mologous to Homo sapiens Human secreted protein clone fh116_11 protein sequence SEQ ID NO:110,accession number Y94952,Smith-Waterman Score=342.
gccctttttttttttttttgccatgcccatcagggtttattgtttctgtaacagcggccacgccctggggcggtggcctgtgcaggctggagatctctcagcacctttgggttgggggcgaggctgggcgggacatgggatggaggcggtgcctgttgcgcagacagggtggaccttggggcctgcaggcagggagatgagttcggcggccacagtggcccccagcagcagcagcagcagcgggaggttcagcgggcgcgctcaccgcaccaggtggaaggtgagccagtacatgagcataggctgcgccgccgccaccgccatggtcaggtacatgcgcagctggttccgggccccacgcaccgggacccccttcagctgctgcgtctgccaaagatcttcagccgcagcgtcccggatcattgaacacaaagaatggccacgcagcaccagcccagcaccaggtagtagccaatcttcccgaagagcaggcccatgaggaccccgccaatcatcccgacatatttgtagcccaagaaggccaccaggtcgatggtggtgaggtcggtgttgacagtgaccagatagaggctgagcaggatggccagcacctccagggtcagcccagcccagggctgagctcgcttgcagccccaggaggtctggggagaacctatcctgggtccccagcgcaagaccagcccaccaaaacgtaggtgatgaaagccattgccgctccatataggcccggaagagagaggagggtgcagggtagggggagggtgaaacctggaatgtagaggtcccggggcattgacttcaaaagcgggggggccaaccggggtgtccctgttggtaactgcaacttccccaatccctggtgtaaggtaggggaaagaacagcaaggcccagctttctgccccacatacatggtgtccaccagcaaagtaatacttgaagcttggtgatggggatgaagcggtcgatgttcttatccaccagctccttgccctgcgcggccaggctgctcccattagccatggccatgttggacaccgggtcagccaggaaggctgcatggggcgtgggagaggctgcaggataactcaggccaccaggtgcccgctgggccccattagccccggctctgggctgaacttgtgtcatcgaaaagctggtgggggtcgccaatgcccggctgggacacagggatcctccgcttcgaggctgagtgggtatccctgcaaagccatgaggccctccatgaatccctcttcgtatgccttggctgcgttcaccaggctggaccactcgaggccagcagctgtgtcaggcaggggcatcagcccagggtccaggcgccgcagggggcggtcccgcccatcagccagcgagagctccgaggctgagatggtggctggatggggagggtggagatggcagtggttgagtgtgacaatgcgggagcatctggaattttgatgaagattgcacagacggtgggaggcaaggagccagctgggtggggaggctagtgtggctacaaggcggggagggcggcgcat

SEQ ID NO: 18500 - DNA, 464 bp, Homo sapiens
  SIMILAR (3)..(80): 741254mologous to Homo sapiens Human secreted protein encoded by gene 90 clone HUSXS50,accession number Y41397,Smith-Waterman Score=106.
  misc_feature (1)...(464): n = a,t,c or g
tccctaggccatttcctaagtcccgccttcctccaggaattatcgggggtgaatatgacccaaagacctaaccccatcttgcccagggcgaggcggccccaatgacagatttccctttnagacccagcaggggtcggccaactgatggccggctgtcattcatgtgattgatttgtaatttcatttctggagctccatttgtttttgtttctaaactacagatgtcaactccttggggtgctgatctcgagtgttattttctgattgtggtgttgagagttgcactcccagaaaccttttaagagatacatttatagccctaggggtggtatgacccaaaggttcctctgtgacaaggttggccttgggaatagttggctgccaatctccctgctcttggttctcctctagattgaagtttgttttctgatgctgttcttaccagattaaaaaaaagtgtaaat

SEQ ID NO: 18501 - DNA, 2198 bp, Homo sapiens
  SIMILAR (36)..(1703): 441254mologous to Homo sapiens Human RIP-associated protein,accession number W68521,Smith-Waterman Score=698.
gagaggggcgggcgctctattccagagaccgagtggcagggcggccactcgtggcggggctctttccccgtttcgcctcagctacccctcagctccggtagtcgccagtccggggtcgtcgccgtttggggcgggagctgctcggccccgccgccgtccccgtcgccgcttccgggtccaggcccctcgggccgcctgcccgccgtcatgatgtctgcgggtgctgcttctgaagcggacctggccggtggaggtgcccgagaccggagcccgaccgctgggggcattttgcgctcgcaccctgaggcagtccctgctgtgcaccttgggggtacagttctaatacccgatttacaattacattgaactacaaggatcccctcactggagatgaagagaccttggcttcatatgggattgtttctggggacttgatatgtttgattcttcaagatgacattccagcgcctaatataccttcatccacagattcagagcattcattcactccagaataatgagcaaccctctttggccaccagctccaatcagactagcatgcaggatgaacaaccaagtgattcattccaaggacaggcagcccagtctggtgtttggaatgacgacagtactgttaggggcctagtcaaaattttgaagctgagtcaattcaagataatgcgcatatgggcagagggcacaggtttctatccctccagaaccccatgctcctggtagttgaatccggtggaagggcaagtgccaccattcattagagaccttgtatcaattagctgactgttcctgatgccaatgatgccttgatagtgttggatacatccttctcatgttggagtcaggttacatacctcagggcacccgaagccaaagcactgtccatgccggagaagtgggaagttgagcggggtgtataagctgcagtacatgcatcctctctgcgagggccagttcggttacttctcacctgtgtgcctttggggaaacctgattgttgtaaatgctacactaaaaatcaacaatgaggttaggaagtgttgaaaaggttgcagcttgttacccgaatctttttatttgcaaagagaaactaggggaaaatgtagccaacatatacaaagatcttcagaaactctctcgcctctttaaagaccagctggcgcatcctcttctggcttttacccgacaagcactggaacctaccagatgtatttgggttggtcgtcctcccattggaactgaaactacggatcttccgacttctggatgttcgttccgtcttgtctttgtctggcggtttgtcgtgacctctttactgcttcaaatgacccactcctgtggagggttttttatatctgcgtgaattttcgagacaatactgttcagagttcaaggacacagattgggaaagaactgtacagggaaggagggcacatacaaaggaaaaggaatccccgaaagggcgggttttgtggatgctcctggccattcgtcaaactcacaaccattccattctattcccaacccctttggcaccctaggggccatttccctaagctccccgcctttcctccagggatttattcgggggggtggaatatggaccaaaggaccaacatttccctatgttgggaggacccaatcaagttcactcaattcctgggtcctgggggagacgcccaagccaagtttccttccactgagaccacgctttgatccagtttggccccacttcccaggaccttaacccccatctttgccacgggcgagggcgggccccaatgaccagatttccccttttagaccccagcaggggtcgggccaactcataggccggctgtcaattcatgtggattggatttgttaattttcatttctgggagctccattttgtttttgttttttaaattacagatgtcaacgtccttggggtgctgatctccgagtgttatttttctgaattgtggtgttgagagttgcactccccagaaacccttttaagagatacatttataagccctaggggtggtaatgaccccaaaggttccctctggtgacaaggttgggccttgggaaatagttggctgccaatctcccctgctcttggttctcctctagattgaagtttgtcttctgatgctgttcttaccgagattaaaaaaaaagtgtaaattaaaaattat

SEQ ID NO: 18502 - DNA, 1503 bp, Homo sapiens
  SIMILAR (70)..(1065): 1001254mologous to Homo sapiens pregnancy-specific beta-1- glycoprotein,accession number M69245,Smith-Waterman Score=1779.
gctgtgctctggaagcttctggatcctaggctcatctccacagaggagaacatgcacgcagcagagatcatggggcccctctcagcccctccctgcacagagcacatcaaatggaaggggctcctgctcacagcattacttttaaacttctggaacttgcctaccactgcccaagtcatgattgaagcccagccacccaaagtgtccgaggggaaggatgttcttctacttgtccacaatttgccccagaatcttactggctacatctggtacaaagggcaaatcagggacctctaccattacattacatcatatgtagtagacggtcaaataattatatatggaccggcatacagtggacgagaaacagtatattccaatgcatccctgctgatccagaatgtcacccgggaggacgcaggatcctacaccttacacatcataaagcgaggtgatgggactagaggagtaactggatatttcaccttcaccttatacctggagactcccaagccctccatctccagcagcaacttaaaccccagggaggccatggagactgtgatcttaacctgtaatcctgagactccggacgcaagctacctgtggtggatgaatggtcagagcctccctatgactcataggatgcagctgtctgaaaccaacaggaccctctttctatttggtgtcacaaagtatactgcaggaccctatgaatgtgaaatatggaactcagggagtgccagccgcagtgacccagtcaccctgaatctcctccatggtccagacctccccagaattttcccttcagtcacctcttactattcaggagagaacctcgacttgtcctgcttcgcagactctaacccaccagcacagtattcttggacaattaatgggaagtttcagctatcaggacaaaagctctttatccctcagattactccaaagcataatgggctctatgcttgctctgctcgtaactcagccactggcgaggaaagctccacatccttgacaatcagagtcattgctcctccaggattaggaactttttgctttcaataatccaagtagcagccctgatgtcatttttgtatttcaggaagactggcaggagatttatggaaaagactatgaaaaggactcttgaatacaagttcctgataacttcaagatcataccactggactaagaactttcaaaattttgatgaacaggctgataccttcatgaaattcaagacaaagaagaaaagaactccatttcattggactaaataacaaaaggataatgttttcataattttttattggaaaatgtgctgattttttgaatgttttatcctccagatttatgaatttttttcttcagcaattggtaaagtatacttttgtaaacaaaaattgaaacatttgcttttgctctctgagtgccccagaattgggaatctattcatgaatattcatatgtttatggtaataaagttatttgcacaagttt

SEQ ID NO: 18503 - DNA, 1513 bp, Homo sapiens
  SIMILAR (1)..(708): 1001254mologous to Homo sapiens pregnancy-specific beta-1 glycoprotein,accession number M93061,Smith-Waterman Score=1253.
atggggcccctctcagcccctccctgcacacagcgcatcacctggaaggggctcctgctcacagcattacttttaaacttctggaacttgcctaccactgcccaagtcacgattgaagccgagccaaccaaagtttccaaggggaaggacgttcttctacttgtccacaatttgccccagaatcttgctggctacatctggtacaaagggcaaatgaaggacctctaccattacattacatcatacgtagtagatggtcaaataattatatatgggcctgcatacagtggacgagaaacagtatattccaatgcatccctgctgatccagaatgtcacccgggaggacgcaggatcctacaccttacacatcgtaaagcgaggtgatgggactagaggagaaactggacatttcaccttcaccttatacctggagactcccaagccctccatctccagcagcaacttataccccagggaggacatggaggctgtgagcttaacctgtgatcctgagactccggacgcaagctacctgtggtggatgaatggtcagagcctccctatgactcacagcttgcagttgtccaaaaacaaaaggaccctctttctatttggtgtcacaaagtacactgcaggaccctatgaatgtgaaatacggaacccagtgagtgccagccgcagtgacccagtcaccctgaatctcctccagcattcttggctgattgatgggaagttccagcaatcagcacaagtgttctttatcccccaaatcactaaaacatatagaggggtctatgtctgtttcatccataactcagccactgctggaacaaatctcataatcaagaggatcatagtccctgatacactgagaaaaagaggcaaccatgaaaaggtggaaagttctgatgacatagaaaatagcaatcagcctttctcacatcccaaggccttcaaaaatatacaagtgcagcatggccagtatggaattcaccgaaaactaatcaccaagctagaaaagtggcttgattctggtctcccctgtgttatttctgctgaaacatccagtcccaggccaggctgctcagtatcttcagggtttcagggccatgggaagtcccattattactcatctctagaatgtccttggaaatggaagttgcagagaaatcacatctatgggggcaaagtaggatggaatttggaaggggcccaccagttgcacattccagcgaagctgcccaagccctacatcaccatcaacaacttaaaccccagggagaataaggatgtcttagccttcacctgtgaacctaagagtgagaactacacctacatttggtggctaaatggtcagagcctcccggtcagtcccagggtaaagcgacccattgaaaacaggatcctcattctacccagtgtcacgagaaatgaaacaggaccctatcaatgtgaaatacaggaccgatatggtggcatccgcagttacccagtcaccctgaatgtcctct

SEQ ID NO: 18504 - DNA, 2250 bp, Homo sapiens
  SIMILAR (811)..(1518): 1001254mologous to Homo sapiens F19434_2,accession number AC004654,Smith-Waterman Score=1249.
atggccatactgcccaaggtaatttacagattcaatgccatacccatcaagctaccaatgactttcttcacagaattggaaagaactactttaaagttcatatggaaccaaaaaagagcctgcatcgccaagtcaatcctaagccaaaagaacaaagctggaggcatcacactacctgacttcaaactatactacaaggctacagtaaccaaaacagcatggtactggtaccaaaacagagatatagatcaatggaatagaacagacccctcagaaataacacctcatatctacaactatctgatctttgacaaacctgagaaaaacaagcaatggggaaaggattccctatttaataaatggtgctgggaaaactggctagccatatgtagaaagctgaaactggatcccttccttacaccttatacaaaaatcaattcaagatggattaaagacttaaatgttagacctaaaaccataaaaaccctagaagaaaacctaggcattaccattcaggacataggcatgggcaaggacttcatgtctaaaacaccaaaagcaatggcaacaaaagccaaaattgacaaatgggatctaattaaactaaagagcttctgcacagcaaaagaaactaccatcagagtgaacaggcaacctacaaaatgggagaaaattttcacaacctactcatctgacaaagggctaatatccagaatctacaatgaactcaaacaaatttacaagaaaaaaacaaacaaccccatcaaaaagctcatctccacagaggagaacacacagacagcagagaccatggggctcctctcagcccctccctgcacacagcgcatcacctggaaggggctcctgctcacagcatcacttttaaacttctggaacccacccacgactgcccaagtcacgattgaagcccagccaaccaaagtttctgaggggaaggatgttcttctacttgtccacaatttgccccagaatcttactggctacatctggtacaaagggcaaatcagggacctctaccattacattacatcatatgtagtagacggtcaaataattatatatgggcctgcatacagtggacgagaaacaatatattccaatgcatccctgctgatccagaatgtcacccaggaagacgcaggatcctacaccttacacatcataatgggaggtgatgagaatagaggagtaactggacatttcaccttcaccttatatctggagactcccaagccctccatctccagcagcaaattaaaccccagggaggccatggaggctgtgagcttaacctgtgatcctgagactccggacgcaagctacctgtggtggatgaatggtcagagcctccctatgtctcacaggttgcagttgtctgaaaccaacaggaccctctttctattgggtgtcacaaagtacactgcaggaccctatgaatgtgaaatacggaacccagtgagtgccagccgcagtgacccattcaccctgaatctcctccagcattcttggctgattgatgggaagttccagcaatcagcacaagtgttctttatcccccaaatcactaaaacatatagaggggtctatgtctgtttcatccataactcagccactgctggaacaaatctcataatcaagaggatcatagtccctgcgaagctgcccaagccctacatcaccatcaacaacttaaaacccagggagaataaggatgtcttaaacttcacctgtgaacctaagagtgagaactacacctacatttggtggctaaatggtcagagcctcccggtcagtcccagggtaaagcgacccattgaaaacaggatcctcattctacccagtgtcacgagaaatgaaacaggaccctatcaatgtgaaataagggaccaatatggtggcatccgcagttacccagtcaccctgaatgtcctctatggtccagacctccccagaatttacccttcattcacctattaccgttcaggagaagtcctctacttgtcctgttctgcggactctaacccaccggcacagtattcttggacaattaatgggaagtttcagctatcaggacaaaagctctttatcccccaaattactacaaagcatagcgggctctatgcttgctctgttcgtaactcagccactggcaaggaaagctccaaatccatgacagtaaaagtctctggtggcattgccttagcagacacctctttcagctgcagctaa

SEQ ID NO: 18505 - DNA, 421 bp, Homo sapiens
  SIMILAR (3)..(236): 1001254mologous to Homo sapiens pregnancy-specific beta-1- glycoprotein (PSG) precursor,accession number M31125,Smith-Waterman Score=417.
cggagactcccaagccctccatctccagcagcaacttaaaccccagggaggtcatggaggctgtgcgcttaatctgtgatcctgagactccggatgcaagctacctgtggttgctgaatggtcagaacctccctatgactcacaggttgcagctgtccaaaaccaacaggaccctctatctatttggtgtcacaaagtatattgcaggaccctatgaatgtgaaatacggaacccagctcttcttaatgactgccacaacacaaacactgagaaaaagaagcaaccagaaaaggtggaaagttctgatgacatagaaaatagcaatcagcctttctcacatcccaaagccttcaaaaatatacgagtgcagcatggccactatggaattcaccgaaaactaatcaccaagctagaaacatg

SEQ ID NO: 18506 - DNA, 403 bp, Homo sapiens
  SIMILAR (1)..(81): 1001254mologous to Homo sapiens PSGIIA-b,accession number AC005238,Smith-Waterman Score=145.
gcaggatcctacaccttacacatcataaagggagatgatgggactagaggagtaactggacgtttcaccttcaccttacaccgcatccaaacctcagaggagtgagagcaaatggtcagctgattagtctgcactccagaactaaatcacctgcttcaaccatcagagtcagtgcaaaaaaatgtccaggcctcctcctcagatcttaaccaccatcactgaacctgaaatcctgtgtttcccaaagtgtccttgtcactgtcatgagaggatcaaggagaggaccttgttttcttttcccactcacactctacaccaccacaggcccagcgagagagacacacactcaggagctctcacatgacaaatgaaggaatggaatgaagaaatgaatgatccaaaa

SEQ ID NO: 18507 - DNA, 435 bp, Homo sapiens
  SIMILAR (3)..(278): 1001254mologous to Homo sapiens pregnancy-specific beta-1 glycoprotein precursor,accession number M34420,Smith-Waterman Score =490.
tggagactcccaagccctccatctccagcagcaacttataccccagggaggacatggaggctgtgagcttaacctgtgatcctgagactccggacgcaagctacctgtggtggatgaatggtcagagcctccctatgactcacagcttgcagttgtccaaaaacaaaaggaccctctttctatttggtgtcacaaagtacactgcaggaccctatgaatgtgaaatacggaacccagtgagtgccagccgcagtgacccagtcaccctgaatctcctccagcattcttggctgattgatgggaagttccagcaatcagcacaagtgttctttatcccccaaatcactaaaacatatagaggggtctatgtctgtttcatccataactcagccactgctggaacaaatctcataatcaagaggatcatagtccctg

SEQ ID NO: 18508 - DNA, 786 bp, Homo sapiens
  SIMILAR (420)..(370): 581254mologous to Homo sapiens acetylcholinesterase,accession number M76539,Smith-Waterman Score=45.
ttagcccacaggtccaaggctgatttttgtcacagtgaagttcaggtagtaagaattctcactggtggctgttgaggatggtggtggtggggatgggtcatatggagaattagcagtgggagactgctgactaaccagtgtacttctgggaattgcaaatgcatgaaatggcacccattctagactagtcgcggcagtgttggtgatggccacagaccaggaacgaccttgacgtttatccgtagggaacttcgaggcctctcttagcagctggagtgcatcccggggacttgggagctctggaaagaggagcaggaaagggccatggccggaggaggcctgaaaaagatcatctctgccacagagaagaagctggctcggatgctgctggccccctctgcttcctggtgctgttcgggaccctgagtctttcacgggagcacctgatggggaaagcctggacccgtgtcggtgtccctcctgcaaggagtgctgggaaaatgaactttccagcttcctccttgcgaaggcagaacattccccatgtgtactggtggcatttaaaaactgcagggcagccagagaacatggactgtgttccaccgggagagttcctggcgggatgtcccggtgcagaagcccgtcccaaggtgggtatttgagctgaggaactgagaagccggtttctgcctgaccataggacaccaagggctttaggacctgagtggcacatcgtgtcctggtgacatctgagttacctggggcgtgcacagcagcctccagcat

SEQ ID NO: 18509 - DNA, 606 bp, Homo sapiens
  SIMILAR (3)..(290): 801254mologous to Homo sapiens precursor (AA -34 to - 385),accession number X17097,Smith-Waterman Score=375.
aggaggccatggaggctgtgatcttaacctgtgatcctgcgactccagccgcaagctaccagtggtggatgaatggtcagagcctccctatgactcacaggttgcagctgtccaaaaccaacaggaccctctttatatttggtgtcacaaagtatattgcaggaccctatgaatgtgaaatacggaaccccagttgagtgccagccgccagtgacccagtcaccctggaatctcctccgctcttatttaatggacttgccacaacagaaacactgagaaaaagaggcaacccatgaaaacgtggaaagttctgacgacagaaaatagcaatcagcctttctcacatcccaaagctttaaaaaatatatgagtgcagcatggccagtatggaattgaccaaaaactaatcatcaagctagaaacgtggtgagagaaaaaaaaagggcaagaatatctttggcttatcacctcccacttttgcctactaatctgatgctgaaaagaaatgctcactgaagcattttagattttgaatctttcagatttgggatgctaaaccagtaagcatatgacaaatatttcagaataaaaaaatgtcagaaatcc

SEQ ID NO: 18510 - DNA, 1974 bp, Homo sapiens
  SIMILAR (757)..(1308): 771254mologous to Homo sapiens pregnancy-specific beta-1 glycoprotein precursor,accession number M34420,Smith-Waterman Score =719.
ggggggccgtgcggacctggggaagaggattccaaacagaaaaatgccaagcatcacttttaaacttctggaacccgcctaccactgcccaagtcacgattgaagccgagccaaccaaagtttccaaggggaaggacgttcttctacttgtccacaatttgccccagaatcttgctggctacatctggtacaaagggcaaatgaaggacctctaccattacattacatcatacgtagtagatggtcaaataattatatatgggcctgcatacagtggacgagaaacagtatattccaatgcatccctgctgatccagaatgtcacccgggaggacgcaggatcctacaccttacacatcgtaaagcgaggtgatgggactagaggagaaactggacatttcaccttcaccttataccgtcattccttggactctgctctatctttagaggtcactggctcaagtcagccactatgagacacctgggaaaactgccccaccttgtggctccactgcctgatgactgaactgacctccggacttgactctgttctcccctgtgttatttctgctgaagtacccagtcccaggtcaggctttccagtatccaaagggtttaaagacaattggaagttccatcacccatctctaggatgtccttggcaagggaagctgcagagaaaacatacctcgggcggcaaagtaagactgaaactaagaagattccagcactgcatgctccaagtgaggaccacaagtggagactcccaagccctccatctccagcagcaacttataccccagggaggacatggaggctgtgagcttaacctgtgatcctgagactccggacgcaagctacctgtggtggatgaatggtcagagcctccctatgactcacagcttgcagttgtccaaaaacaaaaggaccctctttctatttggtgtcacaaagtacactgcaggaccctatgaatgtgaaatacggaacccagtgagtgccagccgcagtgacccagtcaccctgaatctcctcccgaagctgcccaagccctacatcaccatcaacaacttaaaccccagggagaataaggatgtcttagccttcacctgtgaacctaagagtgagaacttacacctacatttggtgggttaaatggtcagagccttcccggttcagttcccagggtaaagcgacccatttgaaaacagggtcctcatttttaccccgtgttcaaggggaattgaaacagggaccctattcaatgtgaaatacagggaccgatatggtgggcatccgcagttacccagtcaccctggaatgtcctctattactacaaagcatagcgggctctatgcttgctctgttcgtaactcagccactggcatggaaagctccaaatccatgacagtcaaagtctctgctccttcaggaacaggacatcttcctggccttaatccattatagcagccgtgatgtcatttctgtatttcaggaagactggcagacagttgctttcattcttcctcaaagtatttaccatcagctacagtccaaaattgctttttgttcaaggagatttatgaaaagactctgacaaggactcttgaatacaagttcctgataacttcaagatcataccactggactaagaactttcaaaattttaatgaacaggctgatacttcatgaaattcaagacaaagaaaaaaacccaattttattggactaaatagtcaaaacaatgttttcataattttctatttgaaaatgtgctgattctttgaatgttttattctccagatttatgcactttttttcttcagcaattggtaaagtatacttttgtaaacaaaaattgaaacatttgcttttgctccctaagtgccccagaattgggaaactattcaggagtattcatatgtttatggtaataaagttatctgcacaagttcaaaaaaaaaaaaaaaaccc

SEQ ID NO: 18511 - DNA, 2008 bp, Homo sapiens
  SIMILAR (232)..(1515): 1001254mologous to Homo sapiens pregnancy-specific beta-1 glycoprotein precursor,accession number M34420,Smith-Waterman Score =2297.
gggcgggacaactggtctgagtactatggctgattttcgctgtctggcattgagaagccacacgccccttttgcttaggaggcctctctgctggaggatgacgatggcatggtttatctaaggccactgacaagtcatcaatataggacagcacagctgagagccatgctcaggaagtttctggatcctaggctcagctccacagaggagaacacgcaggcagcagagaccatggggcccctctcagcccctccctgcacacagcgcatcacctggaaggggctcctgctcacagcatcacttttaaacttctggaacccgcctaccactgcccaagtcacgattgaagccgagccaaccaaagtttccaaggggaaggacgttcttctacttgtccacaatttgccccagaatcttgctggctacatctggtacaaagggcaaatgaaggacctctaccattacattacatcatacgtagtagatggtcaaataattatatatgggcctgcatacagtggacgagaaacagtatattccaatgcatccctgctgatccagaatgtcacccgggaggacgcaggatcctacaccttacacatcgtaaagcgaggtgatgggactagaggagaaactggacatttcaccttcaccttatacctggagactcccaagccctccatctccagcagcaacttataccccagggaggacatggaggctgtgagcttaacctgtgatcctgagactccggacgcaagctacctgtggtggatgaatggtcagagcctccctatgactcacagcttgcagttgtccaaaaacaaaaggaccctctttctatttggtgtcacaaagtacactgcaggaccctatgaatgtgaaatacggaacccagtgagtgccagccgcagtgacccagtcaccctgaatctcctcccgaagctgcccaagccctacatcaccatcaacaacttaaaccccagggagaataaggatgtcttagccttcacctgtgaacctaagagtgagaactacacctacatttggtggctaaatggtcagagcctcccggtcagtcccagggtaaagcgacccattgaaaacaggatcctcattctacccagtgtcacgagaaatgaaacaggaccctatcaatgtgaaatacaggaccgatatggtggcatccgcagttacccagtcaccctgaatgtcctctatggtccagacctccccagaatttacccttcattcacctattaccattcaggagaaaacctctacttgtcctgcttcgcggactctaacccaccagcagaatattcttggacaattaatgggaagtttcagctatcaggacaaaagctctttatcccccagattactacaaagcatagcgggctctatgcttgctctgttcgtaactcagccactggcatggaaagctccaaatccatgacagtcaaagtctctgctccttcaggaacaggacatcttcctggccttaatccattatagcagccgtgatgtcatttctgtatttcaggaagactggcagacagttgctttcattcttcctcaaagtatttaccatcagctacagtccaaaattgctttttgttcaaggagatttatgaaaagactctgacaaggactcttgaatacaagttcctgataacttcaagatcataccactggactaagaactttcaaaattttaatgaacaggctgatacttcatgaaattcaagacaaagaaaaaaacccaattttattggactaaatagtcaaaacaatgttttcataattttctatttgaaaatgtgctgattctttgaatgttttattctccagatttatgcactttttttcttcagcaattggtaaagtatacttttgtaaacaaaaattgaaacatttgcttttgctccctaagtgccccagaattgggaaactattcaggagtattcatatgtttatggtaataaagttatctgcacaagttcaa

SEQ ID NO: 18512 - DNA, 1755 bp, Homo sapiens
  SIMILAR (96)..(1286): 971254mologous to Homo sapiens pregnancy-specific beta- glycoprotein c,accession number M20879,Smith-Waterman Score=2075.
ggcacgagaggacagcacagctgacagccgtgctcagagagtttctggatgctaggcttatctccacagaggagaacacacaagcagcagagaccatgggaaccctctcagcccctccctgcacacagcgcatcaaatggaaggggctcctgctcacagcatcacttttaaacttctggaacctgcccaccactgcccaagtcacgattgaagccgagccaaccaaagtttccgaggggaaggatgttcttctacttgtccacaatttgccccagaatcttaccggctacatctggtacaaagggcaaatgagggacctctaccattacattacatcatatgtagtagacggtgaaataattatatatgggcctgcatatagtggacgagaagcagcatattccaatgcatgcctgctgatccagaatgtcacccgagaggacgcaggatactacaccttacacatcataaagggagatgatgggactagaggagtaactggacgtttcaccttcaccttacacctggagactcctaagccctccatctccagcagcaacttaaatcccagggagaccatggaggctgtgagcttaacctgtgaccctgagactccagacgcaagctacctgtggtggatgaatggtcagagcctccctatgactcacagcttgaagctgtccgaaaccaacaggaccctctttctattgggtgtcacaaagtatactgcaggaccctatgaatgtgaaatacggaacccagtgagtgccagccgcagtgacccagtcaccctgaatctcctcccgaagctgcccaagccctacatcaccatcaacaacttaaaccccagggagaataaggatgtcttaaacttcacctgtgaacctaagagtgagaactacacctacatttggtggctaaatggtcagagcctcccggtcagtcccagggtaaagcgacccattgaaaacaggatcctcattctacccagtgtcacgagaaatgaaacaggaccctatcaatgtgaaatacgggaccgatatggtggcatccgcagtgacccagtcaccctgaatgtcctctatggtccagacctccccagaatttacccttcattcacctattaccgttcaggagaagtcctctacttgtcctgttctgcggactctaacccaccggcacagtattcttggacaattaatgaaaagtttcagctaccaggacaaaagctctttatccgccatattactacaaagcatagcggggctctatgtttgctctgttcgtaactcagccactggccaaggaaagctccaaatccatgacaagtcgaagtctctggttaagtgggatcccaagcatcgttgggcaatagggttttaggtgggagtctatctgggcatttcagaggaaggagtcagggaaaacaattgtatttcccagcctgtgtcccatgggcacaagcaaatcccaaattctcctcctggaaccctccaaatttgtctaagaacttcgaaaactttaacaaacaggctgatatcttcataatattcccagcctagacccaagcaggaagaacattgatttcattgaaataattgataataatgaagataatgtttttatgatttttatttgaaaatttgctgattctttaaatggtttgttttctacattgatggaatttttctcttaattaatctatctacagcttatagcagttcaataaactatacttctgggaaccgtaaaaaa

SEQ ID NO: 18513 - DNA, 14301 bp, Homo sapiens
atggccacggagaagaggctcagtgcagaaggaggaaggacagcacagctgacagccgtgctcaggaagtttctggatcctaggctcatctccacagaggagaacacacaggcagcagagaccatggggcccctctcagcccctccctgcacagagcacatcaaatggaaggggctcctgctcacaggtgaggagaggacttcctgggagaggacaggaggaggaagcagagtgactggatggggtatcctggagaggatggggttctaaaaaataaaagaagccagcacttagggaggctgaggtgggtggatcacgagatcaggagttcaagatcagtctggccaacacagtgtagacgtgtctctaccaaaaaatacaaaaaattaaccaagtatggtggtgtgctcctgtaatcccagctttcgggaggctgaggcaggataatcacatgaacccaggaggcagaagttgcagctagccgagacagcaccactgcacgccagcctgggtgacagtacgagactccatttcaaaaaaaaaaaaaaaaaagaataaaaagaagaaagaaaaaaagggaaagaaggctctgttggagcctggataggggaaaatacaccagagagggacaggggtcaaaataggaaagtcacattgaaccggaattggtaagaggtagtaaaatcttaagtgttctgttttcctgattaatcatcaggggccaccacattttgaaaaatgataataatgactatatcagatgacacctcaaataaaaatgtaaccagggcatgaaacactttcctcagcaaaaaacctcaacaattgggggaaaaaaaacacccagggcatggagggccctgagaactctcacatctacaggagtctgcatcctgttccaggcactggggtgcaaccaacatgacaaaagtctctgtcctcacagagctcacactctcatggggaggaagacagacatgcaaagagatatagaatgtgaggtcaggtgttgacaagaaccctagagggagcagagcagggaaaggtcagaaagggaagacccagggtctctgaagcaggcatcaggaaagaagtctaaggatgccctgatgtgagcaggacctgagggcagtgtggagggggccgtgcggacccctggggaagaggattgcaaacagaaaaatgccaaggtcaggagtgttgaaggaatgggggtcatgctgctgaccttgacctagtaggacagtaggacacacacacatacacacacacaaacacacatgcccttttgtgtgtgtgtgtttgtatgtgtgtgtgtgcatatcttcaaggctgatgattgaagagaccttctcaggacacagggccccatcttttcaccccaatacataggtccaaatattaactgatgctgtctctacctcctagcatcacttttaaacttctggaacctgcccaccactgcccaagtaataattgaagccaagccacccaaagtttccgaggggaaggatgttcttctacttgtccacaatttgccccagaatcttactggctacatctggtacaaagggcaaatgacggacctctaccattacattacatcatatgtagtacacggtcaaattatatatgggcctgcctacagtggacgagaaacagtatattccaatgcatccctgctgatccagaatgtcacacaggaggatgcaggatcctacaccttacacatcataaagcgaggcgatgggactggaggagtaactggatatttcactgtcaccttatactgtgagtgattccgcatgatccctgggtgttggggggcaggggtcatttctacttcacacacacagaattgtcaggcctggactctgcctgtgtcactctctgcattatgtcccatgctggggtttgggcatttagtgcaggacacacacagaggagacacatttcaacagatcagaattcctttcccgcatccagaccctgcagacactcgctgcagaggaaggacagtctgatggggggactcagcaggaggagatcagtctcagccaagcacctcatgccctcttcataaatttgaccctgagaaagaccctggaaaactgagtagggcttggcctgaggggcccactgagataccctcagagaacctcagctctggaagcctcaatcccagacccctgtccctaaatccttgctccaggtaaagctgaggagcctgtgccaggactgggttgtggcttctttggcagggcttactgggaccaaggatttaccagctgtctgaggactgtgtctcctggagctgttcaccagccagggctcagtcctcagagcctcatctgggcaaggacagagctttcttcacctgacactcagagtggagaggacagaaagacaagctttgtaggccatcagccaactgccttaggaggcctaggacactccatagaaagtctaatatccccagaagcagaaacagaagagagaagatgcaccaggtagccgtttgtccacagggatctgacgcaaaggtgctttctcatggaagcaaattaataataaatgctgtttgtgtgaacacctccactgtgccaagcattaagtcagttgactgtgaatactttaacatttattcacagatagcatgaaaagccacagtccatttgccatttagctcatttgattgagagaaaactgaggcacaggaaggcacagtcactgagccacagtcacacaaacacaaaggggagatcggggtcacatgaggtctgtctgcagccacaggcccatcctctcctctaccagaagtgagggcttactgggttccaaggaccccatagtcatttattgactcaaatcctctcttcttaggcatccaaacctcagaggagtgagagcaaatggtcagctgattagtctgtactccagaactaaatcactggcttcaaccgccagagtcagtgcaaaaaaaatgtccaggtctccccctcagatcttaacctccatcactgaatgtgaaatcctgtgtttcccaagtgtccatgtcaccgtcatgagaggatcaaggagaggaccttgttttctttccccactcacaccctgcctcagcacaggcccagtgagagagacacactcaggagctctcacataacaaatgaaggaatggaatgaagaaatggatgatccaaaacctctttagagactggatcttggaatcagaatcctaggaggttctagccacacctgtcccttgtccttcagaggctgacacccatgtttcatccccccactacctcttgaccctaaagccaccccacctcatgcaactctgaagttctttggccaccggagggttctcagggctctttggtcctggactgtggagctgggggcacctggtccctggggtttttgaagtcagtgtctccctcactgctcactgccatggtgtctctgcctctctctgcttctctgtgtccctcatcttcctcccacttcattctgactggcaagccctgtcctgcacagcttcttcctccaaccctaggccttccccagacactccctctaactaggctggctgttctgttcccttcccgctaacactgtggcctggcccacctcccaggaaataggaaaggtgcagaaatcacctggagttgccactcctgccaggcttcctctcgagccaatgtccccaggtcactaagagaaaccttccactgtattcccatccagggctctttccctttgtgaggctgacctgtggacaagaccatgggacagggataggcagttcccccatccacccttgtaattgccagacaagttcctctggcctcctgcacacaaaaaaatataaaataaaataaaatttattgaaatggtggtttgcagtaaagaaagattttaagaactccaagtctgccaaacaggagggtggaggtttattattactcaaatcagcctccccagtggatcaggtgttagagattttcaaggatagtttcaggggcacaggactaaaaaatgagtactgctgattggtgatggaatcatgcgggcggagggaaatgatctgttagtgcttgaatctgcctctaggtaggggccacatgactggctgagccattaggcataggtatggatgaggtcagccggttgtcagaaggcaaaagaatgagaaacatttcaaaagaccaatctcacgttctacaatagtgatgttatctataggagcaattataggagcaattaagcccataggctcatttcacccatttcactagtgactccatcctcaacctgctatggagctcacattctccggtcactttctagagacttctggcttcctgtcaggcataaaacaagcttgaaatttgtcactcggttctaacactaagtaaaaagctgaacaaactcaaaagtcaacaactcattaaaatccttcagagatggctgggcacagtggctcacgcctataatcccagcactttgggaggctgaggcgggcacaaggtcaggagatagagaccatcctggctaacatggtgaaaccccgtctctactaaaaatacaaaaaattagctgggcatggtggtggtcacctgtagtcccagctacttgggaggccgaggcaggagaatggcatgaacccaggaggtggagcttgcagtgagctgagatcatgccactgcagctggggtgacagagcgagactctgtctcagaaaaaaaaatgctgttagagaaatgaagaatgcttttgatgcttactgatagaccgcacagagctgaggaaagaatccctagcttgagaatgtgtcaatagaaacttccaaaactgaaacaggaaagctcaaaaagagtggggaaaaaaagcggaacaacatattcaacttcatatttaatattttgttttgacaatagcaatttttaaattttgtagttgtgggacaactacaaaggctgtcacatacacttaacgggaatacttgtggtttggggaccagatggaggtggccaggtaggtcctatctcatggttttactgcctgtgccacatacaactatttcctcatgatgatgccgttttcataagttggagttcttcgtgtggggagacacaagagccattggcatctcacttagactcttcctaattcacacaaacttaaattttagtggtgtttcctgaccttaagagaaaatgaagaagacatttcacatacctgttttggggtcctccccatgttttgtaactctgcacagaaattagaagcaggttctttctatatttactaacataacacacatcacttcttttaatttggcatccttcctccttttatgtaattgacacactaaccagttcggtccttttaacaggactctctctacttaaggagttgctaatttcaaatcacctttggcatctttctttgagcataatgtgatcctgctggaattcatggcacacctaaaccttattttggtctcaagagaaatatgactaccagcaattgatcttagatgtttggaccatcagtaaaaatttccacttatgaaaacattttaaggtttcctccaaattttttttgttactagagtcagaatataacatgaggtctaaactcctgacaactttttatgggaaaattacagtattacaaattgagcatcggaaatccagaaatccacaatctgaaatgctcaaaactcaacacttctgaccactgatgtgatgctaaaaagaagtgctcactcgcgcattgtggattttaaatttttcagatttgggatgctaaaccagtacatatactgcaaatattccaaaataaaaaaaattagaaatccaaaacactttgttttaagctttctgcataaggagcactgtatctgcatgaagtataggcacgaggctgcacaggagatctctagaacctcctcatcctgcataacagaaaccgcacacccacggaacaacgccctatacccgtgatttcagttgctgcaaactactattctaatctctgattccctctggaatccactgatatgaggtacatagagtagtcaaactcagaatcagagagtagaatgtctaataagagaaagtatctgcaagacttcttcccaaatattggtctaatatccaccaaacacataaggtccctgagggccagacttctgtcatctgttcatgtttgccctttccaccagtcagttctgcatttgcaaacatcaacatgtatttctagaaagatccatatggtcctcaactgccctctacagggggaagggagcatcatggacccagaacagggatcatggtcttgggccaaacctatcagctcttgcctgtccctttcactctttgtaggtcattccttggactctgctctatctttagagtcattggctcaactcagtcactatgagacacctggaaaactgccccaccttgtggctccactgcctgatgactgaactgacctccaggcctgactctggtctcccctgtgttatttctgctgaagtacccagttccaggccaggctttctaatacccaaagggcttaaggacaatgggaagttccatcatccatctctaggatgtccttggcaagggaagctgatgagaaaacatacctcagggggcaaagtgagactgaaactaacaagattccagcactgcatgccccaagtaaggaccaaaaggtgggccaggcaggcagttggagacggagggactcagagaggcaccaggggctgtgactgctggtcctgtgtctttccatgacccaatgctgctgctcaattcacatttgagaaagtccatgcttctcctacataaagcaggcagcctcacaatcactgagccctcaggttgccatgcatctgtcttgtaacacacacacctgccatgggcttttaaggacttgggtgggctgagaggttggaaatgccaactctgattgaaaaatgcctttggaggaatcaaaggtgccacacagggcaatcttctctctgttttctgcacagcggagactcccaagccctccatctccagcagcaacttaaaccccagggaggtcatggaggctgtgcgcttaatctgtgatcctgagactccggatgcaagctacctgtggttgctgaatggtcagaacctccctatgactcacaggttgcagctgtccaaaaccaacaggaccctctatctatttggtgtcacaaagtatattgcaggaccctatgaatgtgaaatacggaacccagtgagtgccagccgcagtgacccagtcaccctggaatctcctccgtgagtatcttctgttcctctgtgagccaggctgccatcccaaatacaagtggccagaggccaggcctctcagtccctctcaggtccaagtacagagacctttatccctgaacatcaaagctggccatgactttctgctccaggcaaaccagagtaggcctaggcttgatcaacaataagagagaagaggcttctcctgtcatgggagactcaggttccacagcttgtgatggaagaaacaggtgaatgtctcaggctccagatcagtgaacacagcggggatttggctgggacttcagtgttgcaacttggctcacagggtcactgtgactgtgtcccttccacagaccaggattttcccttccctctgacaatatcgcctgtgacattattctctttgctccgcatggcctggatgctcccaccgtttcttcctcatacacctattaccatacaggggaagtccccaagctctcctgcctcacagactctcacccactggcagagcattcttggctgattgatgggaagttccagcaatcagcacaagtgttctttataccccaaatcactaaaacatatagaggggtctatgtctgtttcatccataactcagccactggtggaacaaatctcataatcaagaggatcatagtccctggtaagtggatccctggagcattggcaccatgttttccagtaaagtctatctagctgtcagggaagagccacctgctctctgcaaagggagagggaaaatcaaaacccaggaaagggaatatgtttctgctccaaaaccaccagcttctgcctgtccccttcactctttctagatcattctttagacaatacactaacaatgaacaatctgaaaggaagttaaggaaagaatttcaattcacattaacatcaaaaggaataaaatattttggaataagtttaaccaaaaaggtcaaatgattataccctgaaaactacaaaacattgctgaaagaaattaaagacgatatcaatatatggaaacacatttcattttcatggattggaagaagcaatattgttagaaaggcaatactacccaattgagttgcagattcaatgcaacccctaccagaatcccagtaacattttttgcagaatttagaaaactctgtcctaaatctgagctgacaggctcttcttaatgactgccacaacacaaacactgagaaaaagaagcaaccagaaaaggtggaaagttctgatgacatagaaaatagcaatcagcctttctcacatcccaaagccttcaaaaatatacgagtgcagcatggccactatggaattcaccgaaaactaatcaccaagctagaaacatggtgagagaaaaaaaagggcaagaatatatctggcttatcacctcccacttttgcctactaatctgatgctgaaaagaaatgctcactgaagcattttacattttgaatctttcagatttgggatgctaaaccagtaagtatatgacaaatatttgagaatcaaaaaatatcagaaatccaaaacactttttgtcctaaaacttatgcataagagataatctgtgtgaactataggcatcaagctctacagcagatctctagaacctctccaacttgtataactgaaactgcacacccatgaacaacttctgattctccccactcccagctcctggcttccagcagcctcgtctcatattcaatctggaatcaacttacatgaggtccctagattagtggaacccatggaatcagagagtagaatgtccaatgaaagaaaatatttgcaaaacttctctccaaatttgtctcatatccatcaaacacacatggtccatgaggactagatttccagcagttcattcccaccctttccaccactcagttctgcatttgcaaatgtccacatgtatttctagaaagatccacatggtcctcacctgccctctgcagaaggagaggaaacttaaagaacccaggacagggaacatgcttctgctccaaagccaccagctcttgcctgtccccttcactctttctagatcattccttgcactctgctctatctttagaggtcactggttcaagtaagtcatcatgaaacacctgcaaaaaaactgccccacctggtgcctctagtgcctgatgactgaactgacctacaggcttgactctggtcttccctgtgttatttctgctgaaacatccagtcccaggccaggctgctcagtatctgcagggtttcaggacaatgggaagtcccattattactcatctctagaatgtccttggaaatggaagctgcagagaaatcacatctaggggggcaaagtaggatgtaatttggaaggggcccagcagttgcacattccaggtaaggaacccagggtgagccagccagtcaactgattatggagggactgggaggggtaccaggggctgtgactcccactgacgtgtctgtccatgacccaacactgctgctcaattgacacttgagaaagtctgtgcttccctaagacagagcaggaggcctcacagtctttgagcccttagatcatcatacatctgtcttgtgacacatgcaccagctactggctttcaaggactcatgtgggttgacaggtgggagatgccaactctgaatgaaggatgcctgtggaggaatcaaaggtgccacacaggacaatcttctgttatccacacagcgaagctgcccatgccttacatcaccatcaacaacttaaaccccagggagaagaaggatgtgttagccttcacctgtgaacctaagagtcggaactacacctacatttggtggctaaatggtcagagcctcccggtcagtccgagggtaaagcgacccattgaaaacaggatactcattctacccagtgtcacgagaaatgaaacaggaccctatcaatgtgaaatacgggaccgatatggtggcatccgcagtaacccagtcaccctgaatgtcctctgtgagtatcctttgttcctctgtgggccaggacaccagcttaactccaaacgaccagaggccaggcctctcagtctctctccggtccaagtatagacaactttacttctggacatcagacctggccatgactccctgccctgggaaatcctgggtaggcacagccttaaccaagaatataaggggaggggcgctcttgtcatgggacactaggggcccacagcttgtaatgagagaaacaggggaatacctcaggcttgggcttagtaaacatagatgggatttggctgtcacttgaggttgtgtcttggttcagagggtcactgtgtccctttaagagaccaggagcatccccttcccttggatgacatcacctgtggctttattctctttcctccagatggtccagacctccccagaatttacccttcattcacctattaccgttcaggagaaaacctcgacttgtcctgctttgcggactctaacccaccggcagagtattcttggacaattaatgggaagtttcagctatcaggacaaaagctctttatcccccaaattactacaaatcatagcgggctctatgcttgctctgttcgtaactcagccactggcaaggaaatctccaaatccatgatagtcaaagtctctggtaagtggatcccagcatccttggcaatagggttttaggtggagtctatctggctttcagagaagagtcaggaaaacatttgtattcccagactgtgtcccatgggcacaagcaaatcccaaattctcctcctgaaccctcccaacttatctctacagactctcttctgcttgtttttctgttttctcatggctgaccttgtgtctggcctgagaaaggtagggagggggctttatcagccctgagccctatgtggtagaagaggcttcacagagggacaagaaggagagtcctcaagatcaagttgcttctcgctgtcacgaacacatccccttctgccatgtctttgttttcttgtacctattccatgagctacaaggaacatctgaggctttgaaacaagctcacacttttcccccaaatgagaggaggaagccctttgggtgagggaggagcagctcagactctgcttcctgctctgctccgggctcctctggtgactggcctggccctgcctgactccacctggggtggaaccaacatgtgtggagaaagggccctggtggcctgtcctgaagttggctaaatcgagctgccagttgaagccaagcctcccccgggccaggctgcagggaaataagaagagagggagcttcagggctgactcctgagctgcatcctggctctgaagtcaccagctgtatgaggctttgggcacagcacgtgggacacagcacggaggacagtgactgatgcagagctagagaaatagggagattcacccctggggctctgcatggcaggaaaggggcagtgccaaaaagtgtgtaattatagagagggcaagaccacgagacactttatatatatctaatattagacttaccattaactaagtgtgcaatttagtgttgtgtaactatcacactatccatttccagaactttttcctcttaccatattaaacctctgtacccaataaacagtaactctcactccttctccccctaacccttaacacccaccattctactttctgtctctatgtaactggctattctaactatcttttataaatggaattatataataattatccttttgtgtctggcttatttcagttggcataatatcttcaaggttcatccattttgcacgatgtattgtaattttcttccttgttaaggttgaataacatttcaatgtatagatacatctcatttgcctacccacttatctttcaatggacttttcagttgtttccatttttggctagtgtgagtaatgcttctctgtacatcagtgtacaaatatttcttcaaatttctttcaattctatagggagtatgtccagaaggggaattgctggatcaaatggtaatttattgtttaattttttgaaaaacagccacactactttttacattggctataacatttcccattcccatcagcaatgcactagagctccaatttttccatctacttggaaacacctgttgtttagtgttgctgtcattgttgttgtttatcaaagccatcctaaagtgtgtgaggtgttgtaacattgtggttttgatttgcatatctctaagtattcgtgatgctgaggaactttgcatgggctatataaaaggttttgatttttatgaagtctgatttatccattttatttgttgcctatgcttttgttgttacaaccaagaaatcattgtgaaatccactatcatgaagtttttcttctaagagttgtatagtttttactcttacatttagatctttgatctattgtgggttaatttttgtacatggtgttaggtaaaggttccactcttcttgcccttggatatccacctttcccaatatcatttggtgagaacactgtcccttccccattgaacgatcttggcacactcgatgaaaatcatttggccatatatgcaagcatttctttctgggctatgatatttcattaatttctatgtcctcctttatgccagtaccacactgtattgattactggggctttgtagtaaatgctgaaatcaggaagtgtgagtcctccagcttcattcttcctcttcaaagctgtgtgtctatttagagtcatgagatgcaatataaattttaggacagatttttctttttctgcaaaaatgtcactgagattctgataggaattgtattgaatctgcagctcactttgggcagcactgtcctcctaacaatattgagtcttccaattcatgaacacaaaatgtctttcaatttattgatgtcatctttcatttctttcagcaatactttgtagatttcaggtataatcatttcacctctttggttaaacttattcctaaatattttattctttttgatgtgaatataaattgaaattatttttcttaatttcccttcagattgttcatggttagtgtattgaaatacaactgatgtttgaatgttgattttgtattgtgcaacattactgaatttattaattctaataggtttgttccatctttaggattttctacaaataagttcaagttatctataaacagaaataattttactccttccttccaatttgaatgtctttttaaaaattcttccctaatttttctgattagacctttcactactatgttgaataaaagtgtcaatagcaggcatccttgtcttttcctgctcatacagggaaagttttcagtctttctctgttatgtaagatgttagcattgggtttttcacatattgcctttatgttgaggtggttgccttccattcttagaatgtttttattatgaaaaaatactgaatttcatcaaatgcttttattgattcaatcttcttactgattatagttatattcatatttttgtgtgtttctaggagtttgtctatttcatctaggttatccaatttattggcatacaattatttatagtactttcataatcattattttattagaattggtagtaatcgcttcatttttcttttttctttttcttttaagacagagagacaggctctcactctgtaggccaccctaggatggaatacagtggtgtgattatggctcactgcagcctcaacctcctgggctcaagcaattctccttcttcagcctcccaagatgctaggactacaggtgcatgtcaacatgcccagctaattggttttttttttttttgtagagacagcatctccccaggttacctatgctggtccaaacacctggtttcaagaaatccttctgctgtgacctcccaaagtgctaggattaaaacatgacccaccatg

SEQ ID NO: 18514 - DNA, 2076 bp, Homo sapiens
  SIMILAR (93)..(953): 991254mologous to Homo sapiens pregnancy-specific beta 1- glycoprotein 4 precursor,accession number U18468,Smith-Waterman Score=1533.
gaggaaggacagcacagctgacagccgtactcaggaagcttctggatcctaggcttatctccacagaggagaacacacaagcagcagagaccatggggcccctctcagcccctccctgcacacacctcatcacttggaagggggtcctgctcacagcatcacttttaaacttctggaatccgcccacaactgcccaagtcacgattgaagcccagccacccaaagtttctgaggggaaggatgttcttctacttgtccacaatttgccccagaatcttgctggctacatttggtacaaagggcaaatgacatacgtctaccattacattacatcatatgtagtagacggtcaaagaattatatatgggcctgcatacagtggaagagaaagagtatattccaatgcatccctgctgatccagaatgtcacgcaggaggatgcaggatcctacaccttacacatcataaagcgacgcgatgggactggaggagtaactggacatttcaccttcaccttacacctggagactcccaagccctccatctccagcagcaacttaaatcccagggaggccatggaggctgtgatcttaacctgtgatcctgcgactccagccgcaagctaccagtggtggatgaatggtcagagcctccctatgactcacaggttgcagctgtccaaaaccaacaggaccctctttatatttggtgtcacaaagtatattgcaggaccctatgaatgtgaaatacggaacccagtgagtgccagccgcagtgacccagtcaccctgaatctcctcccaaagctgtccaagccctacatcacaatcaacaacttaaaccccagagagaataaggatgtcttaaccttcacctgtgaacctaagagtgagaactacacctacatttggtggctaaatggtcagagcctccctgtcagtcccaggggtaaagcgacccattgaaaacaggatcctcattctacccaatgtcacgagaaatgaaacaggaccttatcaatgtgaaatacgggaccgatatggtggcatccgcagtgacccagtcaccctgaatgtcctctatggtccagacctccccagcatttacccttcattcacctattaccgttcaggagaaaacctctacttgtcctgcttcgccgagtctaacccacgggcacaatattcttggacaattaatgggaagtttcagctatcaggacaaaagctctctatcccccaaataactacaaagcatagtgggctctatgcttgctctgttcgtaactcagccactggcaaggaaagctccaaatccatcacagtcaaagtctctgactggatattaccctgaattctactagttcctccaattccattttctcccatggaatcacgaagagcaagacccactctgttccagaagccctataagctggaggtggacaactcgaggtaaaattccaggggaaaacccctggtaccctggacaggtgagcccactcagaactcacccaaaatgttcggacaccccataacaacagcctacctcaaactgtaacccccaggataacaagttgatgaccttcacactgtgggacagtttttcccaaagatgtcagaacaagactccccccatccatgataaaggctccccacccctcttaaactgtcccttgcctcatgccctgccctctttccacctgggccaggataatgccagtccattagaatttccacatgtagtagccttcctgagggtaacaacagagtgtccagatatgtcatcctcaaccctcaaacttttacggtaacatctccagggggaatgtgggctctctccaatcttggcatacagggctccccaatagaaatgaacacagagatattgcctgtgtgtttgcagagaagatggtttctataaagagtaggaaagctgaaattatagtaaagtctcctttaaatgcccattgtgtgggatggctctcaccatttcctaaggagatacagtgtaaaaacgtgacagtaatactgattctagcagaataaaacatgtaccacatttgctaaaaaaaaa

SEQ ID NO: 18515 - DNA, 2977 bp, Homo sapiens
  SIMILAR (976)..(2034): 511254mologous to Homo sapiens pregnancy-specific beta 1- glycoprotein 7 precursor,accession number U18467,Smith-Waterman Score=630.
gagaacaaccatcgtaatggatgtaaggtggtatctcactgtagttgtgatttttattttcctaatgattagtgatgttgagcatgttttcatgtgcttattggccatttgtaaattaattttacatttcctcctttgtaatgtaagaggtagcacaccgtgcattgttctgcttcttgtttttctcactgtgcggtgtatcttggaaaccttccccagtgcacagacagaaggatacctcattctttgccacagctgaccagtatccatgatgtggatcatggctcatgacccagttctctatggataaacgtcagggtcgttcccggtctgtgaccatcaccaacactgccgtgactagtctagaatgggtgccatttcatgcatttgcaattcccagaagtacactggttagtcagcagggggcgacatcacacacagataacactcaggaaatggattcccctggacaggaacctggctttgctaaggaggtagaggtggagcctggtttccagcccttgccccaaatgacccttctggtccctgccatgtgcctgctccttcatggtgcctgctctgccaagggtttttgtgcagctccccacttcctcctggcatcacccatggggaaggggcaagtaccactcaaccccttctccttcacccttagcgaggagcttgatctgcctcaatccctcaagaggaaccccaagggatgtatagcaagaagggctaagcccatcctggctgcagagaggcataagagattgatcctgcacacctccacgaaggaaaataccctcttggacaaccgggtcatcgaatgtctaaccatggaagctgtagcaaagttcaacataatgaaagagagggagggtccttctcaccagccagcactcagcccacccaaagcaagatggcacatcctctggcagaagctcatgttcacagcctcacttttaaccttctgggaacctgcccaccactgccagagtcactactgaagccatgccattcaatgccacagaggaggaggaggaggagttttttctacttgcccacaatttgccccagaatcttacccgggctacaatctgggtacaaaagggcaaatgaggcacctctaccattacattacatcatatgtagtagacggtgaaataattatatatggggcctgcatatagtggacgagaaacagcatattccaatgcatccctgctgatccagaatgttcacccgggaggaccgcaggatcctacaccttacacatcataaaagcgaggtgatgggactggaggagtaactggacgtttcaccttcaccttatacctggagactcccaaaccctccatctccagcagcaatttcaaccccagggaggccacggaggctgtgatcttaacctgtgatcctgagactccagatgcaagctacctgtggtggactgaatggtcagaagcctccctatgactcacagcttgcagctgtccaaagccaacaggaccctctacctatttgggtgtcacaaactatactgcaggaccctatggaatgtgaaatacggaacccagtgagtgccagtcgcagtgacccagtcaccctgaattctcctcccggaagctgcccaagccctacatcaccatcaacaacttaaaacccaggggaggaataaggatgtcttaggcctttcacctgtgaacctaaggagtgaggaactacaccttacatttggtgggttaaacggttcaggagcctccccgtcagtcccggggtaaagcgaccccatttgaaaaacaggatccctcattcctaccccagtgttcacgaggaaatggaaacagggaccctattcaatgtggaattacggggaccgatatggtgggcatccgcagtttacccagttcaccctggaatgtcctcttatgggtccaggacctccccaggattttaccctttcatttcacctattaccgttcagggaggaagtcctcttacttgtcctgttctggcgggactctaaacccaccgggcacagtattcttgggacaattaatggaaaagttttcagcttaccaggggacaaaagctcttttattccggccatattactacaaagcatagcgggctctatgtttgcctctgttcgtaactcagccactggaagggaaagctccaaatccatgacagtcgaagtctctgactgggacattaccctgaattctactagtacctccaattccattttctcccatgggaatcactaaggaggcaaggacccactctgttccagaaggccctataaggtgggagggtgggacaacttcaatgttaaatttcatgggggaaaaccctttgttacctggaaggcatgaggccacttcaggaacttcacccaaaatatttcggacaaccttaaccaacagatgctcaaactgtaaaccaggacaacaagtggatgactttcacactgtggaccagtttttccccaagaatgtcagaacaagactcccccatcaggatgggggctctccccccccccttaactgtcccttgcctcatgccctgcctctttccacttgggcaggataatgccagttcattaggaatttccacatgtagtataggagcttcttgaggagtaacaacagagtgttcagattatgttcatcttcaaccttcaaactttttacgttaacatcttcagggggggaaatgtggggctctctcccaccttgccatacagggctccccaataggaaatggaacacagagtatattgccctgtgtgtttggcaggaggaaggtggtttgtatgaagacgtagggaaagctgaaattataatagagtccccctttaaatccacattgtgtggatggctcttgtccgtttcctaagagatacattgtaaaacgtgacagtaagactgattctagcagaataaaacatgtactacatttgctaaaaaaaaaa

SEQ ID NO: 18516 - DNA, 1134 bp, Homo sapiens
  SIMILAR (1)..(1008): 1001254mologous to Homo sapiens HSP40,accession number D49547,Smith-Waterman Score=1789.
atgggtaaagactactaccagacgttgggcctggcccgcggcgcgtcggacgaggagatcaagcgggcctaccgccgccaggcgctgcgctaccacccggacaagaacaaggagcccggcgccgaggagaagttcaaggagatcgctgaggcctacgacgtgctcagcgacccgcgcaagcgcgagatcttcgaccgctacggggaggaaggcctaaaggggagtggccccagtggcggtagcggcggtggtgccaatggtacctctttcagctacacattccatggagaccctcatgccatgtttgctgagttcttcggtggcagaaatccctttgacaccttttttgggcagcggaacggggaggaaggcatggacattgatgacccattctctggcttccctatgggcatgggtggcttcaccaacgtgaactttggccgctcccgctctgcccaagagcccgcccgaaagaagcaagatcccccagtcacccacgaccttcgagtctcccttgaagagatctacagcggctgtaccaagaagatgaaaatctcccacaagcggctaaaccccgacggaaagagcattcgaaacgaagacaaaatattgaccatcgaagtgaagaaggggtggaaagaaggaaccaaaatcactttccccaaggaaggagaccagacctccaacaacattccagctgatatcgtctttgttttaaaggacaagccccacaatatctttaagagagatggctctgatgtcatttatcctgccaggatcagcctccgggaggctctgtgtggctgcacagtgaacgtccccactctggacggcaggacgatacccgtcgtattcaaagatgttatcaggcctggcatgcggcgaaaagttcctggagaaggcctccccctccccaaaacacccgagaaacgtggggacctcattattgagtttgaagtgatcttccccgaaaggattccccagacatcaagaaccgtacttgagcagaactgcctggttggcgtccacaagcaatacctctcgttccagcaggaccaagggagccagcctccaaacgggctgggcgtcctgaaggctggccaaaccggagctcaaggtcctgcccaggactag

SEQ ID NO: 18517 - DNA, 606 bp, Homo sapiens
  SIMILAR (304)..(510): 921254mologous to Homo sapiens HSP40,accession number D49547,Smith-Waterman Score=332.
atggacattgctgacccattctctggcttccctatgggaatgggtggcttcaccaacatgaactttggccgctcccgccctgcccaagagcccacccgaaagaagcaagatcccccagtcacccacgaccttcgagtctcccttgaagagatctacagcggttgtaccaagaagatgtaccaagaagatgaaaatctcccacaagcggctaaaccccgacggaaagagcattcgaaacgaagacaaaatcttgaccatcgaagtgaagaaggggatcagcctcccggaggctctgtgtggcacacagtgaacgtccccactctggacggcaggaccattcccgtcgtgttcaaagatgccatcaggcctggcatgcgacgaaaagttcgtggagaaggccttcccctccccaaaacgccagagaaacgtggggacctcattattgaattggaagtgatcttccccgaaaggattccccagacatcaagaaccatacttgagcagattctttcaagctacctgagctacctgagctccccaggactgaccagggacctatccagagctcaaggatttctggatctttctaccagttgtggaccatga

SEQ ID NO: 18518 - DNA, 2548 bp, Homo sapiens
  SIMILAR (265)..(1044): 431254mologous to Homo sapiens HSP40,accession number D49547,Smith-Waterman Score=417.
  misc_feature (1)...(2548): n = a,t,c or g
actggtcggcggcggaaccggtggacggcgacagcgggtcggcgggccgcaggcggggcccgtggccaaaaactacctaccacccgtgggccgtggcccgcggcgcgtcagagaaggagatcaagcgggcctaccgccgccaggcgctgcgctcccacccagacaagaacaaggagcccggcgccgaggagaagttcaaggagatcgccgaggcctatgaggtgctcagagacccgcgcaagcgcgagatcttcgaccactaccgggaggaagccctaaagggcagcggccccagtggcgggtagcggcggtggtgccaatgctacctctttcagctacacattccatggagagcctcttgccatgtttgctgagttcttcggtggcagaaatccctttgacacctttttttgggcagccggaacggggaggaaggcatggacattgatgacccattctctggcttccctatggggcatggggtggctttaccaacgtgaacttttggccgctcccgctctgcccaagagcccgcccgaaagaaagcaagattccccaagtcacccacgaccttcgagtctcccttgaaggagatcttacagcggctgtaccaagaagatgtaccaagaagatgaaaatctcccacaagcggcttaaacccccgacggaaagagcattcgaaacggagacaaaatattgaccatccgaagtgaaagaaggggttggaaagaagggacccaaatcacttttccccaaggaaggagaccagacctccaacaacatttccagctgatatcgtctttgttttaaaggacaagccccacaatatctttaagagagatggctctgaatgtcatttatcctgccaggatccagcctccgggaggcttctgtgtgggctgcacagtgaactgtccccactctgggacgggcaggaccgatacccgtcgtattcaaagaatgttatcaaggcctgggcatgcggcggaaaagttcctgggagaatggcctccccctcccccaaaacacccgagaaaacgtgggggacctcattatttgaggttttgaagtgatctttccccgaaaggattccccaggacatcaagaaccgtacttgaggcaggttctttccaatatagctatcttgaggttccccaaggattgaccaggggaccttttccagagctcaaggatttctgggaccttttcttaccagttgtgggaccatgagagggtggggaggggcccaggggagggctttcgtactggctgaatgttttccagagcatatattacaatctttcaatagtcgcacactagacttcagtggtttatcgagctattagggcatcaggtggtggggacagcaggaaaagagcattccagtctgccccactgggtctcggcagccctccccgggaatgggccccacatccaccctccaagtcccctggccaaggggtgagaggcaagaccaagcaagattggactttgattcctcctgtgtcttttttgattctggctggtagataatgtcaacctgcagtctttggattcccagaccctggtacactcctccttttgctgttgtgtgatcagcttggtgcttagtctgtatttgtctcccatggtcttgctctttctcctgggagaattctgtcttctcttttgggccattttcaaaattgaggaacctaaactattcctgcagaactgcctgggttggcgtccacaaggcaatacctcttcgttccagcagggaccaaggggagccagccttccagttgagtgacttcaggcaagtgcaagccacctctcccttggatggtctggggagcctggccctcaacaagggggcctttcctgaccttttggctccaagtggaagctgaatgtcctcactttgtgggtcaacactcttttacatttcttgtaaagggcaatcttgggcacacgttgggggtttaaccagtgggcccagggtaattttttttgttttcatgggactatgggactcttttcaaaggggatcttgatcctttttgaatttttgcaacagcccccctagatacaaatccctttttggataaaaggggtcttttgctttcctgatttaccaggagcacttgtggaaccgtcctgtaaaatatgtttttttataattcccatgtattagttgggtgtaccacttcaaaaacctgtcccccggcagcccagtgcctctctgttataggggccataatgggaattctgaaggaaatcttggggaggggaaggggagttggggaccaaatgtcttgttccctgggggggcccagtcccagtgcttcagacctttaggactcattgttaagttggccactgcccaacctggaggacccaaagtgtgtgacntaagtcaatgacatgtgcgacagcattaaaagacttgatgctacacctcatggatcaaactactgggggtcctttattaagggcccctgagggggccctgcttttgggtagcagacaggctgtcaggattctccttatagggagcctttttaaa

SEQ ID NO: 18519 - DNA, 1548 bp, Homo sapiens
  SIMILAR (1548)..(907): 931254mologous to Homo sapiens Membrane-bound protein PRO1028,accession number Y66714,Smith-Waterman Score=1122.
tcaactccatcgaatagctccaaccccagcggcccaccgagccccaactccccccacaggagccagctccccctcgaaggcctggagcagccggcctgtgacacctgaagccgccagctcgccacaggggccagggagctggagatggcctccagcgtcagtgccaagactgagcgggccctccagtgttgtccaaggaaatgtagaatcactttgtagatatggagatgaagaagacaaatctttattataatattgatcagttttatgccgcattgttcgtggcagtagaccacatctgttcgtctgcacagctgtgaggcgatgctgttccatcagctcctcggaggccgtcacgtcgaacaccgggttgcggaagccgaggggcgctccagccggggccgccgcctcgtgcctcctccacctgagcctccccgcgcggcgcagcagcggcggcgccaccagcaggaccagcagcgccagcagcacggcagccgccacgccgcccgccagcccagccgcggagctgccccagacgtgtgcgcccgactcccgcatggtcgcctccaggacgccgagggcctcgccgttctcggcgacgtccgccaggagggcccgggccagccgccccgctccgcctgtctcgggcccattctccaccagcaccacctggatctccgtatcggcctcacggagccgggacgagcgtggcaccttggacacggccacctgcagcccgtggtactgaggcagacccaggaaggtgtccagtatccgcgcccggtaccgctccaggtcaaatgcggggccgtgggtcagcaacacaacggctccacagaggtcacagcactgcccctggggccggagggcgctgtggcaggcggcctgggggcagcggccgcccaggggctggagcagggccgcgcagatccacggctgcgcctccgcgttgccgcagacgcagcccgacgggtccgcgcagtcctcggggcccacgctcagcgcgcccggcccgtggaagcgtaggcggcccgcgcgggacgccaggaaaacagccaggtcctcgtcgcgcgtgaacgtccggcccagagccgagatgctgcggacacgcacggggctagcgccagggccgagccccacgcggaaggaggcactaggcggaaagaagacgtcgtcgtggcggcagggcacgcgctcggcgtccacgaagaagaggccaggtgcctcgtccccagagcgccacaggtgcgggtcatgccaggagaagcggtcagagtcgcggaagacggcaggttcgcccgcgccacagtccaggtgcgagcccacgtctgagacgccgaatccggctcctgaagccaggacgagttccccatccagcggcaggagcttgtccgccgggaactcaacggcgccgccggcgcacggggtccggttctggctccagttggctgcgacgtcgaagtccgtgttggggacccagagtttggagaccgcctgggtcagtgcgcagagctgcagccacagcaggacccggcccaggacgcccat

SEQ ID NO: 18520 - DNA, 1851 bp, Homo sapiens
  SIMILAR (709)..(873): 871254mologous to Homo sapiens mono ATP-binding cassette protein,accession number AB013380,Smith-Waterman Score=247.
atggccagcaaagaacattggcaagaaatgacaaagggcttaggaggaaaatcagaaaaatggggtatcttgagagctgaaagaagggagtttcaaaaagcagggcctggtcaactgtgtcaaaaccagctgagagtgacgtggaaccaaacctgcagtatctctgagatatgcatgtaccaagttctaaaagttagaaatacaaagactgctcagaatgaccacagaatgtatcagacacacgaagcaaaaaaagttcggctctccgggcctccaaccgcccttaccgggcaatgcgaagtccagggcggacagcacagccctgccagcactccctgcccagcagaaagagaccaagcaacaagaaccaggggagagcagctaggagccaggagggagttcgccttcgcgaatggagcgtgccgaagccgctccagcccagagtctgctggcggcaccggaactgggcagggttggggggccccccatctgggcccggccttagcgagacgagtgacagggccgccccagcatgggtctcccgggccgcggacccgccccacgccgtatccagcacgctgtcctcccgccccatctttgtgccggccatcgtgtggtcgcgtctgcgcgctccgcccggtctgccggcgtgagaaagagctcgtgtcgttcccaagttcagaccagaggggacggcgaagcgcgaaaaagttccctgcgcccaccgctgcctggacaggggacgaggcctgtcggcgcgggccggcggcgcctcccggggacaaggggcggttgcgccccgcagcggccggactcccggaggcccggaagctcctggggctggcgtaccctgagcgccggaggctggcagcatgtgcacggcacagagcaggcgctcagagtgccttcagtgaaggaataaatgaccataccaccaggcacagagtgaggcctttagaaaccctgagcatcatcggcattttgctgggtatgcctcctaaactgtgtgaacagaaaactttgattgcatcagaaactttaaaaacacagtctaccatgaaatatgtacagacgtgtgctgaaagcagctttagcataactgtgttacattcctcttctaaaggaaggcctaagccgcccctttggggaggaattcgcagctgtcttcatacagattcccgggctgcggccggcggcgtggcctgcagtcggcggctacacctggactggcgtcgcgttcctgcgcaggggtgggtcctgcgggttggatgccgggctcggggaggaggtggcgggcgcccgcggggaaggtatcccagtgcccgacagccaagcagggagcacggctccacagctcctttgcatgtaggggaaaaggaaatgtctttgcggcgaagtcgggattcaactttgcacatggtgatcgtgcgtggctcgcgaagctgccaggcttttgaaaatgtattcgataaggcgttggtccgaagtgagtggatggttagaaacagtggtgtcattttagacttagcggaagtggagtgcaggaacgctacatgcagttctcccatcagttgtgaaagtcgttgtaatgcggatctcgcagtctttgtggttctgggatcagaaggaagcccctggtcacatgtagaatcctttgagcagcaagatgctgtagaaggacagccattcatgggatctatggcgcactctgtgctagggcagaatgccagggaagagctgcctgtcttcagcgcccttgctgggaaccacacgccagaacccgaccctgccatgctttgtgcttcaggcagcaggaccccacccctaacagagtctcaagtcagacactaa

SEQ ID NO: 18521 - DNA, 383 bp, Homo sapiens
  SIMILAR (141)..(290): 701254mologous to Homo sapiens dJ437M21.1 (novel protein),accession number AL049758,Smith-Waterman Score=184.
gacaccatagtgtctgctcctgtctcatgggctagacctagatatgtgactgccattaacttcaaggaggcatcccccacatctgtggaagtgagagagcccaggacgagtgtcaacaaggccctccaaagtcgctgtagtactcttgctcctacagttactttgacgagccagtggagttaaggaacagttctttctttaggtggaatcacagttcagattcctattggaaaaaaaagtccagcaaagatactgaaccagttctgaaacccccaggttattcagccaggtatgaatgcaaaactgtggggtcgtcctagtgaatccaggcatttctccgaaaaaattggtgatatcatgacgacataaaaacccttgtaagg

SEQ ID NO: 18522 - DNA, 777 bp, Homo sapiens
  SIMILAR (378)..(689): 531254mologous to Homo sapiens ARFGAP1 protein,accession number AF111847,Smith-Waterman Score=239.
atactacgcccttttacgtaagggacttgatcatcgcagattttgttatccacagggtcgtgaaaccaattcccccatgctgagggactcctggaataatactaacttcacagagttctgaggactaagccacagaacaaatgtagagtgcttgtcacagtgcctggcaggtcctaacccttaggaaatgttagctgtagtcacagaagctttcaaacagctcgtgtagactatagtcttatatatgttctagcttggggccaaaaaaaggaagtttgggagctcagaaactggcaaacacatgctttaatgaaattgaaaaacaagctgagagagcccaggacgagtgtcaacaaggacctccaaagtcactgttgtactcttgctcctacagttactttgacgagccagtggagttaaggagcagttctttctctagctgggatgacagttcagattccgagtatgaaacacatttgcttcacctcaaattagtttaacctaatttggctgtttttaattgcagacctactgctcgccgcaagccagattatgagccagttgaaaatacagatgaggcccagaattctttttgcaaaactgcccacaatctttggagcctaacatttccttttccttgtcttctctagtatgagaccagggcccgcctagagagctggtctctgtcatgtctacggtatgaacacatttcatctggataggactgtttccttttccaagatattttagcaaccattattcgatgctctgatctct

SEQ ID NO: 18523 - DNA, 369 bp, Homo sapiens; identical to SEQ ID NO: 7968
  SIMILAR (2)..(364): 911254mologous to Homo sapiens p40,accession number U93569,Smith-Waterman Score=577.

SEQ ID NO: 18524 - DNA, 381 bp, Homo sapiens; identical to SEQ ID NO: 6146
  SIMILAR (1)..(369): 851254mologous to Homo sapiens p40,accession number U93569,Smith-Waterman Score=526.
  misc_feature (1)...(381): n = a,t,c or g

SEQ ID NO: 18525 - DNA, 846 bp, Homo sapiens
  SIMILAR (37)..(828): 601254mologous to Homo sapiens p40,accession number U93570,Smith-Waterman Score=787.
atgactggcgaggcctcaggaaacttacaatcacagcggaaggcaaagaggaaggaggcacgtcttacatgtttagagccggtggaagaggatcacaactccttgccagcaagggaagaaaaccagacagagaatgagtctgacgaattgacagaagcaggcttcagaaggtgggtaataacaaactcctccaggctaaaggagcatgttgtaacccaatgcaaggaagctaagaactttgaaaaaagcttaaaggaattgctaactagaataaccagtttagaggataacataaattacttgatggagccgagaaacacagcacgagaacatcgtgaagcttactcaagtatcaatagccaaattgatcaagcagaagaaaagataccagagattgaagatcaacataatgaaataaagcgtgaagacaagattagagaaaaaagaatgaaaaggaacaaacaaagcctccaagaaatatgggactatgtgaaaagaccaaatctatctttggctggtgtacctgaaagtgacgaggagaatggaatcaagctgaaaaacactcttcaagatattatccaggagaacttccccaacctagcaaaacaggccaacattcagattcaggaaatacagagaacaccacaaagatactccttgagaaaaacaaccccaagacacataattgtcagatacaccaaggttgaaataaaggaaaaaatgttaagggcagccagagagaaagatcaggttacccacaaagggaagcccatcagactgacagcagagctctgcagaaaccgtacaagccagaagagagtagggggccaatattcaacattctaa

SEQ ID NO: 18526 - DNA, 1442 bp, Homo sapiens
  SIMILAR (192)..(1154): 481254mologous to Homo sapiens p40,accession number U93570,Smith-Waterman Score=655.
atgtaggaagcatgactggcgaggcctcaggaaacttacaatcacagcggaaggcaaagaggaaggaggcacgtcttacatgtttagagccggtggaagaaccaggctcaggaacacatcctcccatgtgttatctagcaccaccaatgtggaagtgccaaaaaccagaaacaggaatcaaagaaggtgacagggatcacaactccttgccagcaagggaagaaaaccagacagagaatgagtctgacgaattgacagaagcaggcttcagaaggtgggtaataacaaactcctccaggctaaaggagcatgttgtaacccaatgcaaggaagctaagaactttgaaaaaagcttaaaggaattgctaactagaataaccagtttagaggataacataaattacttgatggagccgagaaacacagcacgagaacatcgtgaagcttactcaagtatcaatagccaaattgatcaagcagaagaaaagataccagagattgaagatcaacataatgaaataaagcgtgaagacaagattagagaaaaaagaatgaaaaggaacaaacaaagcctccaagaaatatgggactatgtgaaaagaccaaatctatctttggctggtgtacctgaaagtgacgaggagaatggaatcaagctgaaaaacactcttcaagatattatccaggaaaacttccccaacctagcaaaacaggccaacattcagattcaggaaataccagagaacgccacaaagatactccttgagaagagcaactccaagacacataattgtcagattcaccaaagttgaaatgaaggaaaaaaatgttaagggcagccagagagaaaggtcggggttacccacaaagggaagcccatcagactaacaggcggatctctcggcagaaactctacaagccagaagacagagtgggggccaatattcaacattcttaaagaaaagaatttttcaacccagaatttcatatccagccaaacctaagcttcataagtgaaggagaaataaaatactttacagacaagcaaatgctgagagatttttgtcaccaccagggcctgcccttaaaagagctcctggaaaggaaggcacttaaacattggaaagggacaacccggtaccagccactgcaaaaacatgccaaattgtaaaagaccattcgagactaggaagaaactgcatcaactaacgagcaaaatcaccagctaacatcataatgacaggatcaaattcacatataacaatattaactttaaatgtaaatggactaaatgctccagttaaaagacacagactgggcaaattggataaagaatcaagacccatcagtgtgctgtattcaggatacccatctcacatgcagagacacacataggctcaaaataaagggatggaggaagatctgccaagcaaatggaaagc

SEQ ID NO: 18527 - DNA, 2216 bp, Homo sapiens
  SIMILAR (383)..(1171): 631254mologous to Homo sapiens ornithine-delta- aminotransferase,accession number M23204,Smith-Waterman Score=686.
  misc_feature (1)...(2216): n = a,t,c or g
acccgactgcagacataccgacccgcaatccgggtcgacccacgcgtccgcattgttaaagctcggcgctgacaagatctgaggcttttctatttgaaggacacaatgttttccaaactagcacatttgcagaggtttgctgtacttagtcgcggagttcattcttcagtggcttctgctacatctgttgcaactaaaaaaacagtccaaggccctccaacctctgatgacatttttgaaagggaatataagtatggtgcacacaactaccatcctttacctgtagccctgggagagaggaaaaggtattttacttatggggatgtaggaaggcagaaaatattttggacttcctggagttcttacagtgncttgtccaaccaaggggcattgtcaccccaagattgtgaaatgctctggaagagtcaagtgggacaaaattgacctttaacatctagaagctttctataataacggtactttggtgaatatgagggagtattattactaaaccttttcaacctaccacaaagttcttccctatgaatacaggagtggaggctggagagactgcctggtaaactagcttcgtaagtgggggctattaccgtgaagggcattcagaaatacaaagtcaaagattgtttttgcagctgggaacttctggggtaggacgttgtctgctatctccagttccacagacccaaccagttacgatggttttggaccattttatgcccgggatttcgacatcattccctattaatgatcttgcccgcacatggagcagtgctctttcaaggatccaaaatgtgggctggcgtttcatgggtaggaaccaattcaggggtgaagcaggcgtttgttgttccggatccagggttacctaatggggagtgcggagagctctggcaccagggaccaggttctctttatttgcttgatggaaatacagacaggattggccagaacttggtaggatgggctggctgttgattatgaaaatgtcagacctgatatagtcctccttggaaaggccctttctgggggcttataccctgtgtctgcagtgctgtgtgatgatgacatcatgctgaccattaagccaggggagcatgggtccacatacggtggcaatccactaggctgccgagtggccatcgcagcccttggaggtttttagaagaagaaaaccttgctgaaaatgcagacaaattgggcattatcttgagaaatgaactcatgaagctaaccnttcctgnatgttggtaactgcccgtaagaaggaaaaagggatttatttaaacgcctanttggccattaaaggaaaccaaaagatttgggatgcttgggaaaggtgtgtctacgacttcaggataatggacttctgcccaagccaacctcagtggcgacattatcgaggtttgcgcctccgcatggtgatcaaggaggatgagcttcgagagtccattgaaattattaacaagaccatcttgtctttctgagggtagccagctgttttcagtgggtccctggggagccagctgggagacaggtgggtcctgttaaaagctttatttcctaatgtggggcacattcccactccccatgagttcttcaaaaacttttttttttgaatatatttttttttcagtttgatacataatagaaccaacgttttatggaacctgccgttttgctttggtaacgtaacttaaataatgtatgggcctctattatttcagttgaaagtgtttttgaagtgccatgtgtacctttccctaaggtggaaatgcatcctatataccagaccagccctccaaatccaagtcccttccagtataaattgatatatgtttttataaatttcccctcacgggtataagtgtttccatatttggaaaaaagttaccccccgggggaattgccataaaaggccttccatccttataaagtgaaatccattgttatttgaattttaggaaggattaatggttaagtgtatataaaatacctaatattaagtaaacttcatattggccaacccccagggttgtattctatggatgtcattattttgaattaagaattagtgtttaacattcctaaattgttttgagtgcctgaatattaatttgtaaaaaatgttaattttcaatacttctttaaatttaaaataaagcttatatttcaaatgtcaaaaaaaaaaaaaaaaa

SEQ ID NO: 18528 - DNA, 348 bp, Homo sapiens
  SIMILAR (113)..(346): 981254mologous to Homo sapiens 30 kDa protein,accession number AF157321,Smith-Waterman Score=380.
ggcacgagcaaaggggcttgagaaggcccggaggcgaagccgaagagaagcaactgtgccccggagaagagaagctcgcccattccagactgggaaccagctttcagtgaagatggcagggccagaactgttgctcgactccaacatccgcctctgggtgggcctacccatcgttatcatcactttcttcgtaggcatgatccgccactacgtgtccatcctgctgcagagcgacaagaagctcacccaggaacaagtatctgacagtcaagtcctaattcgaagcagagtcctcagggaaaatggaaaatacattcccaaacagtctttcttgacacgaaaatatta

SEQ ID NO: 18529 - DNA, 801 bp, Homo sapiens
  SIMILAR (1)..(300): 991254mologous to Homo sapiens von Hippel-Lindau tumor suppressor; VHL protein; pVHL,accession number AF010238,Smith- Waterman Score=533.
atgccccggagggcggagaactgggacgaggccgaggtaggcgcggaggaggcaggcgtcgaagagtacggccctgaagaagacggcggggaggagtcgggcgccgaggagtccggcccggaagagtccggcccggaggaactgggcgccgaggaggagatggaggccgggcggccgcggcccgtgctgcgctcggtgaactcgcgcgagccctcccaggtcatcttctgcaatcgcagtccgcgcgtcgtgctgcccgtatggctcaacttcgacggcgagccgcagccctacccaagcgctgccgcctggcacgggccgccgcatccacagctaccgaggcgtgctgggatttcggccacaacgtccgaccgaaagtttttaagcagggacatgacattgtcagatttatatactgaaaagctcacccaggttgccaagtggtttggaggggaaagactgctgtcgaggaagcagttaggtagttgtgaaaacccaggtcacctttggctcttcagagatgcagggacacacgatgggcttctggttaaccaaactgaattatttgtgccatctctcaatgttgacggacagcctatttttgccaatatcacactgccagtgtatactctgaaagagcgatgcctccaggttgtccggagcctagtcaagcctgagaattacaggagactggacatcgtcaggtcgctctacgaagatctggaagaccacccaaatgtgcagaaagacctggagcggctgacacaggagcgcattgcacatcaacggatgggagattga

SEQ ID NO: 18530 - DNA, 1398 bp, Homo sapiens
  SIMILAR (1398)..(1060): 1001254mologous to Homo sapiens von Hippel-Lindau tumor suppressor; VHL protein; pVHL,accession number AF010238,Smith- Waterman Score=610.
ttacttggagtgctgcaaggcaaaggtgcactttttgtaagttgcatacagcaagaggatagagcgcagcatctgtttgcacatagtgactgtcatctgaatctgaggctccttcagtccaatgggccactggtgctccctgctaatgattttgcaaaaggctgacttgtctgaaactctgaaagtcccggtccactttggtggctgagctgtgataaccctgccaaagacagaatctactccactgaggcggatgggctggggcttcctgaccagtcctttgttgttcatcgtgcgcaactctgatgtgtggcagggtaacttgggactcactccagattccaggaatgggctgtctaggactagagtgacctcttgaaagcacagctgcacttcaaggtcggacggtgtgtgtgggaagcagggggaggccttgaatgggtgcttggaggaaggtgtaggtgtcgtgtgccgcagccattggaaactctcatccagtggggtccatggtgaccagagctggtatcctgccattgacagtccttttcccttccgcttgcctctgctcgacttcccttgcgcttgcccttcggtagctttccgttggctccgcttccctttgctttcctttcctttcccttcgcgtccgtcgctttccttggcttgcgtctcttccttcgtttgcgttagctttcggacgctgcgtttgtttcgtttccgttctttttgttcgttgcggttgctgtgtttgcgtcgtgtcgttcgtttccgcgctcctttccctccctgccttggttgttttccctccgcgctgtgtttccgttcctgttcttccgtcgttacttccgtggctcccttctggctctccctgcctttcgccttgccgttcctgccgtgtttccgtgcccttgcttcgtacactctcccagtatcaccatcagctctgagggactgtcttctttctaaaatgacccacaggaagccaagaatttttaggactgaagggtcaatcacagtcactcgttcattcagctgaagagggaactggagcactgggactcggtagctgtggatgcggcggcccgtgccaggcggcagcgttgggtagggctgcggctcgccgtcgaagttgagccatacgggcagcacgacgcgcggactgcgattgcagaagatgacctgggagggctcgcgcgagttcaccgagcgcagcacgggccgcggccgcccggcctccatctcctcctcggcgcccagttcctccgggccggactcttccgggccggactcctcggcgcccgactcctccccgccgtcttcttcagggccgtactcttcgacgcctgcctcctccgcgcctacctcggcctcgtcccagttctccgccctccggggcat

SEQ ID NO: 18531 - DNA, 1434 bp, Homo sapiens
  SIMILAR (1)..(339): 1001254mologous to Homo sapiens von Hippel-Lindau tumor suppressor; VHL protein; pVHL,accession number AF010238,Smith- Waterman Score=610.
atgccccggagggcggagaactgggacgaggccgaggtaggcgcggaggaggcaggcgtcgaagagtacggccctgaagaagacggcggggaggagtcgggcgccgaggagtccggcccggaagagtccggcccggaggaactgggcgccgaggaggagatggaggccgggcggccgcggcccgtgctgcgctcggtgaactcgcgcgagccctcccaggtcatcttctgcaatcgcagtccgcgcgtcgtgctgcccgtatggctcaacttcgacggcgagccgcagccctacccaacgctgccgcctggcacgggccgccgcatccacagctaccgagatcctactatgttgacagacatgatgaaagggaatgtaacaaatgtcctccctatgattcttattggtggatggatcaacatgacattctcaggctttgtcacaatcaccccagactatgtccctcctcttggaaactttgatgtggaaactttagatataacacctcatactgttactgctatttcagcaaaaatcagaaagaaaggaaaaatagaaaggaaacaaaaaacagatggcagcaagacatcctcctctgacacactttcagaagagaaaaattcagaatgtgaccctacgccatctcatagaggccagctaaacaaggagttcacagggaaggaagaaaagacatcattgttactacataattcccatgcttttttccgagagctggacattgaggtcttctctattctacattgtggacttgtgacgaagttcatcttagatactgaaatgcacactgaagctacagaagttgtgcaacttgggccccctgagctgcttttcttgctggaagatctctcccagaagctggagagtatgctgacacctcctattgccaggagagtcccctttctcaagggaagtggcccaggagaggaggcgtggacaggtatcccagtgactccagtcggagtcagcttgggtagcatggcccgcggaagacagaccgggcgaacggggcgggccccaggctaccgagctgcagctgacaggcagtccggcggcgtcgggtctccatggatacgggggtggggccaggcggcggcgggcactctctgcgggtcccgcggctcccgcggcttccggcccactcagcgcctccagaggcctcaggccacacccatcctcttgagcacccacgaattctcgggcactatgataggcctgtgcaacgtcacgtcctcgccggcgtttgctctctactcccacgctatagaacacagaagcctggacgccggcggcgaggttgtagtgcacgcgcgttatggtcgttacacggcgcgtggggtcttgccgtctccctcaactgctccaggctcaggttgcgcactcagtgtccgcagtgagatgggcacagtcgattaa

SEQ ID NO: 18532 - DNA, 1174 bp, Homo sapiens
  SIMILAR (324)..(1034): 381254mologous to Homo sapiens 30 kDa protein,accession number AF157321,Smith-Waterman Score=227.
cggacgcgtgggttttcgccggaagtggaagaccaggcagcccagctgaaggcaggtaagctcggctcacagtcgcaggagagttctggggtacacgggcaaaggggcttgagaaggcccggaggcgaacatatgtagaagcaactgtgccccggagaagagaagctcgcccattccagactgggaaccagctttcagtgaagatggcagggccagagactgttgctcgactccaacatccgcctctgggtggtcctacccattcgttattcattcactttctttcgtagggcattgatccgccactacgtgttccatcctgcttgcagagcgacagagaagcttcacccaggggaacaagtatcttgacagttcaagtcctaatttcgaaggcagagttccttcaggggaaaattgggaaattacattcccaaacagtctttttttggacacggaaatttttattttttccgaacccagaggatgggattttttcaaaaaaacttaaacgggaggtagtgccaccttctcctatgactgatcctactatgttgacagacatgatgaaagggaatgtaaccaaatgtcctccctatgattcttattggtggatggatcaacatgacattctcaggctttgtcacaaccaaggtccccatttccactggaccctccggttttaagcctaatggttacagcaagggaatcggagctactcaccatttagatgcatccctgggtgaggttttgcatccctgggtacttccctcaatgtattttgggctttcggagcattttactctctggatttctgggggcaaagataatggccgctggaaccaatcacgaatgatggcaggagcaggatgacgggagccagccatgggccatggcccgcagacagcggacgacgctttccaaacaaaaggtgggaagctttgggagctgacggatcaccagtgggcactagatgctgccggcgaggatgctgcatgaccaacgcgctccacttcgaaggcgcgttcaagatggacggacggtcctgtacagtagggcgaccggccagggatggggtgtgtcaggaacttggagttgcacttaaccttgtaactttgtttggagctggcacctcttgaaataaaaaggaggatgcacgagctggcaggcatgcaaa

SEQ ID NO: 18533 - DNA, 443 bp, Homo sapiens
cagccacaataatcagagatggagcaaaccagtgccatccagtctttatgcaaatgaaatgctgcaaagggaagcagattctgtatatgttggtaactacccaccaagagcacatgggtagcagggaagaagtaaaaaaagagaagtaatattaaagattattcaacacctctcacatcttacagatctataaggtcacatgcttttaaaatagtagcaagttaaacttcactcttgaattctttacaatctaagtcaaactaagttataatttaggattgtctttaaacagccattcagaaacaaaactgtagaactgtgtatttgattgggaatggtgcttttgccaacttaaaaggattaaagtaacggagatatacacaaattttaaaattatgtgtgatcacaagactaaagataattaaaaagaaaaccacagaaaa

SEQ ID NO: 18534 - DNA, 1478 bp, Homo sapiens
  SIMILAR (123)..(443): 561254mologous to Homo sapiens cytochrome c,accession number M22877,Smith-Waterman Score=226.
gcacttacaccggtacttaagcgcggaccggcgtgtccttgagacttatagagtgttgacttccggcttcggagcggtgagtgttcgttgtgccagcgacttaaaaagagaattaaatatggggtgatgttgagaaaggcaaggaaggttttttatttatgaaggtgttcccagtgccacaccgtttgaaaaggggaggcaagcacaagactgggcccaaatctccataggtgtcttttgggcggaggacaggtcaggccccctgggatactctttacacagccgccaataagraacaaaggcatcatctgggggagaggatacactgatgggagtatttggagaatcccaagaaagtacatcccctggacacaaaaatgatctttgtccggcatttaagaaagagggaagaaagggcagacttaatagctttatcttcaaaaaagctacttaattgagtaattaattgggccactggccttatttatttacaaaacaggaaatgttcttcttgactttttttattgtgttaccatccttttaataggtctccattacacccagaatttcagatcatggaatgacttgacaggaatattttgttggggcagtcctggattttaaaacttaaggactgggcttggtggggttaaaatggaatatggttccagtttttgaatttttaatagtaactccaattccagttaatggtatcactcgtttaccccttttaaagatatgatttagacttcggttagtaatgttccaacttttcacaaagatgggtgagtgccatctttaaaacttactggaggattggttttatatttagatttatataactgggtatgtgactatatctaaatactggggaaatagcttcactgtcttaggaaccaaggcaagattcacctgtgttttgtgttcatggttccatttggcctcttaaaggccaagggttggaagataaataagggtagccaatggcctataggttttggcccttaacctatgcccaatctaaattataattccccctgtatttaaaatggtttctttttacttattggaaaggcattttagtgtgggtttatgtgtaatattaaaagattattcaaacacctctccacatcttaccagatcctataaggtcaccatgcttttaaaaataggtaggcaaggttaaactttcactcttggaattcttttaccattctaaggtcaaactaaggttattatttagggatatggttctttaaacagcccattcagaaaccaaaactgtagaactgtgtatttgattgggaatggtgcttttgccaacttaaaaggattaaagctaacggagatatacacaaattttaaaattatgtgtgatcacaagactaaagataattaaaaagaaaacacacagatcatgagcaaaaaaataaaaaaaagggggggccgttttaaaggacccttgggggggccaaagt

SEQ ID NO: 18535 - DNA, 2215 bp, Homo sapiens
  SIMILAR (444)..(1034): 411254mologous to Homo sapiens hippocalcin-like protein 3,accession number AB001104,Smith-Waterman Score=254.
  misc_feature (1)...(2215): n = a,t,c or g
gaatccacccgcggaaactccgagcccctccgactgagcatgcgccatcgccaggcggcttttggtcacaggctcccgagttctcctagctggggctgcggagctggggggagggaaaaaaggaaaggggagggggtgcctggaaaggcggaggctcgcgcgcctgcgcatccagctccagggaccctaggttttctatgggattcccaatctgcagcagagatttacccgagcgtgttgcggcagcggctgggcttgcaaggcgcgatccaaaagggactttttcttttccagagctccagagaagaagagagcgagagagaaccacacacagagacggcttaagcgtttacccgaattaaatatatatttttaaaaagaacttgttgagttttatcattttcggttaagtgaccggtgcgcagcgcctggtaacctgcaggatggggaagcagaatagcaaacctggccccctgaagtgatggaggaccctggtgaagagcacagagtttaatgagcatgaactcaagcagtggtacaaaggatttctcaaggactgtccaaagtgggaggctaaatctcgaggaatttcagcagctctatgtgaaagttctttccttatgggagacggcttccaagttttgcccagcatgcctttccgaacctttcgacaagaatgggggacggcaccattggacttccgagagttcatctgcgctcttgtccatcacctccagggggcagctttgagcagaagctggaactggggccttcaatatgtatggacctgggtgggtgatgggcaagatcacccgagtggagatgctgggagatccatcgagggttatcttaccaaaatgggtagggcactgtgatcatgatgaaaatgaatgaggatggcctgacgcctggagcagcgagtaggacaagatttttcagcaagatgggtaaggaacaaagatgaccagatttacactgggattgatttcaaaggaagctgccaaagagccgaccctttcattgtataacttctggcagtgcgacattcataaatgagctgatggtcaatgctatggactgcacaaaagtctcaatgttccattcagtctgcagctattcacacacacacacacacacacacacacacacacacacacacacacacacaaatattgcttggactacctataaatggacttgcttcttgtgtttgaaacactcgtgtgcatgagaatgtcatttgcctaatgaattttaaaagccatatataaaacaaaacaaacaacctgcccacaatgtgatatgtgtaatatcatttcataaaaatccctcttcctccaaagcctgggcagaaatgtgctgcaaagagttatatgacttcttgttcatgttttgctaatgctcgtatctccttgattacataatgttaggtagccactggagcccccccatggtaatggtaaccttaaattataggctatgtcacctgcccctcctgtaaaatacctattggacagaccaccagagggaccccttggcctccctgtgtcctggtcccacacacccacagaagccttgtattatccagtgaatataaatgtacctacatttgccatgcccttttgggtttgcccttaattcttacctcatttgcatccctatcgatctggaaagagcctgttttggatgaatgcagtataaaatgtaaaaaccctgctaaatgacttattgattaagtatatctatctatatatacatatacacaaagatattatttatcgaaagtaaaaaaagaggaaagggattgggttcctgtttgaattttcaaaggcttccaatgtggtggcaataaaatgtcccaaataaatttaataccaattgattttccccctaattcttattttataattttaaaattgcagcagttgctagcaacaactttactaaatctactccttaaatatacaactttggaatttgaagaattaatgacaacgaaaagggaaaaaagcaactttccaacttttcatccaggctcccaaaagagggacaacgaacatggcatgtgaaaagtaaaacagatttgttcattccgaaaaaaaaatgttcattctatgacaataaattttatctcagtgtgnnnnnnnnnnnnnnnnnnnnnnggggggccctttttaaagaatccttggggggcccaaattttacccgtgtttga

SEQ ID NO: 18536 - DNA, 488 bp, Homo sapiens
  SIMILAR (78)..(473): 751254mologous to Homo sapiens sorting nexin 3; SNX3,accession number AF034546,Smith-Waterman Score=470.
  misc_feature (1)...(488): n = a,t,c or g
agggggcggagggagcccgcggcggcggcagcagctacagcgaaatggcggagaccgtggctgacacccggcggctgatcaccaagccgcagaacctgaatgacgcctacggaccccccagcaacttcctcgagatcgatacaaatcttcctattttcaagctgaaagaatctactgttagaagaagatacagtgactttgaatggctgcgaagtgaattagaaagagagagcaaggtcgtagttcccccgctccctgggaaagcgtttttgcgtcagcttccttttagaggagatgatggaatatttgatgacaattttattgagggaaagaaaacaaggggctgggagcagtttataaacaagggtcgctgggtcatcctctgggcacagaacgaacctttgttctttcacatgtttttacaagatgaaataatagataaaagctatactccatctaaaataagacatgcctganatttggcaaga

SEQ ID NO: 18537 - DNA, 1653 bp, Homo sapiens
  SIMILAR (203)..(592): 551254mologous to Homo sapiens sorting nexin 3; SNX3,accession number AF034546,Smith-Waterman Score=267.
  misc_feature (1)...(1653): n = a,t,c or g
ctacgtgctcgttctcttcgcgaccgctgcgcgcgagccccgtgtccccacggcgggcagcagcggcggcggcggcggctgaacgcggagggggcggagggagcccgcggcggcggcagcagctacagcgaaatggcggagaccgtggctgacacccggcggctgatcaccaagccgcagaacctgaatgacgcctacggaccccccagcaactttcctcgagatcgatgtgagcaacccgcaaacggtgggggtcggccggggccgcttcaccacttacgaaatcagggtcaagacaaatcttccctgttttcaaagctgaaagaatcttattgttagaaggaagatacagtgactttgaatggcttgcgaagtggaatttggaaagagagagcaaaggtcgtagttcccccgctccctggggaaagcgtttttgcgtcagcttcctttttagaggagatgatgggaatattttgatggacaattttatttgagggaaaggaaaataaggggttggagcagttttttaaacaaggtcgcttggtcatcctctgggcacagaaccgaacgttgttcttcacatggttttttaccaagatgaaataatagataaaaagctattactcccatctaaaaataaggccatgccctggaaatttgggccaaggaagggggccaaaaacgtggactattaatggattggattaagtcaccagtgaagaagtttctaactttttaggcatgctgcaccngaaaactggtataacatgcctccagtatactaacactccatatgctcagttttgttttgttttggcagttgacaagaagttaatttgctttagtaaaaatcccctccattccagcctttcctataataaatagctcctttcttggctgttttaaatgtgggtgcacacctatagcctccacaaaacctgttaattcccagtgtaatctgcagtgtcggtaactaaaagttacctggcttgggtcttaatttgcacagtttttgcggtcttgtttgcttcttgcatctggattaactaggaatatttcctctttcccccccttttaatttgtgatgtcacttgacccccatttatgtgtagggagcacctacacccattgggtttccaaatactggcacacataagatacatacttgtgtgccagaaagtatcttcctcccaggcttgtaataccccttcaccatggaagattaatgagggaaatctttattattctgtataaaaacaaaagcaaatttatatactaaaatccatttgtctaaaaatttaagttgttttccaaataaaaatttaaaatggcatttctgatatgcactgattgtgttgcctccagcttttttttgctctctatgaagtgaccaccttaaggcacttggttgacacgggttaatttactaaattatatacttctccattcctggtaactcccattcccttttaaacagtggtgatatcgaaatatacttccatccattgaatggggtatttttaacaacaacaaaagtgatatactaaaaaatgtattgcttaaggcttattgaatcattttgaagcactttgtgtatttgaaaaatgctttataatctcatttattaaaaggactttcaaagataaaaaaaaa

SEQ ID NO: 18538 - DNA, 474 bp, Homo sapiens
  SIMILAR (128)..(424): 941254mologous to Homo sapiens ribosomal protein S10,accession number U14972,Smith-Waterman Score=506.
  misc_feature (1)...(474): n = a,t,c or g
tcatggtggccaagaagaatgtncacatgcttaagcatccgggagctggcagcaaagaatgtgcccaaccttcatgtcatgaaggccatgcagtctctcaagtcccgaggcgtcgtgaaggaacagtttctactggtcccttaccaatgagggtatgcagtatctccgtgattaccttcatctgccgccggagattgtgcctgccaccatacgccgtagccgtccagagactggcaggcctcggcctaaaggtctggagggtgagcgacctgcgagtctcacaagaggggaagctgacagagatacctacagacggagtgctgtgccacctggtgccgacaagaaagccgaggctggggctgggtcagcaaccgaattccagtttagaggcggatttggtcgtgtacgtggtcagccacctcagtaaaattggagaggattcttttgcattgaataaacttacagccgtggatt

SEQ ID NO: 18539 - DNA, 1491 bp, Homo sapiens
  SIMILAR (724)..(1206): 441254mologous to Rattus norvegicus ribosomal protein S10 (AA 1-165),accession number X13549,Smith-Waterman Score=232.
  misc_feature (1)...(1491): n = a,t,c or g
aggggcggcggggcgcagtgggcgcctggtggcagcgccgcccccagctccctgccgggccggcgcgcccctgattttctcgtaaggacgggctgaaagaggaggggagacagaaggagacactccggcccgaggaccaccactgccactagtaacgccccctacacactctagaagtgctcaggcgaatgacgaagcggctggtgacaaaggcggcggcgagtgcagcgcgtgcacagcccgcggagccgcgcgaccgcaaatatgacaagcatttgagctatttggcaacgtggggccggtcagcggggcgggcagggtccccgcggggggcgaggggcagagagctggcccgggcgcccgtctcgctgcctgcaggggttcctgggcgggggtccgctgcgggacactcctccgaggcccgcactggtccgaacggcaagatggggggctcaagccgtgagccggggacagaaaaagtcccttgcccgcgtggcctcagcccgacacgagaagtgggtcaccaagtccacggcactttgggagccggaccgaacgagttgcatccttcggggccggccggggctcggtgcagacccggcaggagggaagccaagctaggagacgcagccaggtcggaggcgcagtcctctgcccacaagtttcacattgatagcctttccctcccgtggaaccctacagccatggagatgttgatgcctaagaagaaccgctattgccatttatgaaactcctttttaagggagggagtcatggtgcccaagaaggaatgtccccatccctaagcacccggagctggcagaacagaaatgtgccccaacctttcatgtcatgaaaggccatgcaagtctctcaagtccccgaggcctacgtgaaaggaacagtttgcctgggagacatttctactggtaccttaccaaatgagggtatccaagtatctccgtgattaccttgcatctgcccccggagattgtgcctgcccacccctacggccgtagcccgtccagaagactggcaaggcctcggcctaaaaaggtctggaagggtgaagcgaccttgcgagacttcacaagaggggaagccgacagcttcctgtgccatagcattcctacagacggagtgctgtgccaccctggtgcctgacaagaaagccgaggctgggggcttgggtcagaaaccgaatttccagttttagaggcggatttgttcgtggacgtggtcaagccacctcagtaaaatttggagagagattctttttgcattggaataaacttacagccnnnnnnnnnnnnnnngggggggcccgttttaaagattccttggggggcccaaacttaacccgggctggaaaggtaatatttttttccttatggggggccaattaaaaacctagttggggatttttgggagggaccttaattttgggggggggacatattggcccaacctccttacaaaaattaaagcttt

SEQ ID NO: 18540 - DNA, 1053 bp, Homo sapiens
  SIMILAR (308)..(538): 331254mologous to Mus musculus SPR2B protein,accession number AJ005560,Smith-Waterman Score=75.
atgaggaaggacagtgaaggttgtgagtccaattgcaatcgtatcggcgtggactgcatgtttaaaggcttaagggaatctgtctttgccttttgctcccgggttatgagaaaatgtatgtggctgtgcgtccaggacagcaatgtgtttgtctctcagccaagctcagtcctcacccaggcaccggggtcacggtcacgttcacgttccgtggacgccttgcacgcctccaagaggcgggcatggggaatcgtcgccggcttacctggccgtgggcgcgtcctggccgctgcagcccggagcagggtgccagccgccgccgccgccgccatggtgtccccggtcactgtggtgaagagtgaaggacccaaactggtgccgttcttcaaggccacctgcgtgtattttgtgctctggctgccctcatctagcccatcgtgggtcagcaccctcatcaagtgcctgcctatcttctgcctctggctcttccttctggcccatggcctgggattcctgctggcccaccccagcgccacccgcatctttgtggggcttgtcttctctgctgtaggtgacgccttcctcatctggcaggaccaaggatacttcgtgcatggtctgctgatgtttgctgtgacccacatgttctacgcctcggcctttggcatgcagccactggctcttcggacaggtctggtgatggcagcgctgtcgggcctgtgctatgccctcctctacccatgcctctcaggtgccttcacctacctggtgggggtctatgtggcccttatcggcttcatgggctggcgagctatggcagggctgcggctggccggggcagactggcgctggacagagctggcagctggcagtggtgcactcttctttatcatctcagacctgaccatcgccctcaacaaattctgttttcctgtgccctactctcgggcgcttatcatgtccacctactatgcggcccagatgctcgtcgccttgtcagctgtcgaaagccgggagcctgtggaacactacagactgaccaaggccaactga

SEQ ID NO: 18541 - DNA, 1401 bp, Homo sapiens
  SIMILAR (157)..(327): 701254mologous to Homo sapiens Human secreted protein, SEQ ID NO: 4790,accession number G00709,Smith-Waterman Score=207.
atgggtcggtatatggagcgagagccgctacagggcaatcatcgtagatcgggtctttccggagagcgctgctcccatatgggtggtgtccttattgagagacgggaattgcaaacagagacacgcaaagaaggggtggttgagtggtgctggctggaaaaagaagttcttgcaactattacaaaaccagttcgtggtgacaagaacggtggtacccaggtggttaaacatcgcaaaatgcctagatattatcctactgaagatgtgcctcagaagctgttgagccacggcgaaaaaaccgttcagtcagcacatgagaaaactatcctctacagacgacacgcgagaaatctgtcactgccacctcaaccagaattgataatcagcgatgtcaagatccaagacatcctgctgacgcttagctcgaggagcagcagctgtcggagccagaaacagcgagggtacgagctactagaggatccccgaaaaggtattgtcatacccagcaataagaccacagcaatgttagaagacagtgttcacacccgccttaagtcttctgataacttccaacgcaaaaagaatgaaggtattgtcatagccagcaataagaccacagcaatgttagaagacagtgttcacacccgccttaagtcttctgataacttccaacgcaaaaagaatgaagacaagcagtctgaactctgtcaggaagtctctgtatcttcatctcattggggtcagctatcaggagattatcgtgctctcccggtagtactacgtctccttgagttttcatgtctcatgctgccgccgtacgagctcgaagtcgtagcagggtcgcagtggcaaccaaagacaaaaaccacaagaaaatcacaaaagatgcagaaaaagccaacaaaaaaaaaaagcaccccattcatgcaaaaaacaatcaaaaaacaaggaaaagaaggaacacatatcagaataataagagcaatttatgacaagcccaaagccagaatcatacagagaggacaaaagctggaaggaaacacaaaagacaaccggcacaagacaaggaagccacatcactcaccacatcaaatcaacgtagtaaaggaagaacataccacagcaaacaggcaagagaaagaaatgaagcgaatacacaaaggaagagaggaagacagtagagatcagaaagcagaagacgatgatgtatatcatggagaacaccgtcgtcatcagccaaaatatcatgagcagatagcaacaacagcaaggatacaggatacagacaaagtgcaggacacaagcattccagaacaatcgaaacgggaggcagagagcagaatcatgcgtgacatccaattgcagttgcatcacgagaatgacaacatagggatcagatga

SEQ ID NO: 18542 - DNA, 616 bp, Homo sapiens
  SIMILAR (54)..(365): 641254mologous to Homo sapiens DNA-binding protein TAXREB107,accession number AF261087,Smith-Waterman Score=298.
accgaccacgacttcccgggacgacccacacgtccgcggacgcgtggggcaagatggcggttgaaaaagttgagatgccagatactaaagagatgaaacccgaagccaagaagagttgatgctggtggcaaggtgaaaaagggtaacctcaaagctaaaaagcccaagaaggggaagccccattgcagccgcaaccctgtccttgtaaaaaagaaataggaaggaattcccgatctggcatgtattccagaaaggccatgtacaagaggaagtactcagccgctaacaccaaggttgaaaagaaaaagaaggagaaggttctcgcacctgttacaaaaccagttggtggtgacaagaacggcggtaacccgggtggttaaacttcgcaaaatgcctagatattatcctactgaaaatgtgccttgaaagctgttgagcccacggcaaaaaacccttcagtcagcacgtgagaaaactgcgagccagcattacccccgggaccattctgatcatcctcactggacgccacaggggcaagagggtggtttcctgaagcagctggctagtggcttattacttgtgctggacctctggcctcaatggggtcctctccggg

SEQ ID NO: 18543 - DNA, 481 bp, Homo sapiens
  SIMILAR (1)..(66): 771254mologous to Homo sapiens Human secreted protein, SEQ ID NO: 7340,accession number G03259,Smith-Waterman Score=92.
ttgtgtgaacaacatggctgtttatttcacctgggtgcaggcgggctgagtccaaaaagagattcagtgaaggaagataagggtggggccactttataggatttgggtaggtaaaggaaaattacagtcaaaggacatttgttctctggcgggcaggagtggaggtcacaaagtgctcagtgggggtgctttttgagccaggatgagccaggaaaaggactttcacaaggtaatgtcagcacttaaggcaaggaccggccatttacacttcttttgtggtggaatgtcatcagttaaggtggggcagggcttttcacttcttttgtgattcttcagttacttcaggccatctgggtgtatacttccactgtgagagttacccgaagctcggtgtccgtgatggtctagggggcttcgaggcgattgggcagtgtcagtcttcagctgctaaactgagaagatctgggaaggagtcagtcag

SEQ ID NO: 18544 - DNA, 1059 bp, Homo sapiens; identical to SEQ ID NO: 806
  SIMILAR (328)..(459): 881254mologous to Homo sapiens calbindin D28K,accession number S46006,Smith-Waterman Score=211.

SEQ ID NO: 18545 - DNA, 381 bp, Homo sapiens; identical to SEQ ID NO: 12907
  SIMILAR (1)..(81): 811254mologous to Homo sapiens Human secreted protein, SEQ ID NO: 5576,accession number G01495,Smith-Waterman Score=98.

SEQ ID NO: 18546 - DNA, 487 bp, Homo sapiens; identical to SEQ ID NO: 1994
  SIMILAR (168)..(299): 551254mologous to Homo sapiens calbindin D28K,accession number S46006,Smith-Waterman Score=116.

SEQ ID NO: 18547 - DNA, 419 bp, Homo sapiens
  SIMILAR (329)..(198): 861254mologous to Homo sapiens calbindin D28K,accession number S46006,Smith-Waterman Score=207.
  misc_feature (1)...(419): n = a,t,c or g
tcagccgttaagccgagagtatctggaaaggagtcagtcagagagccttgggccagagttccaggggctgtgggagtggctgccaggtgagttgaacagtctgattttcagtggggtcccacacagataggacgtggcttaggaggaatcccgggctgcgggcattccttggcccagtggccagatttccggcaagtgtagcaagctccggatttgaaattggtgagatgtttcttggcctggttggtctgaggacctgaggtcgtaggtggctctttctcacggagcaaagaacaggaggacaggggattgatctcccaagggaggtcccccgatccgagtcaccgcaccaaannnnnnnnnnnnnnnnnnnnnnnnnnnnnnnnnnnnnnnnnnnnnnnnnnnnngtagtcggatcg

SEQ ID NO: 18548 - DNA, 443 bp, Homo sapiens; identical to SEQ ID NO: 9689
  SIMILAR (134)..(256): 901254mologous to Homo sapiens calbindin D28K,accession number S46006,Smith-Waterman Score=190.
  misc_feature (1)...(443): n = a,t,c or g

SEQ ID NO: 18549 - DNA, 602 bp, Homo sapiens; identical to SEQ ID NO: 9698
  SIMILAR (192)..(524): 341254mologous to Bovine leukemia virus gag polyprotein,accession number M10987,Smith-Waterman Score=144.

SEQ ID NO: 18550 - DNA, 403 bp, Homo sapiens
gcagaactagccacagggaatgtgaaggtggaagcatcagggacacccgaggaaaaagcagggagtgtcctcggataggcctgctttgctggcccttgagaaagatgttgctggcaaaacaattgagatggaattatctcaattcaaagctactgcctgtgtaacttgggctgttttattcaaacatgaaggttcagattgtctcatccaggctctcccagcacagcttcctgccctccactgcttgggagcctctgcctgctctgcgctggttattagtccagtgggctctatgttactttcaacatcaaacctgtgattccttttgtttctgaatcattcatgtgacttttagtcatgagattcttctacgaaaacaacctgcatcatggcattgaacatt

SEQ ID NO: 18551 - DNA, 357 bp, Homo sapiens; identical to SEQ ID NO: 443
  SIMILAR (148)..(279): 481254mologous to Human T-cell lymphotropic virus type 1 Gag,accession number S74562,Smith-Waterman Score=143.

SEQ ID NO: 18552 - DNA, 368 bp, Homo sapiens
  SIMILAR (234)..(79): 411254mologous to Human T-cell lymphotropic virus type 1 Gag,accession number S74562,Smith-Waterman Score=138.
tcagtcttcagctgctaagccgagaacatctgggaaggggtcagtcagagagccttgggccagagttccaggggctctgggagtggctgccaggtgagctgaacagtctgatttccagtagggtcccacacagatgggacacagcttaggaggaatcctgggctgcgggcattccttggcctggtggccagatttctggcacttgtagcaagctcctgacgtaggattttgacgcttggccattgttcggcctattttctgtttccatcctgattctttacctctctctccacaatattcttcctgatgtgacttggtatttactggggacaatattcttcctgatatctccttggtatttgtctctc

SEQ ID NO: 18553 - DNA, 315 bp, Homo sapiens
  SIMILAR (1)..(114): 841254mologous to Homo sapiens Human secreted protein, SEQ ID NO: 5576,accession number G01495,Smith-Waterman Score=161.
ggggcttctgaggcgatcgggcagtgtcggtcttcagccgctaagccgagaagatctgggaaggagtcagagagccttgggccagagttccaggggctctgggagtggctgccaggctcccctgcaccactctcttcgcagaagtttgctaattatttaatccgtgcattgtcagagattctgcagaaacagagtgcctctggtggaaaatcagatcctaactggagaaacaaacatcctacatacctgcatgcacacatggttctaagaccatgtttggaaggtgacataaaacacttgggggaactggtttag

SEQ ID NO: 18554 - DNA, 696 bp, Homo sapiens
  SIMILAR (480)..(370): 831254mologous to Homo sapiens Human secreted protein, SEQ ID NO: 5576,accession number G01495,Smith-Waterman Score=154.
tcatcttgttggaacaattgagttctttgcagttgtagaattcacatctctggtgtctttctggctaaggcaggacccatattcaattcctagagaccccacaattccttgccgtgcggccttctcctttgacaacttacgacagtaatgctggatttttgaagaaccagaggagaatttcttcctccagccaattttaaatcccgtaagtggcctctttttattctcttctccactatccctcaacctctcctcactatccctcaacctctttctcctttcaatcttggcgccacacttcaatctctccattctcttaatttcaattcctttcattttcccactggaaatcgaactgtccaactcgcccggcagccactcccagagcccctggaactctggcccaaggctctctgactccttcccagatcttcttggcttagcagctgaagagtgacactgcccgatcgcctcggaagctttttcccaaacatatcgagcatatctctctctctctctctctctctctctctctcctgagccacctacagctggggatggagtgacacaagcagccctgtggcctccaccactatcactgtgctgggtcagacctgaagccagcacagtgctggcccttgcccaaggtctgttgtcaccactccctgacttctgactatgttcacccaaggccat

SEQ ID NO: 18555 - DNA, 675 bp, Homo sapiens; identical to SEQ ID NO: 814
  SIMILAR (64)..(219): 731254mologous to Homo sapiens Human secreted protein, SEQ ID NO: 5576,accession number G01495,Smith-Waterman Score=180.

SEQ ID NO: 18556 - DNA, 928 bp, Homo sapiens; identical to SEQ ID NO: 2002
  SIMILAR (704)..(925): 901254mologous to Homo sapiens RCK,accession number D17532,Smith-Waterman Score=342.

SEQ ID NO: 18557 - DNA, 1850 bp, Homo sapiens
  SIMILAR (1709)..(1008): 851254mologous to Mus musculus protocadherin,accession number AF281899,Smith-Waterman Score=1033.
cctgcaggaattcggcacgaggaaagatccacctacgacctctggtcctcagaccgaccaggccagggaacatctcaccaatttcaaatccgagacaaaggagacacgttttatccgtggacccaaaactccggcgccagtcacggactgggaaggcagccttcccttggtgtttaatcattccagggacacctctctgattattcacccaggcttcagaggtgtcagaccacgcagggacgcctgccttggtccttcacccttagcggcaagtcccacttttctggggaaggggccagctgctcctcgccagaccgagctaggtcccaattcttcctcagcctccgctcctccaccctataatccttttatcgcctcccctcctcacacctggtccggcttacagtttccttccatgactagccctccccctcctgcccagcaatttactcttaaaaaggtggctggagctaaaggcatagtcaaggatttaattaacctcaccttcaaggtgtacaataatagaaaaaagttgcagttccttgcctccactgtgagacaaaccccagccacatctccagcacacaagaacttccaaacgcctgaactgcagcagccaggtgttcctccagaacctcctccccgaggagcttgctacaagttccagaaatctggccaccgggccaaggaatgcctgcagcccaggattcctcctaagccacatcccatctgtgtgggaccccactggaaatcggactgtccaactcacctggcagccactcccagagcccctggaactctggcccaaggctctctgactccttcccagatcttctcggcttagcggctgaagactgacactgcttgatcgcctcggaagccccctgggtatattgcatgatgttgaggtttggggtatgattgattctgtcacccagatactgagtatagtacacaatagttaatttttcaattgtctcttctccctctctccctccatagtagtccccagtgtcttttgttgccatcagcagctgtatgacactgtccccaggtctcatgtctgtataaacatacacatcataggatatttcagggaaggttggcgtgttatcatttgcatccatcacttgaatattgacgatgactggctcactttcttgtacaccatcaaatgctgttatcgaaaaggtgtaagtttgctgttcttccctgtccactggttgaagtaaggtgaggtagcgagtaataccagtctgtgtgacggtgaagactgaggtgtagtcattcagaaaaaggtgaagctctgggtcttttgtatcttctatgtccttgtccagagctactattcttaaaggtgaagtcaaattgagactgtccgaaatggttgctcccactggggcagattccaggatatagccttgataactgggcattgtaaaatatggactttgattgttttcatccagtatttcaatgtgtagaccggcaaaggcaggaagaggatgaccattgtcttgttcagccttaataaccaaatcaaatttctggtgaaagtctctgtttactggctccaggagactaagttctgctgtcctaggatgcatatggaaaaatcgtgggtaatcctcaggagtccctttgctccagttaccaacaagttcctcatctctatctgagaccacctcagcctggttttcatcattaatatcattatcagcattttggtcaaagccattcggtaagtctctagagagttccaaactttctcgcatcttcctatcttctacagagccctgcaaactgttccaatctctgcctgttacccagttccaaagtcgtttctgcat

SEQ ID NO: 18558 - DNA, 3024 bp, Homo sapiens
  SIMILAR (376)..(3021): 991254mologous to Homo sapiens synuclein alpha interacting protein,accession number AF167306,Smith-Waterman Score=4474.
gcggccgcccaggctgcccccgcccgcgcgcgccctgttggggggcccggggagcggcgcccgcggccgggccgcattgtgacgtagcggggccgcggcagcgcctccaccgcccgcctacttcggctgaggctgttctgctcctgccgctgcggtccgtcggtcggtcagtcagtcccttcgcgctcctgagccgccggcgcgccgggcgccccgggaatttataagtatttgaccgtactcaaaatgtgcaaggaagaataatggaagcccctgaataccttgatttggatgaaattgactttagtgatgacatatcttattcagtcacatcactcaagacgatcccagaactgtgccgaagatgtgatacgcaaaacgaatgacagatcagtttctagctctagctggaattgtggcatctcaactcttattacaaacacgcaaaagcccacaggaatcgctgatgtgtacagtaagttccgcccagagaagcgggttttgccactgaaacatcagccagagactctggagaacaatgaaagtgatgaccaaaagaaccagatagtgggtgagtaccagaaagggggtgagtctgacctgggcccccagcctcaggagcttggccctggagatggagtgggcggcccaccaggtaagagctctgagcccagcacatcgctgggtgaactggagcactacgacctcgacatggatgagattctggatgtgccttatattaaatccagtcagcagcttgcctcttttaccaaggtgacttcagaaaaaagaattttgggcttatgcacaaccatcaatggcctttctggcaaagcctgctctacaggaagttctgagagctcatcatccaacatggcaccattttgtgttctttctcccgtgaaaagccctcacttgagaaaagcatcagctgtcatccacgaccagcacaagctgtccactgaagaaaccgagatctcacctcctctggttaaatgtggctctgcatatgagcctgaaaaccagagtaaagacttcctaaacaagacatttagtgatcctcatggtcgaaaagttgagaagacaacaccagactgccagctcagggccttccacctacaatcctcagcagcagaatccaaaccagaagagcaggtcagtggcctaaaccggaccagctcccaaggcccagaagaaaggagtgagtatctgaaaaaagtgaaaagcatcttgaacattgttaaagaaggacagatctctctcctgccacacctagctgcagacaatctagacaaaattcacgacgaaaatggaaacaatctattacatattgcggcgtcacagggacacgcagagtgtctacagcacctcacttctttgatgggagaagactgcctcaatgagcgcaacactgagaagttgactccagcaggcctggccattaagaatggtcagttggagtgcgtacgctggatggtgagcgaaacagaagccattgcagaactgagttgttctaaggattttccaagccttattcattacgcaggttgctatggccaggaaaagattcttctgtggcttcttcagtttatgcaagaacagggcatctcgttggatgaagtagaccaggatggcaacagtgccgttcacgtagcctcacagcatggctaccttggatgcatacagaccttggttgaatatggagcaaatgtcaccatgcagaaccacgctggggaaaagccctcccagagcgccgagcggcaggggcacaccctgtgctccaggtacctggtggtggtggagacctgcatgtcgctggcctctcaagtggtgaagttaaccaagcagctaaaggaacaaacagtagaacgtgtcacgctgcagaaccaactccaacaatttctagaagcccagaaatcagagggcaagtcactcccttcttcacccagttcaccatcctcacctgcctccagaaagtcccagtggaaatctccagatgcagatgatgattctgtagccaaaagcaagccaggagtccaagaggggattcaggttcttggaagcctgtcagcctccagccgggctagacccaaagcaaaagatgaagattctgataaaatcttacgccagttattgggaaaggaaatctcagaaaatgtctgcacccaggaaaaactgtccttggaattccaggatgctcaggcttcctctagaaattctaaaaagatcccactggagaagagggaactgaagttagccaggctgagacagctgatgcagaggtcactgagtgagtctgacacagactccaacaactctgaggaccccaagactaccccagtgaggaaggctgaccgaccaaggccgcagcccattgtagaaagcgtagagagtatggacagcgcagaaagcctgcacctgatgattaagaaacacaccttggcatcagggggacgcaggtttcctttcagcatcaaggcctccaaatccctggatggccacagcccatctcccacctcagagagcagcgaaccagacttagaatcccagtatccaggctcagggagtattcctccaaaccagccctctggtgaccctcagcagcccagccctgacagtactgctgcccagaaagttgccacaagtcccaagagtgccctcaagtctccatcttccaagcgtaggacatctcagaacttaaaactgagagttacctttgaggagcctgtggtgcagatggagcagcctagccttgaactgaatggagaaaaagacaaagataagggcaggactctccagcggacctccacaagtaacgaatcgggggatcaactgaaaaggccttttggagcctttcgatctatcatggagacactaagtggcaaccaaaacaataataataactaccaggcagccaaccagctgaaaacctctacattgcccttgacctcacttgggaggaagacagatgccaagggaaaccctgccagctccgctagcaaaggaaagaataaggcagcataa

SEQ ID NO: 18559 - DNA, 2942 bp, Homo sapiens
  SIMILAR (2150)..(1968): 641254mologous to Homo sapiens CD94,accession number AB009597,Smith-Waterman Score=190.
cttctgaaggtgaagcaaaaggcagcattaccttgaccgtctgtactgcgctttatctcaaacttactttattccacaaaactggtgtctttggtcccctgcgatttccagtagttaataccctcaatccatcaccctttcatgatgggaccagagagctgggggcttccgaggcgattgggcagtgtcagtcttcagccgctaagctgagaagatctgggaaggagtcagagagccttgggccagagttccaggggctctggaagtggctaccaggatctagccagtgctttgcacgtgagagcttggaggagaagctgagcctgtgcttccgcccctcggatccgggcgccgagcccccgaggacggccgtgcggcccatcacggagcgcagcctcctgcagggggacgaatattgctgtgctttaggtcaaggggtccccaacccctggtccacagaccggtactggaactgggccacactacaggagataggaccatctagttgcaggaaaacaagctcagggctcccattgattctacgttatggccatgtcagagaccttcatggcagctcctcccatcacaggcctggaggcccaaaaaggaacaagtggtttcgtgagctgggcctagggtctgcctgctgtatgcggcctagggacttggtgccctgtgtaccagctgctccagctgtggctgaaaggggcgagagtacagctcaggctgtggcttcagagggtgcaagccccaagccttggcagcttctgtgtggtgttgagctttgtgtttattagtcattttatattgtttcttgttccttttccttatgtttgaggggctgatcaagttactatttttcctgccgcagcgttcctcacatggggcaccaactgtggtagcactcctctcacaggagcaccagctgtgggggtgtctgtcccttgcagacccttgacctggtgatggatgaataatgtacactgacacacagatattctgttttgccagtccagctgagagtgtctgtccacgctgcttacagactccttgctgagtgttgtaaacagttgctaccacggccccaatcagttgacctctgtaactcttggtcccagaatttaagatgctcagagtccttatgtcctcagtgatgggtggcagaggaaatggtaatggtttttcttggtcctcggcttgggtgcactgattacccctggcagccactcccagaggccctggaactctggcccaaggctctctgactgactccttcccagatcttctcggcttagcggctgaagactgacactgcccgatcgcctcggaagcccccagaccatcacggacgccgagcttcaggtaactctcacagtggaaggatcgggggacctcccttgggagatcaatcccccgtcctcctacactttgctctgtgagaaagatccacctacaacctcaggtcctcagaccaaccagcccaagaaacattctcaccaatttcaaatccgagacaaaggagacacgttttatccgtggacccacaactccggcgccagtcacggactgggaaggcagccttccttggtgttaagagcttgctacaagtgccagaaatctgacccccaggccaaggactgccggcagcccaggattcctcttaagccacgtcccatctgtgtgggaccccactgcaaatcggactgttcaactcacctggcagccactcccagagcccctggaactctggcccaaggctctctgactgactccttcccagattttctcagcttagcagctgaagactgacgctgccggatcgcctcggaagcccctagatctgatgatttaataagagggtatttttccttttgctcagcacgtctcctttctgctgccatgcgtagagggatgtgtttgctttcccttctgtcattactgtaagtttcctgaggcttctccaaccagatataacgatttttatcttcacaggattcatctaaagcatttccatttggattatacgctatgcagttctttgtattaaaagtttcaaatgatggaaatctgccatgagaaattatgttccaagagcgaagtagagaaggcacgatgtgtactttttcagaaagaacagcgttgaattgttgaagctgagcgggccctccacactgggtggcattggtggttttgttggtatgcagaacctccattctccatgcttttttgctgcattctgtgcagctgagctctgacaactgtatcacacagtcttcctcaccctctggcttctgtctgttttcaaccattggaaagcattggtaggagaagagaagctctacctttggaatatcaaatatctggcctagtgtcttttcaatgacaaaaacaagagtaagattatccacttcaataagcaaaaagcagtaatttaatttgatgtgatttttaagaaaatctttgtttcctctgaggaactggtatgttgtctctccagaattcaggagaaatgtgtaattgaccagaccagaggtccccaagccccaggccacagaccggtactgtggcctgttaggaaccctgtagctgccagtggggtggttgccctccacttgcaagggcaaagggccagtgtgacagcctccacctgcacttagtgggtcccaagcttttgtccagcgtccaagaagaatgaggtcacacttgacaactgaagaatggtaagagtggagaattttattgagcgatgaaaacagttctagagtctccactggagcactgcctagtcgagctctgagaagagggccaccattctccaaaccccagaatggtgatccattgacagtttgcaacatgtgcttgggaaagctgcagccactaagcacagccaggagtggggctgtaccctgcaaagccacaggggcagagattcccaaggccat

SEQ ID NO: 18560 - DNA, 3258 bp, Homo sapiens
  SIMILAR (1399)..(2334): 941254mologous to Homo sapiens synuclein alpha interacting protein,accession number AF167306,Smith-Waterman Score=1517.
atgctgacgcttacgggtgctgggggtgagtcctggatcatacgacctggtaacctattggagcagctaggggctgaagaaactttaggccgaagacaggaaccgggcgatgaagtgacggcacacttccttctacaaggagtcatcaacatgggtcctgtaccctatcctggtgcacacagctctaatatgcccggttctgtctcccctattttgggacacagtgttaaactttttgaagaatattacccagtaggagaccccctaatgggctcaggtaggccccatacaccaaggaaaaagatatggagtgatctgaatgctcattcagacttgtacctggctcttgattggactccactcccggaacagagcgagccaggacccggtttggccgcctggaagccattccaggcagaggaatatacctgtaaatgtgcagaagggaatgagaacacaccctttgatctcaggaaagggacgttgccctgcccaagaaatctggaaagggcaagacaggcctacatgcacatcgaggagaagtttcctttcgaacttacagagcaacacatctgtgaatttcagtccatgtgctatgtccttgtccgggtcctgggggcttgcagccagtcaacctggttaattctggagcctgatggggtttcaggtccatccaagggggcttccgaggcgattgggcagtgtcagtcttcagccgctaagccgagaagatctgggaaggagtcggtcagagagccttgggccagagttccaggggctctgggagtggctgccagcaacatctttctcaagggccagcaaagcaggcctatccgaggacactccgtgctttttcctcgggtgtccctgatgcttccaccttcacattccctgtggctagttctgccaggagaacccttaaacattgcttgccaactcaatcctgggtcaccttcggaacttaccggcgaacatttcgggaaacttctccggaaacgagaacaccgggggggagaaaagcttcagggcgggcacacccggctgtgggaccaaaacggggaactttcgaattgcatggcttggtacatgccggggctgtttaagtaccgtgggaaacccatgactctcaagcattggttgagggttggcagtcctttggacggttacgcggttatacggtttgggaccattataataaaactactgataaacacatatatattacacataaagtgcgacctagatttatacagggttttccacatgctgattcttcagattgcaaaggcaacagtaaaagtaaaggcacagagagtgagaagtttgagacacttccaggaagtgaagggggcattgactatgccaaggctcaaaggatctgtcactcttgggagttaccaagagcatgaggtttctagctctagctggaattgtggcatctcaactcttattacaaacacgcaaaagcccacaggaatcgctgatgtgtacagtaagttccgcccagtgaagcgggtttcgccactgaaacatcagccagagactctggagaacaatgaaagtgatgaccaaaagaaccagaaagtggttgagtaccagaaagggggtgagtctgacctgggcccccagcctcaggagcttggccctggagatggagtgggcggcccaccaggtaagagctctgagcccagcacatcgctgggtgaactggagcactacgacctcgacatggatgagattctggatgtgccttatattaaatccagtcagcagcttgcctcttttaccaaggtgacttcagaaaaaagaattttgggcttatgcacaaccatcaatggcctttctggcaaagcctgctctacaggaagttctgagagctcatcatccaacatggcaccattttgtgttctttctcccgtgaaaagccctcacttgagaaaagcatcagctgtcatccacgaccagcacaagctgtccactgaagaaaccgagatctcacctcctctggttaaatgtggctctgcatatgagcctgaaaaccagagtaaagacttcctaaacaagacatttagtgatcctcatggtcgaaaagttgagaagacaacaccagactgccagctcagggccttccacctacaatcctcagcagcagaatccaaaccagaagagcaggtcagtggcctaaaccggaccagctcccaaggcccagaagaaaggagtgagtatctgaaaaaagtgaaaagcatcttgaacattgttaaagaaggacagatctctctcctgaactttaaagctgaagggaatctcagcaatcatggaccggactctcttaacccctactccacctctaaagagagcatcttacagcctgtatccttagcacctcagtgcctgaacctctttcccagatttgtttggagttgggtgtggctgagtttgagttccagccagccacgttggagtgcatgctgtcctgtttccgggtcatggcttaagaagaacctatcctcttccagtctttctctcttctcactggatgaaaagcaggaggagaccaatgggacatacttcagtctctgtcaaatgggctctcgtgttatcggcatctacccattcccgagccgtatcgtcagctctcatacgtgcacacatatcgtagggtattgtgaaacaatacgaagagggaacgactggaatatgtccaaaggagcagtaactcagagtcctttgtccttcacggtagatcagccctgtaaaacatcgccaccttcagttaaaatgtgtgcgtgctgcacggccagaagccatactgagcctgctcacagctctgccctgttccagagcatctcaaatggacagcacagaagagcacccagcaagtcgtcctcactcagactccatgccttcttcctactgtcagaacatgggataagccacctgtcatcatttcttacagagcctgaggtgtctgcagaactgggaagctttggtcgacatgcttcacggttttcctttccgccctcttgtcttaccttttcagagcttctaactatttttaactttcgccactttgtgcgccagttccgggctctgtgtcaaccattttcatccactccgggggggacccaccaccgccgctattgttcagcgcgctgtgttattactgccacaccccccgggttctttgaaagagacaccgagtgtgggattgtgctagtgttgcgagtcgttgtgtgtggtcggtttgtggtggtgtag

SEQ ID NO: 18561 - DNA, 1865 bp, Homo sapiens
  SIMILAR (1463)..(1861): 711254mologous to Homo sapiens neutral protease large subunit,accession number M27826,Smith-Waterman Score=462.
tgctctgagtatgaggactcctccccagctccagtaccagccacagatctcagctcaacactctcgagctctgtaccacaaccccaggatacagggaccagccagcagcttcatcccctggacccttggcatgagctgcttcgtgcccaggagctccaaggtgccaccaaccacaagggctacagccatgcagagcatgagcatgcaggcctaggtgtccagggtgggaatggggctctggctttttcgaacagtgggcacaggcatgctgttcccaccatcagctcaggcactggcaggaggaggactccaagttcttcggcttttggactcttgaacttacaccagtggtttgtcagtggctttcaagccttcagcgacagactgaaggctgcattgtcagcttccctacttttgaggtttggggactcagactggcttcctagctcttcagcttgcaaatgtcttatgctgggacttcactttgtgattgtaggtaacatctgtgctacactcaaggagaaatactcctcaatgctccatttagatgtgaccatgaagaaaaatggggagaaaagaacaaggctccaaaaaagaaagaagggaatgcctccacatccggcttatgaggacctaaacatagctgccatcactctccctgccaatgttgtccttcatcagccaagtggcttcagaacttcagggcagctggaccccgtttggtggtctcttgacacggacgcgcatgaaatttggtgccaagacccgggacttggatcaggggacttcccttgggagatcactcccctgtcctcctactctttgctccatgagaaagatccacctacgacctcaggtcctcagaccgaccagcccaagaaacatctcaccaatttcaaatccaagacaaaggagacaggttttatccatggacccaaaactccggcaccggtcacggactgggaaggcagccttcccttggtgtttaatcattgcagggacacctctctgattattcacccatgtttcaagggtgtcagaccacgcagggatgcctgccttggtccttcacccttagcggcaagtcccgcttttctggagaaggggcaagatttaattaacctcgccttcaaggtgtacaataatagaaaaaagttgcaattccttgcctccactgtgagacaaaccgcagccacatctccagcacacaagaacttccaaatgcctgaaccgcagcggccaggcgttcctccagaacctcctcccacaggagcttgctacatgtgccggaaaatctggccactgggccaagcgaatgcccgcagcccgggattcctcctaagccgcgtcccatctgtgcgggaccccactggaaatcggactgttcaactcacctggcagccactcccagaggccctggaactctggcccaaggctctctgactgactccttcccagatcttctcggcttagcagcttgaagactgacactgcccgatcgcctcggttgaagccccctagaccattcacggacgccgagcttcgggtaactttcacagtggaaggtaagcccgtccccttcttaatcaatacagaggctactcactccacattaccctcttttcaagggcctctttcccttgcctccataactgttgtgggtattgatggccaggcttctaaacctcttaaaactccccaactctggtgccaacttagacaatactcttttaagcactcctttttagttatccccacctgcccagttcccttattagcctgagacactttaactaaattatctgcttccctgactattcctggactacagctatatctcactgccgcccttcttccctcgtgcc

SEQ ID NO: 18562 - DNA, 410 bp, Homo sapiens; identical to SEQ ID NO: 3041
  SIMILAR (74)..(250): 771254mologous to Human endogenous retrovirus tripartite fusion transcript PLA2L,accession number Z14310,Smith-Waterman Score=236.
  misc_feature (1)...(410): n = a,t,c or g

SEQ ID NO: 18563 - DNA, 331 bp, Homo sapiens; identical to SEQ ID NO: 15029
  SIMILAR (290)..(210): 811254mologous to Homo sapiens Human secreted protein, SEQ ID NO: 5210,accession number G01129,Smith-Waterman Score=125.

SEQ ID NO: 18564 - DNA, 722 bp, Homo sapiens
  SIMILAR (171)..(716): 451254mologous to Feline leukemia virus gag-pol precursor polyprotein gPr80,accession number M18247,Smith-Waterman Score=402.
ggacgcgcatgaaatttgatgccatgactcaattgggagacctcccttgggagatcaatcccctgtcctcctgctctctgctccgtgagaaagatccacctacgacctcaggtcctcagaccgaccagcccaaggaacatctcaccaatttcaaatccacaaccaatcatgcaccccttaccatcccattaaaacctaatcactcttatcccgctgaatgccaatatcccgtcccacagcacgctttaaaaggattaaagtctattatcactcgcctgctacagcatggccttctaaagcctataaactgcccttacaattcccccattttacctgtcctaaaaccagacaaggcttacaggttacttcaggatctgcgccttatcaaccaaattgttttgtctatccaccccgtgttgccaaaaccaaatactctcctatcctcaatacctccctccacaacccattactctgttctggatctcaaacatgctttctttactattcctttgcacctttcatcccagcctctcttcgctttcacttggactgaccctgacacccatcaggctcagcaaattacgtgggctgtactgccacaaggcttcacagacagcccccattacttcaatcaagcccaaatttcttcctcatctgttacctatctcggcataattctcatgaaaacccacgtgctctccctgctgatcgtgtctggctaa

SEQ ID NO: 18565 - DNA, 268 bp, Homo sapiens
  SIMILAR (57)..(4): 721254mologous to Homo sapiens PRO1488,accession number AF116636,Smith-Waterman Score=71.
atggccccacccctatctccctttgctgactctcttttcggactcagcccacctgcacccagagacaaaggagacacgttttatccgtggacccaaaactccggtgcccgtcacggactgggaaggcagccttcccttggtgtttcatcattgcagggacgcctctctgatcattcacccacgtttcagaggtgtcagaccacgcagggacgcctgccttggtccttcacccttagtggcaagtcttgcttttctgaggaaggggcaa

SEQ ID NO: 18566 - DNA, 458 bp, Homo sapiens
  SIMILAR (73)..(225): 641254mologous to Homo sapiens neutral protease large subunit,accession number M27826,Smith-Waterman Score=150.
cggctgaagactgacgctgcccgatcacctcggaagcctcctggactatcacagacgctttgggtaactcttacagtggaggctcccttattaggtcgagacattttaactaaattttctgcttctctgactattcctgggctacagccacacctcattgctgccttttcccccagttcaaagcctccttcacctcctccccttgtatctccacaccttaacccacaagtatgggatacctctactccctccttggcgaccgatcatgcaccccttaccatctcattaaaacctaatcacccttaccctactcaacgccaatatcccatcctgcagcacgctttaaaaggattaaagcctgttatcactcacctgctacagcatggccttttaaagcctataaactccccttacaattcccccattttatctgtccaaaaaccggacaagccttacag

SEQ ID NO: 18567 - DNA, 461 bp, Homo sapiens
  SIMILAR (51)..(209): 981254mologous to Human endogenous retrovirus tripartite fusion transcript PLA2L,accession number Z14310,Smith-Waterman Score=281.
ctttattgctcacacaaagcctgtttggtggtctcttcacacggacgcgcatgaaatttggtgccgtcactcggatcgggggacctcccttgggaaatcaatccccgtcctcctgttctttgctccatgagaaagatccacctacgacctcaggtcctcagacagaccagcccaagaaacatctcaccaatttcaaatccgcggcacgtcccactttcctggggcaggggcaagtacccctcaaccccttctccttcacccttagcggcaagtcctgctttcctaggcggcaagaaccccccaatcgcttatttccacaccccaacctcttatctctgtgccccaatcccttatttctgtgccccaaccccttctctacttttctggagggcaagaaccaccacccccaccccttctctgtgtctcaagtcttttctctaggcttgcctccttcactatgg

SEQ ID NO: 18568 - DNA, 358 bp, Homo sapiens; identical to SEQ ID NO: 798
  SIMILAR (131)..(12): 451254mologous to Macaca fascicularis hypothetical protein,accession number AB047615,Smith-Waterman Score=59.
  misc_feature (1)...(358): n = a,t,c or g

SEQ ID NO: 18569 - DNA, 667 bp, Homo sapiens; identical to SEQ ID NO: 3060
  SIMILAR (461)..(583): 901254mologous to Homo sapiens calbindin D28K,accession number S46006,Smith-Waterman Score=207.
  misc_feature (1)...(667): n = a,t,c or g

SEQ ID NO: 18570 - DNA, 419 bp, Homo sapiens
  SIMILAR (91)..(222): 861254mologous to Homo sapiens calbindin D28K,accession number S46006,Smith-Waterman Score=207.
  misc_feature (1)...(419): n = a,t,c or g
cgatccgactacnnnnnnnnnnnnnnnnnnnnnnnnnnnnnnnnnnnnnnnnnnnnnnnnnnnnntttggtgcggtgactcggatcgggggacctcccttgggagatcaatcccctgtcctcctgttctttgctccgtgagaaagagccacctacgacctcaggtcctcagaccaaccaggccaagaaacatctcaccaatttcaaatccggagcttgctacacttgccggaaatctggccactgggccaaggaatgcccgcagcccgggattcctcctaagccacgtcctatctgtgtgggaccccactgaaaatcagactgttcaactcacctggcagccactcccacagcccctggaactctggcccaaggctctctgactgactcctttccagatactctcggcttaacggctga

SEQ ID NO: 18571 - DNA, 719 bp, Homo sapiens
  SIMILAR (604)..(717): 891254mologous to Homo sapiens pol protein,accession number AF108841,Smith-Waterman Score=194.
atggccccaactaactgcaagggctctaggaaatgtggcagaccacatgaacagatgccccacccttatctccctttgctgactctcttttcggactcagcccgcctgcacccaggtgaaataaacagccgtgttcctcacacaaagcctgtttggtggtctcttcacacggacgcgtatgaaatttggtaccatgactcggattggggggacctcccttgggagatcaatcccctgtcctcctgctctttgctccatgagaaagatccacctacgacttcgggtcctcagaccaaccagcccaaggaacatctcatgaatttcaaatcgggaccccactggaaatcggactgtccaacccggcagccactcccagggcccctagaactctggccaaaggctctctgactgactccttcccagatcttctcagcttagcagctgaagactgatgctgcctgatcgccttggaagccccctggaccattacggatgctgagctttggataactcttacagtagaggattcccaactatatgaagacaccctagctggacgatcagttcttattaagaacctgaccccttaaactctacaactctcgatggactggaccctacttagtcatctatagtaccccaactgccgtccgcctgcaggatcctccccactgggttcaccgttccagaataaagctgtgcccatcggaaaaaaaaaa

SEQ ID NO: 18572 - DNA, 865 bp, Homo sapiens
  SIMILAR (475)..(633): 771254mologous to Homo sapiens Human secreted protein, SEQ ID NO: 5210,accession number G01129,Smith-Waterman Score=222.
gttttatttttcttattaatataagaaggcaggaatgtcaggcctctgagcccaagccaagccatcgcatcccctgtgacttccaggtatacgaccagatggcctgaagtaactgaagaatcacaaaagaagtgaatatgccctgccccaccttaactgatgacattccaccacaaaagaagtgtaaatggctggtccttgccttaagtgatgacattatcttgtgaaagtccttttcctggctcatcctggctcaaaaacacccccactgagcaccttgtgacccccactcctgcccgccagagaacaaacctcctttgactgtaattttcctttacctacccaaatcctataaaacagccccacccttatctcccttcgctgactctcttttcggactcagcccacctgcacccaggtgaaataaacagccatgttgctcacacaaagcctgtttggtggtctcttcacacggacacgcatgaaatttggtgctgtgattcggatcgggggacctcctttgggagatcaatcccctgtcctcctgttctttgctccatgagaaagatccacctacgacctcaggtcctcagaccgaccagcccaagaaacatctcaccaatttcaaatccagctgctcctcgccaggctgagctaggtcccaattcttcctcagcctctgctcctccaccctataatccttttatcacctcccctcctcacacctggtccggcttacagtttcattccgtgactagccctcccccacctgcccagcaatttactcttaaaagggtggctgaagctaaaggcatagtcaagaccgtcacggacgccgagcttcgggtaactctcacagtggaag

SEQ ID NO: 18573 - DNA, 1523 bp, Homo sapiens
  SIMILAR (723)..(1280): 461254mologous to multiple sclerosis associated retrovirus polyprotein,accession number AF009668,Smith-Waterman Score=392.
tctcggctcactgcaccctgcacctcctgggttcaggtgattctcctgcctcgggctcccaagtagctgggattacagggcgtgtgccactgtcaggcctctgagcccaagccaagccatcgcatcccctgtgccttgcacatatacacccagatggcctgaagtaactgaagaatcacaaaagaagtgaaaaggccctgccccgccttaactgatgacattccaccattgtgatttgttcctgccccaccttaactgagtgattaaccctgcaaatttccttctcctggctcagaagcacccccactgagcaccttgcgaccccccactcctgcccgccctttgactgtaattttccattaccttcccaaatactataaaacagccccacccctatctcccttcgctgactcttttcggactcagcccacctgcacccaggtgaaataaacagctttattgctcacacaaagcctgtttggtggtctcttcacacagacacgcatgaaatttggtgctgtgactcggatcgggggaccacccttgggagatcaatcccctgtcctcctgttctttgttccaagagaaagatccacctacgaccttggtcctcagaccgaccagcccaagaaacatctcaccaatttcaaatccacctcctttgtgttctcctcttgtattcccccaccttaaccctcaagtatatctctactccctccttggcgaccgatcatgcaccccttaccatctcattaaaacctaatcacccttaccctgctcaatgccaatatcccatcccacagcatgctttgaaaggattaaagcctgctatcactcgcctgctacagcatggccttttaaagcctataaactctccttacaattcccccattttacctgtcctagaaccagagaagatttacaggttagttcaggatctgcgccttatcaaccaaattgttttgcctatccaccccgtggtgccaaacccatatactctcctatcctcaatacctccctccacaatccattattctgttctggatctcaaacgtgctttctttactattcctttgtacccttcatcccagcctctcttcgctttcacttggactgaccctgacacccttcaggctcagcaaattacctgggctgtactgccgcaaagcttcacagacagcccccattacttcagtcaagcccaaatttcttccttatctgttacctatctcagcataattctcataaaaacacacacgctctccctgctgatcgtgtctgactgatctttcaaccccaaaaccttctacaaaacaacaactcctttccttcctaggcatggttagtgtggtcagaattcttacacaagagctgggactgtaccctgtaagttttctgtccaaacaacttgaccttactgttttagcctagccctcatgtctccgtgcagcggctgccgctgctttaacacttttagaggccctcaaaatcacaaactatgctcaactcactctctacagctc

SEQ ID NO: 18574 - DNA, 1079 bp, Homo sapiens
  SIMILAR (1062)..(787): 431254mologous to Homo sapiens Protein encoded by the endogenetic fragment of HERV-W,accession number B07702,Smith- Waterman Score=164.
aacagtccgattttcagtggggtcccagagagatgggacgcggcttaggaggaatcccgggctgcgggcattccttggcccagtggccagatttccggcacgtgtagcaagctcctgtgggaggaggttctggaggaacgcctggctgctgcggttcaggcgtttggaagttcttgtgtgctggagatgtagctggggtttgtctcacagtggaggcaaggaattgcaactttttttttattattgtacaccttgaaggcgaggttaattaaatcctgttgtggggtttgagggccggaatctaatttttggagttttatttaatgtcgggagcagattggctaataaaatgtattttgagaataagatggccttttgaccttttagggtctagggctgtaaagtgtctcagggttgctgccaaacgagccatgaactgggctggatttttcatatttgataaaaaaagagcctaaacgcacactgatttgggagaggtctgataaggaaaaaggagcattaaccttgactatgcctttggctccagccacctttttaagagtaaattgctgagcaagttgggggagggctaagtcacggaacgaaactgtaagccggaccaggtgtgagggaggggaggtgacaaaaagattatagggtggaggagcataggctgaggaagaattgggacctagctcagcctggcgaggagcagcctggggaggaagggagaggtcagatgggtctgtagaaaaggaagattagaaagactcagcgatgcttggggttggtactgaggggacaggcgggagggaaagaaggaagatttgggacgagttgcactgggcacagagactaggaagggactgatgtgtaaaagaatgcctggacgtcaggcacctcagaccatttgcctattttacaacaagaattatttagatcttgcaagatggaaaaattcaaagtgccattttctggttatttggaactactgtcgagtttgtattggggtcaagcggcatagcagaagaaaataaggcatttaggttttaggtcaggtgtgagttgaagaggtttta

SEQ ID NO: 18575 - DNA, 6699 bp, Homo sapiens
  SIMILAR (2608)..(4323): 911254mologous to HERV-H/env62 envelope protein,accession number AJ289709,Smith-Waterman Score=2670.
atgtggaaaggccccaaaggattagacatgtatggaaagagctcagtgagccctaagacatcagatatactggggagagacactctcctgctggccttgaaggtgcaaacagtggtgttgcaaactgcctgtggagagggccatgtggcaggaaactgtgggaggcctctagaaactgaaggcagtctccagctgacagctactaagaagctaagggactcagtcctgcaaccaaaaagtcctgaattctgccaacaatttacaagagcttggaataggacccaagttccagatgagactgaagccccagctggcacctatgcagcccaatcgggggacctcccttgggagatcaatcccctgtcctcctgttctttgctccatgagaaagatccacctacggcctcaggtcctcagaccgaccagcccaaggaacatctcaccaattttaaatcgggtttcagaggtgtcagaccacgcagggacgcctgccttggtccttcacccttagcggcaagtcccgcttttctggggaaggggcaagtaccccaaccccttctctctgtgtctctaccccttctccgcctttctggggggcaagaaacacccaaccccttctccttcaccctgagtggcaagtccgcttttctagaggagcaagtaccccaacctcgtatctctgtgccccagtcccttatttccacgccccgacctcttatctctgtggcccaatcccttatttctgcaccccaacctcttatatctctgtgccccaatcccttatttccatgccccgacctcttatctctgcaccccaaccccttatttccacgacccaacccctttcccgcttttctggaaggagcttgctacaagtgccagaaatctggccaccaggccaaggaatgcctgcagcccgggattcctcctaagctgcgtcccatctgtgcgggaccccactggaaatcggactgtccaactcacctggcagccactcccagagcccctggaactctggcccaaggctctctgactgcttcccagatcttcttggctgagtggctgaagactgacactgcccgatcgcctcagaagcctcctggaccgtcacagacactttgggtaactcttacagtggaggtggctgccactgctttaatacttttagaggccctcaaaatcacaagctatgctccacttactctctacagttcccataactttcaaaatctattttcttcctcacacttaacgcatatactttctgcccccaagacccttcagctatactcactctttgttgagtcttccacaatcaccattgttgctggcccagacttcaatccggcctcccacattattcctgataccacacctgacccccatgactgtatctctctgatccacctgacattcattccatttccccatatttccttctttcctgttcctcaccctgatcacacttggtttattgatggcagttccaccaggcctaatcgccacacaccagcaaaggcaggctatgctatagtatcttccacatttatcattgaggctactgccctgcccccctccactacctctcagcaagccaaactcattgccttaactcaggccctcactcttgcaaagggactacttgtcaatatttatactgattctaaatatgccttccatatccagtaccaccatgctgttatatgggcagaaagaaatttcctcactacacaagggtcctccatcattaatgcctctttaataaaaactctgctcaaagccgctttacttccaaaagaagctggggtcattcactgcaaggggcatcaaaaggcatcagatcccattgctctaggcaatgcttatgttgataaagtggctagacaagcagctagctctccaacttctgtccctcacggccagtttttctccttcacttcagtcactcccacctactcccccactgaaacttccacctatcaatctcttcccacacaaggcaaatggttcttagaccaaggaaaatatcttcttccagcctcacaggcccattctattctgtcatcatttcataacctcttctatgtagacataattcctcggtttggccttcccacctctatacagtctgataacggaccagcctttactagccaaatcacccaagtagtttctcaggctcttggtattcagtggaaccttcataccccttaccgtcctcaatcttcaggaaaggtggaacggactaatggtcttttaaaggcacacctcaccaagtttagcctccaacttacaaaggattggacagcacttttacctcttgctcttctcaaaatcagagcctgtcctcgagatgctacaggatacagtccatttgaacttttatatggacgcactttcttgcttggccccaacctcatcccagacaccagccctctaggcgactatcttccagtactccagcaggctagacaggaaattcgccaggctgctaatcttctcttgcctactccagatccccagccatatgaagacaacctagctggacgatcagttcttgttaagaatctgacccctcaaactctacaacctcgatggaccggaccctacttagtcatctatagtaccccgactgccgtctgcctgcagaatcctccccactgggttcaccattccagaataaagctgtgtccatcggacagccagcctaatccctcctcttcctcctggaagtcgcaagtactctcccccacttcccttaaactcactcatatttctgaagaacatgcctacacagctgtccccgccttacagacagactgggcaacatctcccatctccctacacctccgaacttcctttaacagccctcacctttaccctcctgaagaactcatttactttctagacaggtccagcaagacttccccagacatttcacatcagcaagctgccgccctccttcgcacttatttaaaaaacctttctccttatatcaactctactccccccatatttggacctctcacaacacaaactactattcctgtggccgctcctttgtgtatctcttggcaaagacccactggaattcccctaggtaatctttcaccttctcgatgttcctttactcttcatctccgaagtccaactacaaacatcaatgaaacaattggagccttccagctccatattacagacaagccctctatcaatactgacaaacttaaaaacattagcagtaattattgcttaggaagacacttgccctgtatttcactccatccttggctatcttccccttgctcatcagactctcctcccaggccctcttcttgtttacttatacccagccccgaaaataacagtgaaagattgctcgtagatactcgacgttttctcatacaccatgaaaatcgaaccttcccctctacgcagttaccccatcagtccccattacaacctctgacagctgccgccctagctggatccctaggagtctgggtacaagacacccctttcagcactccttctcacctttttactttacatctccagttttgcctcgcacaaggtctcttcttcctctgtggatcctctacctacatgtgcctacctgccaattggacaggcacatgtacactagtcttccttacccccaaaattcaatttgcaaatgggaccgaagagctccctgttcccctcatgacaccgacacaacaaaaaagagttattccactaattcccttgatggtcggtttaggactttctgcctccactgttgctctcggtactggaatagcaggcatttcaacgtctgtcatgaccttccgtagcctgtctaatgacttctctgctagcatcacagacatatcacaaactttatcagtcctccaggcccaagttgactctttagctgcagttgtcctccaaggacaactccgaggccttgacttactcactgctgaaaaaggaggactctgtatattcttaaatgaagagtgttgtttttacctaaatcaatctggcctagtgtatgacaacataaaaaaactcaaggatagagcccaaaaacttgccaaccaagcaagtaattatgctgaatccccttgggcactctctaattggatgtcctgggtcctcccaattgttagtcctttaatacccatttttctccttcttttatttggaccttgtatcttccgtttagtttctcaattcatccaaaaccgtatccaggccatcaccaatcattctatacgacaaatgtttcttctaacatccccacaatatcaccccttaccacaagacctcccttcagcttaatctctcccactctaggttcccacgccgcccctaatcccactcgaagcagccctgagaaacatcgcccattctctctctccataccaccccccaaaaattttcgccgccccaacacttcaacactattttgttttatttttcttattaatagaagaaggcaggaaatgtcaggcctctgagcccaaagcccaggccatcgcatcccctgtgacttgcacgtatacgtccaggatgggcctggaagtaactgaagaatcacaaaagaagtgaaaagggcccctgccccacccttaactgatgacattccaaccacaaaagaacttgtaaatgggccgggtgtttgccttaactgatgaccattcccttgtgaaagtccttttcctggctcatcctggctcaaaaagcacccccactgagcaccttgcgaccccccactcctgcccgccagagaacaaaccccctttgactgtaattttcctttacctacccaaatcctataaaacggccccacccttatcttcccttcgctgactctctttttggactcagcccgcctgcacccaggtgaaataaacagcccatattgctcacacaaagcctgtttggtggtctcttcacaccgacgcatatgaaatttggtgctgtgactcagatcgggggacctcccttgggagatcaatcccctgtcctcctgttctttgctccgtgagaaagatccacctacgacctcaggtcctcagacccaccagcccaaggaacatctcaccaattttaaatcagacaaaggagacatgttttatccgtggacccaaaactccagtgccggtcacggactgggaaggcagccttcccttggtgtttaataactgcagggacacctctctgattatacacccacgtttcaagggtgtcagaccacgcagggatgcctgccttggtccttcacccttagcggcaagtcccgcttttctggggaaggggcaagctgctcctcgccaggccgagctaggtcccaattcttcctcagcctctgctcctccaccctataatctttttatcacctcccctcctcacacctggtccggcttacagtttcgttctgtgactagccctcccccacctgcccagcaatttactcttaaaaaggtggctggagccaaaggcatagtcaagcatgctttgaaaggattaaagcctgttatcactcgcctgctacagcatggccttttaaagcctacaaactctccttacaattcccccattttacctgtcctaaaaccagacaagccttacaagttagttcaggatctgcgccttatcaaccaaattgttttgcctatccaccccgtgctcggcataattgggctcacttcctccgtccgtcgggatgccgggcaggacctgaagcgtgaccgcgcggaatttcttcttggtgatgaagttcatcacccgcaccgtcggcggatagccgaagcgcgccgcctcctgctcgggcagcacttcgatccgctccatcgcctcatagggcaggttctggaactcggcgaagcccgatatgcgccgcccgttgagcagcatcaccggctcgcccccgctcgccgaactggtcagcgacttcacccgcttgagcagttcggccaggctgggcgcgcccagcgccgcaatcgcctcggcatcgagcaccgcgaccggctcgaccgccccgatgacggagccgggaatgcgcttgccggtgacggtgacttccgcagggggtgcctgttcgccgggatcggaattcgccctcggtactgtcggtatcgccagtcccaagacgaccgccgaccatcccacgccgcccctcggccgcgcgcgctccccataccgcatcgtccagccactcccatcgccgacgtgatggtgatgtttagtgtggcaatcatgtcacaattaaggctcgtgcttcgccatatcgacggaatatcgcggtggccgcctgccgtggttttcataactgacgtgaagatatggcttgtttacccgtccgacgattgtcgaataaggtcaaacgatcgcgacgacatgcagggagaagcgcccgcgatgagcatgaatgccgccgccagagtgggcgatccgatcggccacagctttagccagggcctgttcggcgaggcgctggatggtttgttctttgcccgtcgcagcgaggtggacatgcgcgcgggcaatctcggccggctgatcgcgcgcgggctgagcggcggacgctggacgccggccgatggccagctgacgctcggatcgcgcgacgtcttcatcaatggcccccccgccaccatgacgatccggtcgaccggccaatgccgccagcatagcggtctgcgcaccgtc

SEQ ID NO: 18576 - DNA, 3334 bp, Homo sapiens
  SIMILAR (539)..(93): 951254mologous to Homo sapiens neutral protease large subunit,accession number M27826,Smith-Waterman Score=743.
gggggtggtatggagagagaatggacgatgtttctcagggctgcttcaagtgggattaggggcggcgtgggaacctatagtgggagagattaagctgaagggaggtcttgtggtaaggggtgatattgtggggatgttagaggacacaaaggaggctttggattgggaagaagggcagcaatgagatgtagctgtactccaggaatagtcagggaagcagataatttggttaaaatatttcggcctaataaggggagtgggcaggtggggataactaaaaaagagtgcataaaagagtgttgtccaagttggcaccagagtgggggagttttcaggggttttgaagcttggccgtcaatacccacaacagttatgggggcaagggaaacaggcccttgaaaagaaggcaacgtggagtgggtagcccccgtatcgattaaacaggggatggacttaccctccactgtgagagttactggcagctcggcgtccgtgatggtctccggggcttccgaggcgatcgggcagtgtcagtcttcaagctgctaagccaagaagatctgggaaggagtcagtcagagagccttgggccagagttccaggggctctgggagtggctgcccaggtgaagttgaacagtccgatttccagtggggtcccgcaaagatgggacacggcttaggaggaatcctgggctgcaggcattccttggcctggtggtcagatagatttctggcacttgtagcaagctcttgccttttccctggaaaagcagagaaggggtatagacacggagagaaggggttggggtacttgcccctccccgagaaaagcgggacttgccactaagggtgaaggaccaaggcaggtgtccctgcgtggtttgacacctttgaaacgtgggggaataatcagagaggtggccctgcaatgattaaacaccaagggaaggctgtcttcccagtccgtgaccggcgccggagttttgggtccacggataaaacgtgtctcctttgtctctaccagaaaatgaaaggaattgaaattaagagaagggagagattgaattgtggcgccaagattgaaaggagaaagaggttgaaggatagtgayggaggttggagaagagagtaagaagcaggccgcttaccggatttgaaattggtgagatgtttcttgggctggtcggtctgaggacctgaggtcgtaggtggatctttctcacggagcaaagagcaggaggacaggggattgattctcccaatgggaggtctcccccgatccaagtcccgggtcttggcaccaaatttcatgcgcggcaccaaatttcatgcaatgtcatgcatgtccgtgtgaagagaccaccaaacaggctttgtgtgagagcaataaagctgtttatttcacctgggtgcaggtgggctgagtgcaaaaagagagtcagcgaagggagataggggtggggccattttataggatttgggaaggtaatggaaaattacagtcaaagggggttgttctctggtgggcaggggtgggggacacaaaggtgctcagtgggggagcttctgagccaggagaaggaaattcacagggttaatccctcagttaaggtggggcaggaacaaatcacaatggtgcaatgtcatcagttaaggcggggcagggctttttcacttcttttgtggatcttcagttacattcaggccatcatggatgtatacatgcaagtcacaggggatgcagatggcttggcttgggctcagaggcctgacattcctgccttcttatattaataagaaaaataaaaccaaatagtgttgaagtgttggggtggtgaaaaatttttgaggggtggtaggggagagagaatgggcgatgtttctcagggctgcttcaagtgggattaggggcagcgtgggaacctagagtgggagagattaagctgaagggaggtcttgtggtaaagggtgatattgtggggatgtaagaagaaacatttgtcatatagaatgattggtgatggcctggataccggttttggatgaattgagaaactaaatggaataacagaaggagaaaaacaggtataaaaggtctaagaattgggaggacctaggatatctgattagagagtgcctaaggagattcagcagagtcctgccagcaaagattattgatttacttcaagagttaagagtggcagtttggggatagcaccaggagatatcagctgtgatggcttggagaaacagtgtaaaccggcagtgtaaacaagagcagggcatgtatgagtagttgagaatggtgaataggagtatgactagacaaaagatagtagggatgaccaagtttttttgggggcacagtctaagttggtccaagtgtctggaatgagactggggcctaataaaaaggagcgtctatacaggagcttaaatgggctcctgtacaccttgtaagcattctgaggacaggccagaattctgagaagggaaagtggtaaaaagtattgtccagtcctttttaaagttggtggctgagcttggtgaggtgtgtttttaaaagaccctttagtccgttctacttttcttgaagaaggaggaccgtaagggatataaatggtttcactgaatactaagagcctgaaaaactgcttggctgatttgactaataaaggctcgtctgttatcagactgtattgaaggtgggaaggctaaactgaggaattatgtctgacagaatgggaagaaatgactgcggtgcccttctcagaccctgtaggaaaggcctctacctatctagtgaaagtgtctacttagactaagaggtattctagtttttgtgactcagggcatgttgaataaagctaatttgccagtcctgggtgggggcaaatcctcgagcttgatgtgtaaggaagggagggggcctgaataatccctgaggaatagtagaacagcagatggaacactgagaaattatttccttgaggatagatttccacgatggaaaggaaatgagaggttctgagaggcaggctagtggcttgtactatagcatagcctgcctttgctggtgtgtggcgattaggcctggtggacccaccatcaataaatcaagcgtgatcagggtgaggaacaggaaagaaggaaatatggggaaatggggtgaatgtcaggtggatcagagagatacagtcatgggggtcaggtgtggtatcaggaataatgtgggaggccagattgaggtctacgccatcgaacagtggtacacgggggacctataccttaagcgactcccgcctcctcgttcccgggcctgctcactgccg

SEQ ID NO: 18577 - DNA, 377 bp, Homo sapiens
  SIMILAR (2)..(298): 981254mologous to Homo sapiens Man9-mannosidase,accession number X74837,Smith-Waterman Score=497.
caaaggagcaactatagtatatgccctggatacactttttattatggaaatgaaacatgaatttgaagaagcaaaatcatgggttgaagaaaatttagattttaatgtgaatgctgaaatttctgtctttgaagtaaatatacgctttgttggtggactactctcagcctactatctgtctggagaagagatttttcgaaagaaagcagtggaacttggggtaaaattgctacctgcatttcatactccctctggaataccttgggcattgctgaatatgaaaagtggtattggaaggaaactgggcctgggcctctggaggcagcagtattctggcagaattttggaaccctgcatttggagtttatgcacttgag

SEQ ID NO: 18578 - DNA, 1404 bp, Homo sapiens
  SIMILAR (245)..(931): 711254mologous to Homo sapiens dJ354N19.2 (Mannosyl- Oligosaccharide Alpha-1,2-Mannosidase (Man(9)-alpha-mannosidase, EC 3.2.1.113)),accession number AL022722,Smith-Waterman Score=723.
tgtatctaaaatcaaagtaaggggaaattttaagagatgtttggcaaactaacttcatatattattattatttccgaagatggaatatactatgcttctattccaacttgaagcttattagaaaaatatcttgatataaatgattgtgtgtagatttctcctccccagttttaaaaagactcaatatgatgagtgaaaaacggagttaatctgacccataactcttcgacgtcatctcttctttagtggtattggaaggaactggccctgggcctctggaggcagcagtattctggcagaatttggaaccctgcatggcatgaaaattgttttttagattttcacggtaacattttattttctattataggtaatgaatattcgaacagtactgaacaaactggaaaaacattatctgaattaaaagctgaatcactctaaaattcatttccctctctttccagatcatgtatcagttggaggacttggagacagcttctatgagtatttgctgaaggcctggttaagtataaatttgagaagagattacaaaatgttaaaaaataagtgtttttcacaggctatcgagactcatttgatccgcaagtctagcagcggactaacttatatcgcagagtggaaagggggcctcctggagcacaagatgggccacctgacctgcttcgcggggggcatgttcgcactcggggctgatgcagctcccgaaggcatggcccaacactaccctgtaagcactgtccaggaaaataacccttattcattcattccatgtcctttagttatgaaactgggaccagaagctttcagatttgatggtggtgttgaagccatcgctacaagacaaaatgaaaaatactacatcttacggccagaagttatggagacttacatgtatatgtttcgactctcaggaagtgacttcttttcctccttcctactcctgcctcctcaggcttcatcctgtttccaaaccctctttgatttgttcaaggtgcctgattctctgtgttctatccttgagttcagacgacactcaagcagacagccttactccacggatcagccatttatatatctggtaggcaagagaatactcttctgtcctctgacttaggatttaactcatgatgcttgctattttcttacctacccttcatcctttgtttagagctccaatcattataaacattctcatatcctgttctctgctatttgcacatcccagtcacataggatcactaataatagaagcatttactcaaaaccaaggtggtccccatgcctaaaggctgataaatcccaagaacagattatagtacaatgatgatctggttagacttagtcatacaaacacatgacagcttccactgttgagatgctgat

SEQ ID NO: 18579 - DNA, 400 bp, Homo sapiens
  SIMILAR (24)..(113): 901254mologous to Homo sapiens 1B1 IgG aberrant light chain with duplicated variable region,accession number R13111,Smith- Waterman Score=120.
  misc_feature (1)...(400): n = a,t,c or g
cggacgcgtgggcggacgcgtgggccagctcatctttcacctcacccccctcctcctccttggctttaattatgctaatgttggaggagaatgaataaataaagtgaatctttgcnnnnnnnnnnnnngggggcccccttttaagggatccatttttttccccccggggtggccaagttaannnnnnnnnnnggggcccccaaatttcaattccggggcccggtttttaaccnnnnnnnnnnnnaaaaccccgggggtccccccatttaatccccttggcgcaaaaanannggntnnttganaatgctgctactacctcctcctattagtgctgggttctgcaacatccctgcgcaccactgcctcctgatgcctgctgcctcctccagctcctctaagg

SEQ ID NO: 18580 - DNA, 450 bp, Homo sapiens
  SIMILAR (331)..(450): 751254mologous to Homo sapiens immunoglobulin light chain variable region,accession number M74019,Smith-Waterman Score=163.
  misc_feature (1)...(450): n = a,t,c or g
cacattagnnnnnnctgctatttcggacacagcatggacatgagggtccccgctcagctcctggggctcctgctactttttctccgaggtgccagnnnnnnnnnnnnnnnnnnnnnnnnnnnnnnnnnnnnnnnnnnnnnnnnnnnnnnnnnnnnnnnnnnnnnnnnnnnnnnnnnnnnnnnnnnnnnnnnnnnnnnnnnnnnnnnnnnnnnnnnnnnnnnnnnnnnnnnnnnnnnnnnnnnnnnnnnnnnnnnnnnnnnnnnnnnnnnnnnnnnnnnnnnnnnnnnnnnnnnnnnnnnnnnnnnnnnnnnnnnnnnnnnnnnnnnnnntctccaacctgaggattctgcaacttatctctgtcaacagacttatactgggccgtacacttttggccaggggaccaacctggaaatcagacgaactgtggctgcaccatctgccttcatc

SEQ ID NO: 18581 - DNA, 1251 bp, Homo sapiens
  SIMILAR (10)..(693): 591254mologous to Homo sapiens immunoglobulin kappa light chain,accession number AJ010442,Smith-Waterman Score=554.
  misc_feature (1)...(1251): n = a,t,c or g
ggacacagcatggacatgagggtccccgctcagctcctggggctcctgctgctctggctcccaggtgccagatgtgtcatctggatgacccagtctccaggcaccctgtctttgtctccaggggaaagagccaccctctcatgcagggccagtcaaagagttaacagcaactacttggcctggtatcaacagaaaccagggaaaacccctaagctcctgatctacggtgcatccaatttggagacaggggtcccatccaggttcagtggaagtggatctgggacagattttattttcaccattagcagcctgcagtctgaagatattgcgatgtactattgtcagcaatataataattggcctcacccctcgaacgttcggccaggggaccaaacttgaagatcaaacgaactggtggctgcaccatctgttgttcatcttcccggcccatctgatgagcagttgaaaatctgggaactgccttctgcttgtgtgcctgcctgaaataacttcctatccccagagtaggccaaaagtacagtgggaaggtgggataacgcccctccaaatcggggtaactcccccaggagagtgttcacagaggcaggactagacaaggaacagcaccctacagccctcagcaggcaccctggacggtgaggcaaagcaggattacggaggaaacacaaagtcttacggcttgcgaagttcaccccttcaggggccttgaggtttcggcccgttcacaaaggagctttcaacaggggggagagtttttaggagggagaagtgcccccacctgctcctcagtttccagcctggacccccttcccattccttttgggccttttgacccttttttttccacagggggaccttacccctattttgcgggtccttccagcttaatctttcacctcacccccctcctagtcccttggctttaattatgctaaatgttggaggagaatgaataaactaaagtgaatctttgcacctnnnnnnnnnnnntaaaaaatttaacccatcctagggggacactaacacattgacatttttttgccctaactgtctaaaataaaatcctcaatttgttaacattatcaggctaccgactaaaaatactttgatcaggtggacatttagcagggtggaccatgttatggactcccgggctcgaaaaccggaagagcactggacctgtgtggggggtactttacatcaaaaccccttttctagggcatgggaggc

SEQ ID NO: 18582 - DNA, 868 bp, Homo sapiens
  SIMILAR (63)..(308): 541254mologous to Rattus rattus ribosomal protein L18a (AA 1- 175),accession number X14181,Smith-Waterman Score=145.
  misc_feature (1)...(868): n = a,t,c or g
cccacgcgtccgcggacgcgtgggcggcgaacgcggaagagcaccgccatgataggcctcggggcacgctacgcagagtacaaggtatgtgggtcgctgcctgcccacccccaaaatgccacacgccgccccttttaccggcatgcgaaatctttgcgcctaatcatgtcgtcgccaagtccccgctttctggtactttgtatctcagttaaaagaagatgaagaaagtcttccaggggaagattggtctacttgtggggcaggtgttttgagaaagttcccccctgcggggtgaaagaactttcggggatcttggcttgcggctatggactcccgggagcgggcacccaccaacatgttaccggggaataaccggggaccttgaccacccgcaggcggctgttcaacccagttgcttacccgagacaatggggttgccccgggcaccggcgccccgaagccccatttccatttcagattcattgaaaggttggaagggagattcgcgggccagcaaagttgccgccggcccggcttgttcaaagcagtttccacgaattccaagatcaagtttcccgcttgccccaacggggtccttgcgccgtcagcacaagccacgctttcacgaccaagaggcccaacaccttcttcttaggtgcagggccctcgtccggggtgtgccccaaataaactcaggaacgccccggtgaacataaaactttaaaaagaaaatacttgaaaatataaatggggggggcccctttaaaagaaccannnnnnnnnncggggggaggggaagaaaatatttttttttgggggccccaaaattgaatccccgggccgggtttttaaaaaggggggaggggga

SEQ ID NO: 18583 - DNA, 784 bp, Homo sapiens
  SIMILAR (445)..(618): 1001254mologous to Homo sapiens RNA helicase,accession number AJ223948,Smith-Waterman Score=311.
atggatgctcaggtgtcaggacatgatcggatggagctcagatataaaacaagtcctgtgttccttcgtccactggccagcactactcaagagtctgtgtcacattttatacctgcacaggcccatgcttttacttgtattacatgcaaaatgccagtgtctttgtgttgtacagaaaagggcagagcttccaaccgtgctgtgaggtttggccttatggggtctccccacgtgagatcctgtggggaatttggggactctgtggccttgggtatctccgagcccctttgggaagagcaggaaccccagaaactctttcaaggccctgtgaagacacagcatcagagcataagagatcagcggctccacaagtactcacacactcgtcccaattccaaaaacacggccggaaagggcctcagtgcgcctagccaggcgttttggggaaagccagagagctgtgcagttactcctcgatttcccaaatcaaaagacgaaggatggtttttgatattaggagaagtggataagagagaacttattgctttgaaaagagtaggatatattcgaaatcatcatgttgcttccctttctttttatacccctgaaatacctggaagtcccttcaccgggcattccaccgccacggcgacggcgacatcctcctctttacaggtagagctgaccggaaacagcatttatgaatacattcacccggcagaccacgacgagatgacggcggtgctcaccgcccatcaaccctaccactctcacttcgtgcagg

SEQ ID NO: 18584 - DNA, 5425 bp, Homo sapiens
  SIMILAR (2052)..(3569): 1001254mologous to Homo sapiens ASC-1 complex subunit P200,accession number AY013288,Smith-Waterman Score=2634.
atgcagggaccttatcttttactatggttaccagactcccttgaggaaggaaaggaaggcctatatcttggaaattgtattcacacgtgcctggtgactgtccctgaagatgcattttttccccacttcttgacacagcattcaggcacacaccttccccctagttcagatatccccagtcacttcatgaataattccacaggaaggcttgcacagagaattctaggtacttctacagaagcatttttatctccagaagtgatggtgtttgtacatgctcgaaatgccactgtaagaacagctatgtctctaatagaaagagcaaaaaattgtggccatattcccttcttttttcctacccaaggacatgactatgtacttgcagaaaaacaggtacaaaggtcgagaaataagcaagtacgagaattattcccagatggttttagtattcatcatgcaggaatgcttcggcaggacagaaatttagttgaaaacttgttttctaatgggcatatcaaagtcctagtgtgtacagctacgttagcctggggtgtcaatcttcccgcccatgctgttattattaagggaacacaaatatatgctgcaaaaagaggctcctttgttgaccttggaattttagatgtcatgcagatatttggtcgagctggacgaccacaatttgacaaatttggggaaggaataattataacaacgcatgataaactcagccattacctcactttgctcactcaacgaaacccaattgagagtcagtttctggaaagccttgcagataacctaaatgcagagattgctctgggaacagttactaatgtggaagaagcagtgaagtggataagttacacttatctttatgtacggatgagagcaaatccattagcatatggcatcagtcacaaggcttatcagattgacccaccattaaagaaagcatcgagaacagtttggtcattgaaggttggacgaaaactagacaaaagctcagatgattcgttttgaggagcgaactggatatttttcctcaactgatttgggtagaactgccagccattactatattaaatacaacaccattgagacctttaatgaactctttgatgctcacaaaacagaaggtgatatctttgccatagtctccaaagctgaagaatttgatcaaattaaggtcagagaagaggaaatagaggagttagataccttattaagcaatttttgtgaactctccactcctggaggtgtagagaatagttatgggaaaataaacatcttacttcaaacttatatcagccgaggagaaatggacagtttctcccttatatcagattctgcatatgttgcacagaatgcagctagaattgtccgtgctctttttgaaattgctctgaggaaacgttggcctaccatgacctacaggctcctgaatcttagtaaagtcattgacaagaggctttggggttgggctagccctttgagacaattttcaatcctaccaccacacatcctaacaagattagaagaaaaaaagcttactgtggataagctgaaagacatgaggaaagatgaaataggtcacattttacatcatgtgaatattggactgaaggtcaaacaatgtgttcatcagattccttctgttatgatggaagcatccattcagcctatcacaaggactgtcctccgagtgacactcagcatctatgctgatttcacttggaatgatcaggtacatgggacagtaggagaaccttggtggatttgggtagaagatcctacaaatgatcatatttatcattcagagtattttctagctctaaaaaaccaagtcattagtaaagaagcccaactactggtatttacaatccctatttttgagcctttgccttcccaatactacatccgagcagtgtctgatagatggttgggtgctgaggcagtatgtattatcaactttcaacatctaattctaccagagagacatcctcctcatacagaattactggatcttcagcctttaccaatcacagctttggggatgtaaagcatatgaagccctgtacaacttcagccactttaaccctgtacagacacaaatatttcatacattgtatcacacggattgtaatgtcctacttggagcacctactggatcgggaaagactgttgcagctgaattagccattttcagagtcttcaacaaataccctacttcaaaggcggtatatattgcacccctaaaagccctagtacgtgaaagaatggatgattggaaagttagaatagaagaaaaacttggtaaaaaagttattgaactaacaggggatgtgactcctgatatgaaatccattgccaaggctgaccttatcgtcactacgccagagaagtgggatggagtcagcagaagctggcaaaataggaactatgttcagcaagtcactattctcatcatagatgagatccatctgcttggggaggaaagaggccctgttctagaggtcattgtatctcgaacaaattttatctcatcacacacagaaaagcctgttagaatagttggactatctactgcattagctaatgccagagaccttgctgattggctcaatattaagcagatgggcttgtttaacttccgaccatcagtacgcccagttccactggaagttcacattcaaggctttccaggtcaacattactgtcctcgtatggctagtatgaacaagcctgcatttcaggcaattagaagccattctccagccaaacctgttttgatatttgtctcatcaagacgtcaaactcgtcttactgctttggaattgatcgccttcctggctactgaagaagatccaaagcagtggttaaacatggatgaaagagagatggagaacatcattgcaacagtaagagattccaacctcaagctgacccttgctttcgggataggaatgcatcatgctggactacatgagagggaccgaaaaacagtagaggaactatttgtaaactgtaaagttcaggttcttattgctacaagcacattagcctggggtgtaaactttccagctcatttagtaattattaagggaacagaatactatgatggaaaaacaagacgttatgtggattttcccattacagatgtcctccagatgatggggcgtgctgggaggccgcagttcgatgaccaaggcaaagctgtaattctagttcatgacataaagaaagacttttataaaaaatttctttatgaacctttcccagtagaatcaagtttattaggagtgctctctgaccacttaaatgcagagattgctggtggtacaattacatctaagcaagatgcattggattatatcacctggacttactttttccgacgtcttatcatgaatcccagctattacaatttgggtgatgtgagccatgattctgtgaacaagtttctgtcccatctgattgagaagtccctgattgaattggaactttcctactgtattgaaattggagaggataatcgcagcattgaacctctaacttatggccgtattgcgttcctattactatttgaagcatcaaacagttaaaatgttcaaggaccgcttgaagcctgaatgcagtactgaagaactgctttcaattctaagtgatgcagaagaatatacagatttgccagtgagacacaatgaagatcatatgaatagtgaactggcaaaatgtcttcccattgaatcaaatcctcattcatttgacagccctcacaccaaagcacatctcctgctacaggcacatctcagccgagccatgctaccctgcccagattatgacactgataccaaaacagtcttggaccaagctctcagagtatgtcaggcaatgctgggacgtggctggcaaaccaggggctgggctgggtgactgtcctggaatatcaccaacctgattcaggatgggtgatccaggggtcggtgggtttaaagggactcttctcttcttacactaccaaacatagaaaaccatcatcttcaccttttcaagaaattggaagccgattatgaagggcccacatgctaggggtcggacttccatcgagtgccttcctgatttgatccattcctgtggagggaaagaccatgtattgagctccatggtagaaagtgagctacatgctggcaaaaacgaaacaggcatgggaatttcttatctcacttgccagtgataaatgttggcataagtgttaaaggctcgtgggattgacttagtttgaaggacataatgaactctctgtctcaactctgactgcagacaaacgagatgacaacaaatggatcaaattgcatgctgaccaagagtatgtgcttcaagtgagcttgcagagagtccactttgggttccacaagggaaagccagagagctgtgcagttactcctcgatttcccaaatcaaaagacgaaggatggtttttgatattaggagaagtggataagagagaacttattgctttgaaaagagtaggatatattcgaaatcatcatgttgcttccctttctttttatacccctgaaatacctggaaggtatatctacacattatatttcatgagtgactgctaccttggcctggaccagcagtatgacaatctatctcaacgttacacaagcgagtctttctgcacaggtcaacaccaaggtctctgattccctgactgacctggcattaaagtaacttgacctgaacaatccatttgaaaggagtggctaagaattctctctgttcagtcatctagacaaatcgaattacttgatgtttgccttgaaagaatcaacttctaacctcaaccatccagggaaattgacagtggctgcagtattgactccagtgacataaagttaaccacagtgggccttttaacaaatgttgccttttataatgttatctttatgagtttcttggatatgtaagatgaaaaagcatttaggaataatcttttaatttgtgttatatttggggatggatatttaggagctatcaatcaaattttacatctcacaatgtacctgtttaccatggatattggcctgcctttttttaaggaaaaccacattgagatggttgccaagtgttaggaccttgtcacagatttcctaactctgccgcataaactataaatctgtaaggtggtacacagcgtgtccttgttagcaaaatttatactttgatatgatcacatgtagaagtagcttccaagaatttcttgtagtcataaatgtttaataatatatgatgtaaaattatattatggagcctaatgatgataacaaagaaaacaatatactgatcttagaaaatgtagacatggttaactgggaaataaaatatagagtggcacttcaagacaaaaaaaaaaaaa

SEQ ID NO: 18585 - DNA, 657 bp, Homo sapiens
cccagtgagggacagtacttttctccctcactccatgaatgaccctacaatgaattatttttcccctaaagccaagggagaaagagtatagattttaaaagggtatgtgaccccttatttttcctaccttaggaaaacagtagcccaaacccaccctagtcacttgtgtacatatttacatttatttacaaaagtatctacatcatcagtaaaaacaatttactgacaaaaaaagcaagcacctagtcatataataagttgatgacagccaaaactaatgcttgttctttgttagtgggtatttcttcttaaagcagctgcttcaagttacatttccaacagttgttcaaaaattgtaatactcaaatgagaaatcagatcggctttttacgtttttaaaataatttagttatgctgttgtcttcatcttctgttaccaatcaattggagctacaaaaaaaaatcatattattaacttgtaaaatgcagtaaatctgggctgcagaccaggagtctttaatttaccctcctattctaaagtgaatagcccttttgtaataaactcatcaaagccaagggagctagggagcagggatggaggaagaactgccttgagtgctcttgggatagtagtctgagtaacacttgaagaacagc

SEQ ID NO: 18586 - DNA, 1106 bp, Homo sapiens
  SIMILAR (53)..(535): 681254mologous to Homo sapiens PI-linked LFA-3 encoded by phage lambda P24,accession number R05572,Smith-Waterman Score=511.
gcttgtggctgggcactcgcgcagaggccggcccgacgagccatggttgctgggatcgacgcggggcggtcttctgggggtcctcagcgtggtctgcctgctgcactgctttggtttcatcagctgtttttcccaacaaatatatggtgttgtgtatgggaatgtaactttccatgtaccaagcaatgtgcctttaaaagaggtcctatggaaaaaacaaaaggataaagttgcagaactggaaaattctgaattccagagctttctcatcttttaaaaatagggtttatttagacactgtgtcaaggtagccctcactatctacaacttaaacatcatcaagatgaaagatgaagtatgaaatggaatcggccaaaatagttactgatcaccatgaagttccttccttatgtgccttgagtctctttccaatctcccacactaacttggtgcattgactaatggaagcattgaagtccaatgcatgataccagagcattacaacagccatcgaggacttataatgtactcatggggattgtccctatggagcaatgtaaacgtaactcaaccagtatatattttaagatggaaaatgatcttccacaaaaaaatacagtggttctcttagcaatccatttatttaatacaacatcatcaatcattttgacaacctgtatcccaagcagcggtcattcaagacacagatatgcacttatacccataccattagcagtaattccaacatgtattgtgctgtatatggaatgggtattctgaaaatgtgccagaaacccagacagaacccaactccaattgattggtaacaggaggatgaagacaacagcataacctaaattattttaaaaacttaaaaagcccatctgatttctcatttgagtattacaatttttgaacaactgttggaaatgtaacttgaagcagctgctttaagaagacatacccactaacagagaacaagcattagttttggctgtcatcaacttattatatgacggggtgcttgctttttttgccagtaaattgtttttactgatgatgtagatacttttgtaaataaatgtaaatatgtacacaagtgaaaa

SEQ ID NO: 18587 - DNA, 386 bp, Homo sapiens; identical to SEQ ID NO: 433
  SIMILAR (381)..(262): 951254mologous to Homo sapiens calbindin D28K,accession number S46006,Smith-Waterman Score=214.

SEQ ID NO: 18588 - DNA, 344 bp, Homo sapiens; identical to SEQ ID NO: 436
  SIMILAR (8)..(130): 901254mologous to Homo sapiens calbindin D28K,accession number S46006,Smith-Waterman Score=204.

SEQ ID NO: 18589 - DNA, 268 bp, Homo sapiens; identical to SEQ ID NO: 18565
  SIMILAR (57)..(4): 721254mologous to Homo sapiens PRO1488,accession number AF116636,Smith-Waterman Score=71.

SEQ ID NO: 18590 - DNA, 381 bp, Homo sapiens; identical to SEQ ID NO: 5723
  SIMILAR (381)..(301): 811254mologous to Homo sapiens Human secreted protein, SEQ ID NO: 5576,accession number G01495,Smith-Waterman Score=98.

SEQ ID NO: 18591 - DNA, 396 bp, Homo sapiens
  SIMILAR (177)..(344): 511254mologous to Bovine leukemia virus gag,accession number K02120,Smith-Waterman Score=157.
gtgtcagaccacacagggacgcttactcactgcagggacgcctctctgatcattcacccacgtttcaagggtgtcagaccacgcagggacgcctgccttggtccttcacccttagcggcaagtcccgcttttctggggaaggggcaaccacatctccggcacacaagaacttccaaacacctgaaccgcagtggccaggcattcctccagaacctcctcccacaggagcttgctacacgtgccggaaatctggccactgggccaaggaatgcccgcaggccaggattcctcctaagccgcatcccatctgtgtgggaccccactgaaaatcggactgttcaactcacctggcagccactcccagagcccctggaactctggcccaaggctctctga

SEQ ID NO: 18592 - DNA, 404 bp, Homo sapiens; identical to SEQ ID NO: 12906
  SIMILAR (140)..(262): 871254mologous to Homo sapiens calbindin D28K,accession number S46006,Smith-Waterman Score=190.
  misc_feature (1)...(404): n = a,t,c or g

SEQ ID NO: 18593 - DNA, 439 bp, Homo sapiens
  SIMILAR (293)..(436): 771254mologous to Homo sapiens neutral protease large subunit,accession number M27826,Smith-Waterman Score=186.
  misc_feature (1)...(439): n = a,t,c or g
ctgnnnnnnnnnnnnnnnnnnnnnnnnnnnnnnnnnnnnnnnnnnnnnnnnnnnnnnnnnnnnnnnnnnnnnnnnnnnnnnnnnnnnnnnnnnnnnnnnnnnnnnnnnnnnnnnnnnnnnnnnnnnnnnnnnnnnnnnnnnnnnnnnnnnnnnnnnnnnnnnnnccacctaggcaagctaagatgcagaatctcgccgctcctggcagccactcccagagcccctggaactccggcccaaggctctctgactgactccttcccagatcttctcggcttagcggctgaagactgacactgcccgatcgcctcggaagccgccttcttttcaagggcctgtttcccttgcctccataactgttgtgggtattgacggccaggcttctaaacctcttaaaactccccaactctggtgccaacttagacaatactcttttaag

SEQ ID NO: 18594 - DNA, 511 bp, Homo sapiens; identical to SEQ ID NO: 241
  SIMILAR (79)..(426): 431254mologous to Homo sapiens Protein encoded by the endogenetic fragment of HERV-W,accession number B07702,Smith- Waterman Score=223.

SEQ ID NO: 18595 - DNA, 568 bp, Homo sapiens; identical to SEQ ID NO: 3040
  SIMILAR (107)..(226): 871254mologous to Homo sapiens calbindin D28K,accession number S46006,Smith-Waterman Score=193.
  misc_feature (1)...(568): n = a,t,c or g

SEQ ID NO: 18596 - DNA, 1287 bp, Homo sapiens; identical to SEQ ID NO: 445
  SIMILAR (769)..(1263): 421254mologous to Murine leukemia virus gag-pol polyprotein,accession number U13766,Smith-Waterman Score=280.

SEQ ID NO: 18597 - DNA, 933 bp, Homo sapiens; identical to SEQ ID NO: 3053
  SIMILAR (715)..(852): 511254mologous to Human T-cell lymphotropic virus type 2 gag protein,accession number X89270,Smith-Waterman Score=147.

SEQ ID NO: 18598 - DNA, 581 bp, Homo sapiens
  SIMILAR (345)..(503): 461254mologous to Human T-cell lymphotropic virus type 1 Gag,accession number S74562,Smith-Waterman Score=153.
agacaaaggagacaggttttatccatggacccaaaactccggcaccggtcacggactgggaaggcagccttcccttggtgtttaatcattgcagggacacctctctgattattcacccatgtttcaagggtgtcagaccacgcagggatgcctgccttggtccttcacccttagcggcaagtcccgcttttctggagaaggggcaagatttaattaacctcgccttcaaggtgtacaataatagaaaaaagttgcaattccttgcctccactgtgagacaaaccgcagccacatctccagcacacaagaacttccaaatgcctgaaccgcagcggccaggcgttcctccagaacctcctcccacaggagcttgctacatgtgccggaaatctggccactgggccaaggaatgcccgcagcccgggattcctcctaagccgcgtcccatctgtgtaggaccccaccgaaaatcggactgttcaacttacctggcagccactcccagagcccctggaaatctggcccaaggctctctgactgactccttcccagatcttctcggcttagcagctgaagactga

SEQ ID NO: 18599 - DNA, 428 bp, Homo sapiens; identical to SEQ ID NO: 3061
  SIMILAR (2)..(100): 871254mologous to Homo sapiens calbindin D28K,accession number S46006,Smith-Waterman Score=154.
  misc_feature (1)...(428): n = a,t,c or g

SEQ ID NO: 18600 - DNA, 675 bp, Homo sapiens; identical to SEQ ID NO: 3317
  SIMILAR (611)..(519): 641254mologous to Homo sapiens PRO1488,accession number AF116636,Smith-Waterman Score=93.

SEQ ID NO: 18601 - DNA, 1344 bp, Homo sapiens
  SIMILAR (142)..(843): 851254mologous to Mus musculus protocadherin,accession number AF281899,Smith-Waterman Score=1033.
atgcagaaacgactttggaactgggtaacaggcagagattggaacagtttgcagggctctgtagaagataggaagatgcgagaaagtttggaactctctagagacttaccgaatggctttgaccaaaatgctgataatgatattaatgatgaaaaccaggctgaggtggtctcagatagagatgaggaacttgttggtaactggagcaaagggactcctgaggattacccacgatttttccatatgcatcctaggacagcagaacttagtctcctggagccagtaaacagagactttcaccagaaatttgatttggttattaaggctgaacaagacaatggtcatcctcttcctgcctttgccggtctacacattgaaatactggatgaaaacaatcaaagtccatattttacaatgcccagttatcaaggctatatcctggaatctgccccagtgggagcaaccatttcggacagtctcaatttgacttcacctttaagaatagtagctctggacaaggacatagaagatacaaaagacccagagcttcacctttttctgaatgactacacctcagtcttcaccgtcacacagactggtattactcgctacctcaccttacttcaaccagtggacagggaagaacagcaaacttacaccttttcgataacagcatttgatggtgtacaagaaagtgagccagtcatcgtcaatattcaagtgatggatgcaaatgataacacgccaaccttccctgaaatatcctatgatgtgtatgtttatacagacatgagacctggggacagtgtcatacagctgctgatggcaacaaaagacactggggactactatggagggagagagggagaagagacaattgaaaaattaactattgtgtactatactcagtatctgggtgacagaatcaatcataccccaaacctcaacatcatgcaatatacccagggggcttccgaggcgatcaagcagtgtcagtcttcagccgctaagccgagaagatctgggaaggagtcagtcagccttgggccagagttccaggggctctgggagtggctgccaggtgagttgaacagtccgattttcagtggggtcccacacagatgggacgcggcttatgaggaatcccgggctgcaggcattccttggcccagtggccagatttcctgcatgtgtagcaagctcctgtgggaggaggttctggaggaacgccttgccgctgcggttcaggcatttggaagttcttttgtgctggagatgtggctggggtttgtctcacagtggaggcaaggaattgcaacatttttctattattgtacaccttga

SEQ ID NO: 18602 - DNA, 513 bp, Homo sapiens
  SIMILAR (1)..(189): 961254mologous to Homo sapiens truncated runt polypeptide= MTG8a {exon 8a},accession number S74096,Smith-Waterman Score=319.
atgcacatggtagaaaaaacaaggcgatctctcaccgtaataaggcggtgtcaagaagcagaccgggaagaattgaattactggatccggcggtacagtgacgccgaggacttaaaaaaaggtggcggcagtagcagcagccactctaggcagcagagtcccgtcaacccagacccagttgcactagacccatctgacctctcccctccctgccagcccaagctaggtcccaattcttcctcagcctctgctcctgcaccctgcaatctttttatcgcctcccctcctcacacctggtccggcttacagtttcgttccatgactagccctcccccacctgcccagcaatttactcttaaaaaggtggctggagccaaaggcatagtcaagaaaataagaattaatgatcctaaaggatttggcttgagtgttggaactactgtagagaaagtgggtgaccatcttcataatttagagaatgaagagttagtgacagactccattgctgcctga

SEQ ID NO: 18603 - DNA, 501 bp, Homo sapiens
  SIMILAR (495)..(370): 851254mologous to Homo sapiens calbindin D28K,accession number S46006,Smith-Waterman Score=197.
agtggggccgttttttaggatttgggtaggtggtggaaaattacagttaaagggggttgttctcttgcgggcaggggcgggggtcacaaggtgctcagtggggagctccggagactcactgtcccggagaaggaatgtcacaaggtaatgtcatcagttaaggcaggaactagccattttcacttcttttgtggttcttcagttgcctcaggccatctggatgtatacatgcatgcttgggctcagaggccggcctgacattcctgtcctccactgtaagagttacccaaggcgtctgtgatggtccaggaggcttcccaggcaatcaatcgggcagcgtcagtcttcagccgctaagctgagaagatcggatttaaaattggtgagatgttccttgggctggtgggtctgaggacctgaggtcataggtggatctttttcatggagcaaagaacaggaggacaggggattgatctcccaagggaggtccgccaatccgag

SEQ ID NO: 18604 - DNA, 878 bp, Homo sapiens; identical to SEQ ID NO: 15050
  SIMILAR (299)..(418): 851254mologous to Homo sapiens Human secreted protein, SEQ ID NO: 5210,accession number G01129,Smith-Waterman Score=179.

SEQ ID NO: 18605 - DNA, 816 bp, Homo sapiens
  SIMILAR (89)..(148): 901254mologous to Homo sapiens Human secreted protein, SEQ ID NO: 5576,accession number G01495,Smith-Waterman Score=108.
atgagccaggaaaaggactttcacaagggggcttccgacacgatcaggcagtatcagtcttcagccgctaagccgagaagatctgggaaggagtcagtcagagagccttgggccagagttccaggggctctgggagtggctgccagaaaagcaggacttgccgctaagggtgaaggaccaaggcaggcgtccctgcgtggtctgacacccttgaaacatgagtgtataatcagaggcgtccctgcaatgattaaacaccaagggaaggctgccttcccagtccatgaccggcgccggagttttgggtccacggataaaacgtgtctcctttgtctctaccagaaaatgaaaggaattgaaattaagagaagggagaaattgaagtgtggcaccaagattgaaaggagaaagaggttgagggatatgcactatttaaaattcttaaaagaatccaggatacaagatgcaggtggtgatggtcagaatgaagggcctggaatagagattcctaaaaagaggtcacatgaggaacatttggagggattgaaagcacgcatgaataatcagaccgcactgctgctgttaattgtaaaaatcattagtaaacttccaggtgctgtttactatataagcattgtaattttctatcctaaaatcagcaactcccccacatcattgtctgccccagggcatgagcactgtgcagctttgaggttgtcaaaggcagttgcagccccatttactgggactgaaagagatcgatccacacctgcagcgtttgaggcaataattcctgatattaaccagacctcatga

SEQ ID NO: 18606 - DNA, 561 bp, Homo sapiens
  SIMILAR (252)..(371): 921254mologous to Homo sapiens calbindin D28K,accession number S46006,Smith-Waterman Score=202.
atgccacatcagaatgggaataaatgtggctaccagaggagcctgcaaagtttctggattctaatggaaaagaagaaactgccttttgcctggaatttcctgatgtggccccaaatagctatccatctcatgcccttagacatgcttttccatacctgtgaaataaacagccatgttgctcacacaaagcctgtttggtggtctcttcacaccgacgcatatgaaatttggtgctgtgactcagatcgggggacctcccttgggagatcaatcccctgtcctcctgttctttgctccgtgagaaagatccacctacgacctcaggtcctcagacccaccagcccaaggaacatctcaccaattttaaatcagaccatcacggatgccgagcttcgggtaactctcacagtggaagaatgctccttattttctctccgagtcgtggactctatgcctgctcatgtgtcaagacgtagctcaacttccaacttcactaaaattatcaacctcacggtgggttctcagctagagttaggccttcccatagctctaaatctctag

SEQ ID NO: 18607 - DNA, 1452 bp, Homo sapiens; identical to SEQ ID NO: 2646
  SIMILAR (928)..(1095): 831254mologous to Homo sapiens Human secreted protein, SEQ ID NO: 5210,accession number G01129,Smith-Waterman Score=249.

SEQ ID NO: 18608 - DNA, 1463 bp, Homo sapiens
  SIMILAR (651)..(875): 981254mologous to Homo sapiens hypothetical protein,accession number AL137275,Smith-Waterman Score=418.
atgctgtcagacaaatgtcagcatcagataatgcatatggatagcatgcatgacatgaccatcaccatcatgatcaccgtcaagcttcttattggagaaactgacagcatacgttttaaactagccattaaacctgcctgtgaccttgtcagcctccaccacgtttatctggatggatgcatggttcttggcaccggtgacgcggttactagcagagactttcttccgcatgtacaggtccacaagctcgccggtgtgcttttggatttcaagactgtgcctgctgccacgacactgcgtaattcttctattccttcagctcttcctgaaccgatgactgctagtgaagcagctgctaggaaaagccaaataaaagccagaataacagataccattggaccaacagaaacctcaattgcaccaagacaaagaccaaaggccaactctgctactactgccactcccagtgtgctgaccattcaaagttcagcaacacctgttaaagtccttgctcctggtgaattcggtaaccatagaccaaaagagtacagtgtctctcccggcggctttcatgggctggccgttgagtatcagcagctttttcaggcgcatgttgcaagctgtaggattgaacagttgcatttgaatgtaggcagccgccacagcagcatagagtactccagcaactacagcagggagattggagattacagcaactccatttacagcatcgtcatcctcaccagcagcagcagcagcagcagcagcaacagcaacagcagcagcagcaacagcaacagcagcagcagcagcagcagcagcagcaccaccaccaccaccaccaccacttacttcaagatgcttatatgcagcaggtcagttgctgataaagaggccattgcaaatttcacaaatcagaagaacatcagcaatccacctgatatgtcagggtggaatccttttggagaggataatttctctaagttaacagaagaggaactattggacagagaatttgaccttctaagatcaaactcagcccacctgcacccaggtgaaataaacagccatgttgctcacacaaagcctgtttggtggtctcttcacacagatgtgcatgaaatttggtgccgtgactcggatcgggggacctcccttgggagatcaatcccctgtcctcctgttctttgctccatgagaaagatccacctacaacctcaggtcctcagactgaccggcccaaggaacatctcatcaattttaaatcaggagcttgctacacgtgccggaaatctggccactaggccaaggaatgcctgcagcctgggattcctattaagccgcatctcatctgtgtgggaccccactgaaaatcggactgttcaactcacctggcagccactcccagagcccctggaactctggcccaaggctctctgactccttcccagatcttggcttag

SEQ ID NO: 18609 - DNA, 2206 bp, Homo sapiens; identical to SEQ ID NO: 15055
  SIMILAR (2)..(889): 1001254mologous to Homo sapiens potassium channel homolog; KvEBN2,accession number AF033347,Smith-Waterman Score=1565.

SEQ ID NO: 18610 - DNA, 1197 bp, Homo sapiens
  SIMILAR (1195)..(1121): 761254mologous to Homo sapiens HHLA3 protein,accession number AF126163,Smith-Waterman Score=107.
ttaagtcactggctttgtcactggggtgctcccagatgtaagtatctggggttcgtgtggctgctcagacttggagggaagatgactgtaactctgacagccattgtcagtgggtccagctgagtcccggactttcttctcactggccgcagtcaatgtgtcttgggccatgtcctcaagaagtacttgttttccttgataaggtatcagggcagaacgggaatctgaagacctgagctttggctccagttctgctaagacccgttttgttacaatgacaatccactcagctactctaagctttggtgtctgaaaagccaggatgatggagaagacattctctaagtttccttccagttctaaaattctctttctcctttcaatcttggcgccacacttcaatctctcccttctcttaatttcaattcctttcattttctggtagagacaaaggagacacgttttatccgtggacccaaaattccggcgccggtcacggactgggaaggcagccttcccttggtgtttaatcaatgcagggacgcctctctgattatacacccacgtttcaagggtttcagaccacgcagggacgcctgccttggtccttcacccttagcagcaagtcctgcttttctggggaaggggcaagctgctcctcgccaggccgagctaggtcccaattcttcctcagcctctgctcctccaccctacaatccttttatcacctcccctcctcacacctggtcaggcttacagtttcattccatgactagccctccccctcctgcccagcaatttcctcttaaaaaggtggctggagctaaaggcatagtcaagcggctgaagactgacactgcccgattgccttggaagcccccagaccatcatagacgccgagcttcgggtaactctcacagtggaagggtacagcctccctcccggctgccttcgtgggctcatgttgagtgtctcaggcttttccaggagcacggtgcaagctgtcagtggatctaccgttctgggatctggaggacagtggttttcatgtgcgtccgtgtgaagagaccaccaaacaggctttgtgtgagcaacatggctgtttatttcacctgggtgcagttacttcaggccatctgggcgtatacgtgcaagtcacaggggatgcgatggcttggcttgggctcagaggcctga

SEQ ID NO: 18611 - DNA, 1143 bp, Homo sapiens; identical to SEQ ID NO: 3070
  SIMILAR (157)..(312): 821254mologous to Homo sapiens Human secreted protein, SEQ ID NO: 5210,accession number G01129,Smith-Waterman Score=226.

SEQ ID NO: 18612 - DNA, 909 bp, Homo sapiens; identical to SEQ ID NO: 810
  SIMILAR (384)..(503): 921254mologous to Homo sapiens calbindin D28K,accession number S46006,Smith-Waterman Score=205.

SEQ ID NO: 18613 - DNA, 1983 bp, Homo sapiens
  SIMILAR (1465)..(1959): 421254mologous to Mus musculus Gag-Pol polyprotein,accession number U63133,Smith-Waterman Score=284.
atggtgtgtctggagtttgttccttcagatgttcagatgtgtccagagtttcttccttccagtgggtttgtggtctcactgacttcaggagtgaagccacagaccttcgcagtgagtgttacagctcataaaggtggcacacccagagttgtttgttcctcccagtgggttcgtggtctcgctgacttcaggaatgaagctgcagaccctcacgaccagggaatggatgagaatcctactgattttctggaacggctaagaggggccttggtaaagcacatgtctctatctcctgatttagtcgagggacaattaatcctaaaggataaatttattactcaggcagcccctgatattgagaggaagctgcagaaacagaatgggccatctctcagggacatatttttcagtccccagaatggctacaattggaggatggcaagcttttatctaccagttgcgaacaaatggaaaattcttaaaagcctttaccagatcttacacctaggcccagattgggagggaccttacactgtatttctttctactcctatggcagtggaggtcactggaatagactcttggattcattacacccaagtgaaggcctggaaagctgatggagccacctctgtcaacccagaagagcacccaaagtaccaaggtgaaataaacagccatgttgctcacagaaagcctgtttggtggtctcttcacacggacgtgaatgaaatttggtgccgtgactcggatcgggggacctcccttgggaaatcaatccccggtcctcctgctctttgctccatgagaaagatccacctatgacctcaggtcctcagaccgaccagcccaaggaacatctcaccaattttaaatcaggagcttgctacacgtgccggaaatctggccactgggccaagcgaatgcccgcagcccgggattcctcctaagccgcgtcccatctgtgcgggaccccacttgaaaattcggacttgttcaactcaccttgggcaagccactcccagagcccctggaactccggcccaaggctctctgactgactccttcccagatcttctcggcttagcggctgaagactgacactgcccgatcgcctcggaagccgcctagaccatcacggacaccgagcttcgggtaactctcacagtggaggtatgggacatctctactccttccctggcaactgatcacatgcccgttaccatcccattaaaacctaatcacccttaccccgctcaacgccaatatcccatcccacagcacgctttaaaaggattaaagcctgttatcactcgcctgctacagcatgggcttctaaaacctataaactctccttacaattcccccattttacctgtccaaaaactggacaagtcttacagattagttcagaatctgcgccttatcaacaaaattgtttcacctatccatcctgtggtgcccaacccaccagcctttactagtcaaatcacccaagcagtttctcaggctcttggtattcagtggaaccttcatatcccttatcatcctcaatcttcaggaaaggtagaacggactaatggtcttttaaaggtacacctcaccaagctcagcctccaacttaaaaaggattggacagtacttttacctcttgctcttctcagaattagagcctgtcctcgagatgctacagggtacagtcgatttgaacttttatatggacgcactttcttgcttggccccaacctcatcccagacaccagccctctaggcgactatcttccagtcctccagcaggctagacaggctgctaatcttctcttgcctactccagatccccagccacatgaagacaccctagctggacgatcagttcttgttaagaatctgacccctcaaactctacaacctcgatggaccggaccccacttcatcatctatagtaccccgactgccgtctgcctgcaggatcctccccactag

SEQ ID NO: 18614 - DNA, 1758 bp, Homo sapiens
  SIMILAR (1)..(291): 761254mologous to Homo sapiens putative p150,accession number U93568,Smith-Waterman Score=356.
atggccatactgtccaaggtaatttatagattcaatgccatccccatcaagataccaatgactttcttcacagaattggaaaaaactgctttgaagttcatatggaaccaaagaagagcccgcatcgccaagtcaatcctaagccaaaagaacaaagctggaggcatcacactacctgacttcaaactatactacaaggctacagtaacttttccaaaaacatacaatgctatctccaagagagaatctgactcagcccgcctgcacccaggtgaaataaacagccatgttgctcacacaaagcctgtttggtggtctcttcacacagatgcgcatgaaatttggtgctgtgactcggatcgggggacctcccttgggagatcaatcccctgtactcctgtgttctttgctccgtgagaaagatccacctacgacctcaggtcctcagaccgaccagcccaaggaacatctcaccaattttaaatcagcttagcagcttaagactgacactgcccgatcgcctcagaagccccctagaccatcacggacgccgagcttcagcccgcctgcacccaggtgaaataaacagccatgttgctcacacaaagcctgtttggtgttctcttcacacggacacgcatgaaatttggtgccatgagtcggatcgggggacctcccttgggagggcaatcccctgtcctcctgttctttgctccatgagaaagatccacctacgacctcaggtcctcagaccgaccagcccaaggaacatctcaccaattttaaatcgggaaaagtagaacggactaaagggtcttttaaaaacacacctcaccaagctcagccaccagcttaaaaaggactggacaatacttttaccactttcccttctcagaaatcaggcctgtcctcagaatgctacaaggtacatcccatttaagctcctgtatagacgctcctttttattaggccccagtctcattccagacaccagagaacaaaccccctttgactgtaattttccattaccttccctaatcctataaaacggccccaccccatctccctttgctgactctcttttcggactcagcccgcctgcacccaggtgaaataaacagccttgttgctcacacaaagcctgtttggtggtctcttcacacggacgcgcatgaaatttggtgctgtgactcggatcgggggacctcccttaggagaccaatcccctgtcctcctgctctttgctccgtgacaaagatccacctacgacctcaagtcctcagacccaccagcccaagaaacatctcaccaatttcaaatccggctgctcctcaccaggccgagctaggtcccaatccttcctcagcctctgctcctccaccctataatctttttatcacctcccctcctcacacctggtctggcttaccgtttcgttccgtgactagccctccccctcctgcccagcaatttactcttaaaaaggtggctggagctaaaggcacagtcaaggttcctgatcctgttccttcagactggatgagacctcccaacaggggtccccagccatctacagatgcattgaggctggcaataggtcagtgccctactgggatgcagcttcagaggaaggggcaggctgccatctttgctgtttctcagccttcactggtgatacctccaggtatgggaataactgaggaaactagagtctggagggcactcacagaaaactgcagcagtactacagaagagtag

SEQ ID NO: 18615 - DNA, 6218 bp, Homo sapiens
  SIMILAR (3060)..(4919): 941254mologous to Homo sapiens putative p150,accession number U93572,Smith-Waterman Score=3044.
atggaggctgagaagttccatcagatgccatctgtgagccggagaaccaggaaagccagtggtgtaattcagtccaaatctgagaacctgagaaccaggggagccaatagtcacgctttaaaaagattaaagcctgttatcactcgcctgctacagcatggccttttaaagcctataaactctccttacaattcccccattttacctgtcctaaaaccagacaagccttacaaacggtttctcgccttttacggttggagtccacgttctttaatagtggactcttgttccaaactggaacaacactcaaccctatctcgggttattcttgtgatttataagggattttgccgatttcggaaccaccatcaaacaggattttcgcctgctggggcaaaccagcgtggaccgcttgctgcaactctctcagggccaggcggtgaagggcaatcagctgttgcctgtctcactggtgaaaagaaaaaccaccctggcgcccaatacgcaaaccgcctctccccgcgcgttggccgattcattaatgcagctggcacgacaggtttcccgactggaaagcgggcagtgagcgcaacgcaattaatggattttgccgatttcggaaccaccatcacacaggattttcgcctgctggggcaaaccagcgtggaccgcttgctgcaactctctcagggccaggcggtgaagggcaatcagctgttgcctgtctcactggtgaaaagaaaaaccaccctggcgcccaatacgcaaaccgcctctccccgcgcgttggccgattcattaatgcagctggcacgacaggtttcccgactggaaagcgggcaatcttctcagcttagcagcttaagactgacactgcccgatcgcctcagaagccccctagaccatcacggacgccgagcttcaggtaactctcacagtggaaggatcgggggacctcccttgggagatcaatcccccgtcctcctacactttgctctgtgagaaagatccacctacaacctcaggtcctcagaccaaccagcccaagaaacattctcaccaatttcaaatccgagacaaaggagacacgttttatccgtggacccacaactccggcgccagtcacggactgggaaggcagccttcccttggtgtttaatcactgcagggacacctctgtgattattcacccacgtttcaaaggtgtcagaccacgcagggacgcctgccttggtccttcacccttagcggcaagtcctgcttttctggggaaggggcaagctgctccttgccaggcggagctaggtcccaattcttcctcagcctctgctcctccaccctataatccttttatcacctcccctcctcacacctggtccggcttacagtttcgttcggtgactagccctcccccacctgcccagcaatttactcttaaaaaggtgcctggagctaaaggcatagtcaagcggctgaagactgacactgcccgatcgccttggaagacccctagaccatcacggacgccgagcttcagaaaagcagaacggactaaaggtcttttaaaaatacacctcaccaagctcagccaccaacttaaaaaggactggacaatacttttaccactttcccttctcagaattcaggcctgtcctcggaatgctacaagactggctactggccaattgggatatccttttatcagtcaaagctatgtcctggtcaatggatttcaaactgttgaggatctatgtgaagctgcagaccttcgagtgagtgttgcagaccttcgagtgagtgttacagctcttaaggtggcgcgtctggagttgttcgttcctcccggtgggctcgtggtctcgctggcttcagcagtgaagctgcagaccttcgcggtgttacagctcataaaagcaaaaagatgggactggggcaccttggagcagggggcggcgctcatcggggaggctcgggacgcacaggagcccacggagggggtgggaggctcaggcatggcgggctgcaggtccagagacctgccccgcgggaaggcagctaaggcccggcgagaaatcgagcgcagcgccgggctgacgatcaagaaggaaagatgcatacgaaatggatacagcaaagaaaaaatgaaactcatagttgtttctcatggcctccatgtaaatgacttgcagcataaactgacgcttttcaccaaggaaacatacacatacctagccagggattcagagaagcagaagcaggggtatctagcaggacttgaaggagcccatgccaacagggtgaaccagcagatcagtgacaacttagtagttaaaacaggggccttaccccctccttatagaaccaagggagaaaagctctatttttatatgtccagacagaactgccttttcagcgtatcagggcaactcctccaaggtttctttcctaatggaggacaagctgcacctaacccttatgctctgctttcccaaataccagaagaagcagaatggtttacagtcctggaccttaaggatgactttttctgcatcccttacatcctgactctcaattcttctttgcctttgaagatccttcgaacccaacgtctcaactcacctggactgttttaccccaaggtttcaggccatctatttggccaagcattagcccaagacttgagccagttctcatacttggacactctcgtcctttgtggggtgttaaagtctcccattattattgtgtgggagttgaatcaaatagacacaataaaaaatgataaaggggatatcaccaccgatcccacagaaatacaaactaccatcagagaatactataaacatctctacacaaataaactagaaaatctagaagaaatggataaattcctcaacacatacaccctcccaagactaaaccaggaagaagttgaatctctgaatagaccaataacaggagctgaaattgaggcaataattaatagcttaccaaccaaaaaaagtccaggaccagatggattcacagccgaattctaccagaggtacaaggaggagctggaggccagcatcatcctgataccaaagcctggcagagacacaaccaaaaaagagaattttagaccaatacccctgatgaatattgatgcaaaaatcctcaataaaatactggcaaaccgaatccagcagcacatcaagaagcttatccaccatgatcaagtgggcttcatccctgggatgcaaggctcgttcaacatatgcaaatcaataaacgtaatccaggatataaacagaacgaatgacaaaaaccatatgattatctcaatagatgcagaaaaggcctttgacaaaattcaacaacccttcattctaaaaactctcaataaattaggtattgatgggacgtatctcaaaataataagagctatctatgacaaacccacagccaatatcatactgaatgggcaaaaactggaagcattccctttgaaaactggcacaagacaggggtgccctctctcaccactcctattcaacatagtgttggaagttctggccagggcaatcaggcaggagaaggaaataaagggcattcaattaggacaagaggaagtcaaattgtccctgtttgcagatgacatgattgtatatcgagaaaaccccatcgtctcaacccaaaatctccataagctgataagcaacttcagcaaagtctcaggatacaaaatcaatgtgcaaaaatcacaagcatttttatacaccaataacagacaaacagagagccaaatcatgagtgaactcccattcacaattgcttcaaagagaataaaatacctaggaatccaacttacaagggatgtgaaggatctcttcaaggagaactacaaaccactgctcaaggaaataaaagaggatacaaacaaatggaagaacattccatgctcatgggtaggaagaatcaatatcgtgaaaatggccatactgcccaaggtaatttatagatttaatgccatccccatcaagctaccaatgactttcttcacagaattggaaaaaactactttaaagttcatatggaaccaaaaaagagcccgcattgccaagtcaatcctaagccaaaggaacaaagctggaggcatcacactacctgacttcaaactatactacaaggctacagtaaccaaaacagcatggtactggtaccaaaacagagatatagaccaatggaacagaacggagccctcagaaataatgccacatatctacaaccatctgatctttgacaaacctgacaaaaacaagaaatggggaaatgattccctatttaataaatggtgctgggaaaactggctagccatatgtaggagaaagctgaaactggatcccttccttacaccttatacaaaaattaattcaagatggattaaagacttaaatgttagacctaaaaccataaaaaccctagaagaaaacctaggcaataccattcaggacataggcatgggcaaggacttcatgtctacaacaccaaaagcaatggcaacaaaagccaaaattgacaaatgggatctaattaaactaaagagcttctgcacagcaaaagaaactaccatcacagtgaacaggcaacctacagaatgggagaaaatttttacaatctacccatctgacaaagggctaatatccagaatctacaaagaactcaaacaaatttacaagaaaagaacaaacaaccccatcaacaagtgggtgaaggatatgaacagacacttctcaaaagaagacatttatacagccaaaaggcacatgaaaaaatgctcatcatcactggccatcagagaaatgcaaatcaaaaccacattgagataccatctcataccagttagaatggcgatcattaaaaagtcaggaaacaacagaccaagctccaatgtcttctctgtgaaactttctgagatccaatccttggctctcatagagactaggtgcttaatgaatgctgatgaacagggtgtgccactgattcaagaaatgctggaatcttgggcaagtatttgcaaagttcccaagtatccaaatgccgaagcagtgcggccagaagagcaaacaccccacctgcacccaggtgaaataaacagccatgttgctcacacaaagcttgtttggtggtctcttcacacggacacgcatgaaatttggtgccgtgactcggatcgggggagacctcccttgggagaatcaatcccctgtcctcctgctctttgctccgtgagaaagatccacctacgacctcaggtcctcagaccgaccagcccaagaaacatctcaccaatttcaaatccagctgctcctcgccaggctgagctaggtcccaattcttcctcagcctctgctcctccaccctataatccttttatcacctcccctcctcacacctggtccggcttacagtttcattccgtgactagccctcccccacctgcccagcaatttactcttaaaagggtggctgaagctaaaggcatagtcaagcatgctttgaaaggattaaagcctgttatcactcgcctgctacagcatggccttttaaagcctacaaactctccttacaattcccccattttacctgtcctaaaaccagacaagccttacaggaaggcaggcccctccccactcaaatccctgtccagggtccagggtccagagaagggagtggcccaggcagagaaccccattgtccactttgcctctgctgctctgccagtctgcaggggcagaaggatgcccgtgcccaggaagaatgctgaagccagatccgaaatcgctaatttacaggcagcgcagtgggatgcttttggattcgggacacctgggcccagacccagccgccccaccccggcgccccgggcttgtgcacagcaggagcctccgccccgcgggtgtgggttggacgaggccaagggcagcggccggccaggggccaggccagagtccagcactgccctcggaggaagccgggtgggggcggcgctcctgaaggctccagccccggggagggaagccggccccgcacctcccgcactgggcgctcagacccctggtgcttccacggcgtctgagggtttctcagccaccgaagggtgtctccgccgcacccaacgggtcccccggtggagagatttgccttcacatcagattaaagggggttccgtttggtga

SEQ ID NO: 18616 - DNA, 5621 bp, Homo sapiens
  SIMILAR (1967)..(2305): 501254mologous to Homo sapiens neutral protease large subunit,accession number M27826,Smith-Waterman Score=219.
atggatgcagttggaggccattatcctcagataattaacacagaaacagagaaccaaatatcacatgttttcacttataagtgggagctaaacactggctctttgctccgtgagaaagatccacctacgacctcaggtcctcagaccgaccagcccaagaaacatctcaccaatttcagatccgagacaaaagagacatgttttatccgtgaacccaaaactccagcgccggtcacggactgggaaggcagccttcccttggtgtttaatcattgcagggacgcctctctgattatacactcacgtttcaagggtgtcagaccacgcagggatgcctgccgttggtccttcacccttagcggcaagtcccgctttcctggggcaggggcaagtacccctcaaccccttctccttcacccttaagcggcaagtcccgcttttctggggcaggggcaagtacccctcaaccccttctccttcacccttagcagcaagtcccgctttcctagggggcaagaaccccccaatcgcttatttccgccgcaccccaacctcttatctctgtgccccaatcacttatttctgcaccctgacctcttatctctgtgccccaatcccttatttccctgccccaaccccttctctgctttcctggagggcaagaacccccccaccccttctccatgtctctactcttttctctgggcttgcctccttcactatgggcaagcttccaccttccattcctccttcttctcccttagcctgtgttctcaaaaacttaaaacctcttcaactcacacctgacctaaaatctaaatgacttattttcttctgcaatgccgcttgaccccaatacaaactcgacagtagttccaaatagccggaaaatggcactttcaatttttccatcctacaagatctaaataattcttgtcctaaaattgacaaatggtctgaggtgcctgatgtccaggcattcttttacacatcggtccctgtgcccagtctctgtgcccagtgcaactcatcccaaatcttccttctttccctcctgcctgttccctcagtcccaaccccaagcatcgctgagtctttctaatcttccttttctacaggcccatctgaactcttcccctcctccccaggcatgctgctccttgccaggccgagctaggtcccaattcttccatcagcctctgctcctccaccctataatctttttatcacctcccctccctcacacctggtccggcttacagtttcgttccgtgacttagccctcccccaacttgctcagcaatttactcttaaaaaggtggctggagccaaaggcatagtcaaggttaatgctcctttttctttatccaacctctcccaaaatcagttagcgtttaggctctttttcatcgaatataaaaacccagacaagttcatggctcatttggcagcaactttgagacgctttacagccctagaccctaaaaggtcaaaaggccatcttattctcaaaatacattttattagccaatctgcttcccgacattaaataaaactccaaaaattaaattccggccctcaaaccccacaacaggacttaattaacctcgccttcaaggtgtacaataatagagtagaggcagccaagtagcaacatatttctgagttgcaattcctccttgcctccactgtgagacaaaccccagccacatctccagcacacaagaacttccaaacgcctgaactgcagcggccaggcgttcctccagaacctcctcccacaggagcttgctacacttgccggaaatctggccactgggcaagggaatgcccgcagcctgggattcctcctaaggcgcgtccccatctgtgtgggaccccactgaaaatcggactgttcaacttcacctgggcagccactcccagagcccctggaacactggccaaaggtctcgtgacctgacgtcgttcccagatcttcttggcttagcagcctgaagactgacactgcccgatcacctcagaagcacccttgaccatcacggatgcccgagctatggggtaactctcgacagtggaaggtaagcccgtccccttcttaatcaatacggaggctacccacgccacattaccttcttttcaagggcctgtttcccttgcctccataacctgttgtgggtattgacgggccaggctttctaaacctctttaaaactccccaactcatggtgccaacattagacaatacgtcgttttaagcactcctttttagttatccccatcgtgccaggttcccttattaggctgaggacactttaactaaattatctgcttccctgactattcctggactacagctgtatctcattgccacccttcttcccaatccaaagcctcctttgtgtcctcctcttgtatacccccaccttaacccacaagtataagatatctctactccctccttgggcgaccgatcatgcaccccttaccatctcattaaaacctaatcacccttaccccactcaacttaaagtgccaatatcccattcccgcagcacgctttaaaaagattaaagcctgttatcattccgcctgttacagcatgggccttttaaaccctataaactctccttacaattcccccatttttcctgtcctaaaacgagacaagccgttacaagttaagttcaggatctgcgccttatcaaccacattgttttgttgcctatccaccccgtggtggccaaacccatatactctcctatcctcaataccgtcccgtcgtactacccatttattctgttctggatctcagacatgctttctttactattgctttgcacccttcatcccagcctctctttgccttcacttagactgaccctgacacccattaaggctcaacaaattaccctgggctgcactgccacaagggtttcacagacagcccccattacgttcagtgaagcccaaatttcatcctcatctgttagtcatactcccgttcaccgttctcaactactcatacatgccctggctccttctttacactggccgggtttacactggtttctccaaggacatcacagctggatatctcctgggtgctatccccaaactggccacttctaaactcttgaagtaaataaataatctttgctggcaggactctgctgaatctccttaaggcactcttctaatcagatatcctgagtcgtcccaattcttagaccttttatacctgtttttctccttctgttattccatttagtttctcaattcatccaaaaccggtatccaggccatcaccaatcattctatatgacaaatgtttcttcttacatccccacaaatatcaccctttaccacaagacctcccttcagcttaatctctcccactctaggttcccaaggtgccccctaatcccacttgaagcagccttgagaaacatcgcccattctctctccctaccacccctcaaaaattttcaccaccccaacacttcaacaactattttggttttatttctccttattaatataagaaggcaggaatgtcaggcctctgagccccaagccaagccatctgcatcccctgtgaacttgcacgtatacgtccaggatgggcctgaatgtaactgaagaaatcacaaaagaactgaaaagggcccctgccccgccttaactgatgacattccaccaatggtgatttgttcttgccccaccttaactgagtgattaaccctgtgaatttgcttctcctggctcagaaagctccccaaactgagcaccttgtgaccccccacccctgcccaccagagaacaaaccccctttgactgtaattttcctttaggtacccaaatcctataaaacggccccacccctatctcccttagctgactctcttttgggactcagcccgcctgcacccaggtgaaataaacagcccatattgctcacacaacgcctgtttggtggtctcttcacacggacgcacatgaaatttggtgccaagacccgggacttggatcaggggacttcccttgggagaatcaatcccctgtcctcctgttctttgctccgtgagaaagatccacctacgacctcaggtcctcagacccaccagcccaaggaacatctcaccaatttcaaatccaagacaaaggagacaggttttatccatggacccaaaactccggcaccggtcacggactgggaaggcagccttcccttggtgtttaatcattgcagggacacctctctgattattcacccatgtttcaagggtgtcagaccacgcagggatgcctgccttggtccttcacccttagcggcaagtcccgcttttctggagaaggggcaagctgctcctcgccaggccgagctaggtcccaattcttcctcagcctctgctcctccaccctataatctttttatcacctcccctcctcacacctggtccggcttacagtttcgttctgtgactagccctcccccacctgcccagcaatttactcttaaaaaggtggctggagccaaaggcatagtcaagaccatcacagacgccgagcttcgggtaactctcacagtggaaggccgagacagtttaactaaattatctgcttccctgacgattcctggactacagccacatctcattgccgtccttctccccaacccaaagcctccttcgcgtcttcctctcatatccccctaccttaacccacaagtatgggacatctctactccttccctggcaactgatcacatgcccattaccatcccattaaaacctaatcacccttaccccactcaacgccaatatccaatccctcagcacgctttaaaaggattaaagcctgttatcactcgcctgctacagcatgggcttctaaaacctataaactctccttaccattcccccattttacctgtcctaaaaccagacaaggcttacaagttagttcagaatctgcgccttatcaaccaaattgttttgcctatccactccatgaatgctccttattttctctccgagtcgtggactctatgcctgctcatgtgtcaagacgtagctcaacttccaacttcactaaaattatcaacctcacgaactagctaccaagtgaccactttgacgagccttgaggaaaaggcggagggggctttagcacacactcagctaacgaaagtgtgccggttcatttcccacagctccacacaaactcccagggcctctgcagttctgggagaaccagtacccatcagtgctctagggctcccaagtcctgcagccttctgggaatgcctttcctttcccatctgccatcacactaatgataatagtcggccacctccaggatgccctaggattcccaaggccacatcacctacaccacttcttgacagagccaagagtgatgctggaaggggaagcaggaagcagaagaagaaagggacccagaacagtggaatgcaggagctcaggggccacgcaggagtgtggttctgcgtctggcccaggcacatcacacctgccttgggcatagtatcctcaaacctgctagttgaggggcgggaaaaattcacagaatattttagtgatttcttgctcagataa

SEQ ID NO: 18617 - DNA, 979 bp, Homo sapiens
  SIMILAR (237)..(866): 481254mologous to Homo sapiens v-fos transformation effector protein,accession number M84711,Smith-Waterman Score=328.
gaccagcaccatggcggttggcaagaacaagcgccttacgaaaggcgcgcaaaaagggagccaagaagaaagtggttgatccatttcctaggcaaagattggtattgacgtcgaaagcaccctcttatgttccattataagaaatattgaaaaagacgttgggtcccccaggaccccaagggacccaaaattgcaatctgatggtctcaaagggtccgtgtgtttgaaagtgagtcctgctgaattgccagaatgattgaagtttgcatttagaaaattcaaggctgattactgaagatgtttcaggggtaaaaacttgccctgacttaacttcccatggggcatgggatctttacccgtgacaaaattgttgttccatggtccaaaaaatgggcagaccaatgattgaagcctcacgttgaatgttcaagacttaccgattggttacttgctttcgtctgttctgtgttgggttttacctaaaaaaccgcaacatatcagatcacggaagaccctcttatgctcagccacccaacagggtccgcccaaatccggatagaagatgatggaaatacatgacccgcagaggttgcagaccaatgtgccttgaaaagaagtggtcaataaattgattccagccagcattgggaaaagacataggaaaaggcttgccaaatctatttatcctctcccaaaatgtcttcggttaaaaaagtaaaaatgctgaaggaagcccaagttttgaattgggaaagctcatggagcttcatggtgaaggcagtagttctggaaaagccactggggacgagacaggtgctaaagttgaacgagctgatggatatggaccaccagtccaagaatctgttggaaagttcagacttccaatagtgggcaatagaagtggccattgtgtgaaaaaagaaaaacaaagttcacgccgccgcgattttggtgttagtgtccacccgcggattccgcc

SEQ ID NO: 18618 - DNA, 957 bp, Homo sapiens
  SIMILAR (70)..(567): 391254mologous to Homo sapiens ribosomal protein S10,accession number U14972,Smith-Waterman Score=159.
  misc_feature (1)...(957): n = a,t,c or g
gcgtcgaccgcagcaccgcgcatgctccttctttttcagccccggtaccggaccctgcagccgcagagactgttgatgcctaagaagaaccgctattgccatttatgaaactcctttttaagggagggagtcatggtgcccaagaaggaatgtccccatccctaagcacccggagctggcagaacagaaatgtgcccaaccttcatgtcatgaaggccatgcaagtctctcaaagtccccgaggcctacgtgaaaagaacagtttgcctgaagaaaatttcctactggtgccttaccaattgagggtaccaaggggtttnaatttcctnccgtgattaccttgcatctgcccccgggagattgtgcctgcccacccctacgccgtagccgtccagaagactgggcaggccttcggcctaaaaaggtctggaagggtgaagcgaccttgcgagacttcacaagaacggggaagctggacagagattaccttacagacgggagtgctgtgccaccctggtggccgacaagaaagccgaggctgggggcttgggtcagaaacccgaatttccagttttagaggcggatttgttcgtggacgtggtcaagccacctcagtaaaatttggagagagattctttttgcattggaataaacttacagccnnnnnnnnnnnnggggggccccctttaaggagcccacttttatccccccggggtggccgacgaaaaatttttttataggggccccaaaaataaatcccggggccccgttttaaaaccgctgggagggggaaaacccgggggtacccacatttaatccccttgggacaagaattnaaacagnntntgtnaaccctatttacttcttaattgtactttgcgcatttggaggaaaaacccgcctggggagctacacactcacatgaaaactgtgcaaacgagtactaggcttgactct

SEQ ID NO: 18619 - DNA, 455 bp, Homo sapiens; identical to SEQ ID NO: 14095
  SIMILAR (121)..(393): 1001254mologous to Homo sapiens cytokeratin 18 (424 AA),accession number X12883,Smith-Waterman Score=447.

SEQ ID NO: 18620 - DNA, 2039 bp, Homo sapiens
  SIMILAR (1103)..(1939): 531254mologous to Homo sapiens cytokeratin 18,accession number X12881,Smith-Waterman Score=564.
atgtttgccccaaaccccaggtctgaccacatacctgtattttccacagctcactttagtgccaaggaggctggggacctgtctacactcttcgatgttggtggcatcataggcggcatcgtggcagggctcgtctctgactacaccaatggcagggccaccacttgctgtgtcatgctcatcttggctgcccccatgatgttcctgtacaactacattggccaggacgggattgccagctccatagtgatgctgatcatctgtgggggcctggtcaatggcccatacgcgctcatcaccactgctgtctctgctgatctgaccttgcatgtggattggttttgctgctgtaaggaaagggctcaaggacagcagctcagcatcctgtggctgcacacgcagagtgagagggacatggtggcagggcctatcgagggtctgcgtggccaggaacgaggaggtgcggctctggggcctctgctggctgggctcatctcccccagcgggctggaacaatgtcttctacatgctcatctctgccgacgtcctagcctgcttggagcctcgtgctaacaaggaggccgctaatgagctggccggagctgtggacctgggctggatggcaaatgtgaggaggaacccccgggacatggtaaccagcacgcatctggggacacacttccacttaaggaagacaccacccaggggagagaaaacgtgtgagcttgcctcgcagcagcctctcattgaagctacaactaaaaccaagagtgtggccgtatctcacatactgacttatacgcctccaacactaaacggcgtggctgcggttagctctcgggtccatttttcattctggcccccaactctgcagacgggcctggagcagggcagcatgagcttcaccatttgctttaccacctccaccaactaccagtccctgcattccatccagccacacagccacagcgtccagttcatcagcagcacagccaaagtctatgcagtcctcaggggcttgggctcccggacctcagtgtccttctccaccagcttctggagtggctgggggtctggaggcctggctgcagggatgccagggattgacaatgcccgtcttgctgctgatgactttagagtcaagtataagacggagctggtcatgtgcctgtctgtggagagcaacgtccgtgggctccacaaggtcactgatgacaccaatgtcactcggctacagctggagacagagatggaggctctcaaggaggagctgctcttcatgaagaagaaccaagagaaggaagtaaaaggtctacaagccctgattgccagctctgagttgaccatggaggtaaatgcccccaaatctcaggacctcagcaacatcatggcagacctcccggcccagtatgatgagctggcccagaaagaactgagaagagctggacaagtactggtcccaagaagacttgaggaacacaccacagtggtcaccaacaccagtctgcttgaggtttggagctgctgagacgcacgcctcacagagctgagacgtaccagtccaggtctttggagattcgacctggactccatgaagaaatctgaaaggccagcttggagaacagccttgagggaggtggaggccccctacgcccttacagatggagcagcttcaacgggatcctgctgcaccttgagtcacagctgggacagacaccgcgcacagaggcacagcgccaggcccaaggagtatgaggccctgcttgaacatcaaggtcaagcttggaagctgagatctgccaccttacccggccgccttcttggaagaatggccaaggactttaatctttggtgattcctttggacgaacgcaactcctttcaaaacctcccaaaaaaccaacaccccgccgggtaatgtggatggcaaagtggtgtcttgagaccaattgacaccaaagttctgaggcattaagccagcagaagccagggtacccttttggggagcaggaggccaataaaaagttcagagtttcaaaa

SEQ ID NO: 18621 - DNA, 897 bp, Homo sapiens
  SIMILAR (61)..(873): 871254mologous to Homo sapiens cytokeratin 18,accession number X12881,Smith-Waterman Score=1192.
atgggccaccatcgtcggcaaagcctgagtcctgtcctatctctctactccccggacagcatgagcttcaccactcggtccaccttcttcaccaactaccagtcactgggctctgtccaggcgcccagctacggcgcccgggcggtcagcagcgcggccagcgtctatgcaggcgccgggggctctggttcccggatctccgtgtcccgctccaccagcttccggggtggcatggggcctgggggcctggccgcggggatggctgggggtctggcaggaatgggaggcatccagaacaagaagaccatgcaaagcctgaacgaccgcctggcctcttacctggacagagtgaggagcctggagactgagaaccgtaggctggagagcaaaatccgggagcacttggagaataagggaccccaggtcaaagactggagccattactgcaagaccatcgaggacctgagggctcagatcttcgcaaatactgtggacaatgcctgcatcgttctgcatattgacaatgcccgtcttgctgctgatgactttagagtcaagtatgagacacagctggcgatgcgccagtctgtggagaacgacatccatgggctccgcaagctggagacagagattgaggctctcagggaggagctgctcttcatgaagaaccacgaagaggaagtaaaaggcctacaagcccagattgccagctttaggttgaccgtggaggtagatgcccccaaatctcaggacctcgccaagatcatggcagacatccgggcccaatatgacgacctggctgggaagaaccgagaggagctagacaaatactggcctcagcagtttgaggagaacaccacagtggtcaccacagtccgccgaggttggagctgctga

SEQ ID NO: 18622 - DNA, 423 bp, Homo sapiens
  SIMILAR (39)..(410): 761254mologous to Mus musculus cytokeratin,accession number M22832,Smith-Waterman Score=489.
aaagcctgagtcctgtcctttctctctccccggacagcatgagcttcaccactcgctccaccttctccaccaactaccggtccctgggctctgtccaggcgcccagctacggcgcccggccggtcagcagcgcggccagcgtctatgcaggcgctgggggcctggccaccgggatagccgggggtctggcaggaatgggaggcatccagaacgagaaggagaccatgcaaagcctgaacgaccgcctggcctcttacctggacagagtgaggagcctggagaccgagaaccggaggctggagagcaaaatccgggagcacttggagaagaagggaccccaggtcagagactggagccattacttcaagatcatcgaggacctgagggctcagatcttcgcaaatactgtgggacaatgcccgc

SEQ ID NO: 18623 - DNA, 2349 bp, Homo sapiens
  SIMILAR (709)..(1095): 551254mologous to Homo sapiens cytokeratin 18 (424 AA),accession number X12883,Smith-Waterman Score=258.
  misc_feature (1)...(2349): n = a,t,c or g
cacctggtcactctgggccccctacaccctggattggctcctcccaaaggaaggcctcttgtttactcctagatgactcagccttagccacatccgcttaaccctccaatagtccccattccgccagagccagtgtctcctcctctttacaggcctttccttacctccctccatgctgtccacttcctctgtaaagctctcaaccctgtccccttccccctctctcctgggaaagagccctcccatgcctagctgctgctcttagggaccctgtggctaggtgcgcggatggaaatccagccctcaggtcctcgatgatcttgaagtaatggctccagtctctgacctggggtcccttcttctccaagtgctcccggattttgctctccagcctccggttctcggtctccaggctcctcactctgtccaggtggaggaggtgctggcgagtttgaaatttgggagtcttgaccgggcgcagtggctcatgcctgtaatcctagcactttgggaggctgaggcgggtggatcacctgaggtccaggagttggagaccagcctggccaacatggcgaaaccccgtctctactaaaaatacaaaaattaggtcatcagcaaagcctgagtcctgtcctcttgctctcctccccggacagcatgnagccttcaccactcgctccaccttctccaccaactaccggtccctggggctctgtccaggcgcccagctacggcgccgggccgggtcgagcagcgcgaccagcgtcgtatgcaggcgctgggggctctggttcccggatctccgtgtcccgctccaccagcttcaggggccggcatggggtccgggggccttgggcaacgggaattagccgggggtcatggcaggaaatgggaggcatccagaaacgagaaggagaccatggcaaagccctgaacgaccgccttggcctctttacctgggacagagtgaggagccttggagaccggagaacccggaagcttggaagagcaaaattccgggaacactttggaagaaagaagggaccccaaggtcagaagactggagccattacttcaagattcatcgaggaccttgagggctcagatctttcgcaaatacttgttggacaatgccccgcatccgtttctgcaagatttgacaattgccccgtctttgctgcttgattgattttaggagttcaagtattgaggacagagcttggccatgcgccagttcttgtggagaaacgacattccattgggctccgcaaaggtcaattgatgacacccaatatcacaccgacttgcaagcttggagacagagattcgaggctcctcaaaggagggagcttgctctttcaatgaagaaggaaccacgaagaaggaagttaaaaggcctatcaagccccagattgcccagttcttggggttgacccgtggaggttagattgcccccaaattttcaggaccttcgccaaagatcattggcagacatcccgggcccaaatatgaacgagctgggctcgaaaaagaacccgagaaggaagcttagacaaagtacttggtctcagcagatttgagggagagcaccacagttggtcaccacaaccagtctgcttgaggttggaagcttgctgaagacgacgcttcacagaagctgagacgtaccagtccaggtccttggaagattcgaccctggacttccatgaagaaatcttgaaaggcccagcttggaagaaacagcccttgaagggaagttggaaggcccccctacggcccttacaagatggaggcaagcttcaaacggggatccctgctgcacccttgaagtcagagctggcaacaagacccggggcagaggggacagcgccccaggcccccaggagttatgagggcccttgctgaaacatcaaaaggtcaaagctggaggcttgagatcgcccaccctacccgcccgccttgttggaagattggcgaggacttttaatctttggtggatcccttggacagcaagcaactccatgcgaaaccgatccaaaagaccaccaccccgcccggataagttggattgggcaaagtggtgtcttgagaccaattgacacccaaagttcttgaaggcatttaagcccagcaagaagcaagggtacccttttggggaagcaaggaaggccaataaaaagtttcagaggtcattgcaaaaaaaaagtattatctcgctaacaaagctaaatataatgaactatacgttaatattttgcctatatttttcatgtgctttataatatttaactttaatattgaaatgcatttcagcagaaatataaagttgggctctaattttgttttcaa

SEQ ID NO: 18624 - DNA, 1961 bp, Homo sapiens
  SIMILAR (200)..(931): 471254mologous to Homo sapiens prohibitin,accession number S85655,Smith-Waterman Score=307.
  misc_feature (1)...(1961): n = a,t,c or g
agagatctgaagtgattttacctttatttccttcactttaagccaatcatgaaatttcagagtggaagcaggtgtgagaggtgttcagcagaaggaaacatgtgctttcaaagtgctagagtccattgcgcaagtttgcgcctggccttagctgttgcaggaggcgtggtgaactctgccttatataatgtggatgctggggcacagagctgtcatctttgaccgattccgtggagtgcaaggacattgtggtaagggaaagggactcatttttctcatccccgtgggtacaagaaacccaattatcctttgactggccgttctcgaccacgtaattgtgccaagtcaatcaactgggtaagcaaaagatttacagaatgtccaacatcacactgcggcatccctcttccgggcctgtcgccagcccagctttcctcgcatcttcaccagcatcggagaggactatggatggagcgtgtgcttgccgtcccatcacaactgaggttcctcaaggtcagtgtgggctcgctttggatgctgggagaactaatcaccaaaagagaagctggtctccaggcaggttgagcgacgacctttacagagcgagccgccacctttgggctcatcctggatgacgtgtccttgacacatctgaccttcgggaaggtatttcacataagcggtggaagccaaacaggtggctcagcaggaagcagagaagggccagatttgttggttggaaaaggctgagcaacagaaaaaaggcggccatcatctctgctgagggcgactccaaggcagctgagctgattgccaactcactggccactgcaggggatggcctgatcgagctgcgcaagcttggtaagctgcagaggacatcgcgtaccagctctcacgctctcggaacatcacctacctgcccancggggcagtccgtgctcctccaagctgccccagttgaggggcccacccttgccttgcacctcccgcgggcttgacttggggccacagccccgattgattcttaacaacagcctttcttttctgcttcccaccccagaaatcaattgtgaaattttcatgattggcttaaagtgaaggaaataaaggtaaaatcacttcagatctctaattagtctatcaaatgaaactctttcattcttctcacatccatctacttttttatccacctccctaccaaaaattgccaagtgcctatgcaaaccagctttaggtcccaattcggggcctgctggagttccggcctgggcaccatgcatttggcagcacgcaggcgggtgcagtatgtgatggactggggagcacaggtgtctgcctagatccacgtgtggcctccgtcctgtcactgatggaaggtttgcggatgagggcatgtgcggctggaactgaggaaggcaggcctccgtctttcccagcggttcctgtggcagatgcttgcttgaaggagaggtgccgggggaggggcagagagggaagtggtctgtctgtttaccaataagtcttgattctctttaactgtgtgaaccagcggaaacaaggtgtgtgtgaaactggggcaacaagattgaagaatcctgccccctgttgaaggtgggtgggccctgacttgttgcccccccaggggtccttaaaacttggatggaccttgtatagtgagagaggaggccttggaccgagatgtgagtccctgttgaagacttcctctctaccccccaccttggtccctctcagatacccagtggaattccaacttgaaggattgcatccctggtggggctgaacatgcctgccaaagacgtgtccgacctacgttcctggccccctcgttcagagactgcccttctcacgggctctatgcctgcactgggaaggaaacaaatgtgtataaactgctgtcaataaatgacgaccccagaccttccggctcaaaaaaaaaa

SEQ ID NO: 18625 - DNA, 479 bp, Homo sapiens
  SIMILAR (478)..(194): 1001254mologous to Homo sapiens dJ351K20.2.1 (novel enoyl coA/acyl coA hydratase/dehydrogenase type protein (isoform 1)),accession number AL109939,Smith-Waterman Score=486.
taaaatacatatgtatatacttcattatcatgtaattaaatgattatcctctacggcacaaaaaaatagtacatcattagaatagatgtaatttgaaaattagctattatttcttaactagtacaaataatggaatagcaaaaagctatttttggtcttttagaaatcatattttaaaaagaaggctgcattacctcataaatcttgttaaggtgttttgcatgaacatgcatacggccattccatcctctggagttcctagtgatttcacagcattcagatcagatcctgaagagaaagtattttttgccccacggacaatgaggcctttcccctctgtccaattttccaattcaattactttttccagaagttgtagcatcataacacctgaaaaggcattcattctacttggattgttcagagtaagaatgccaatgccattgtcttccttctgaaggtcaatggatccaccagga

SEQ ID NO: 18626 - DNA, 2758 bp, Homo sapiens
  SIMILAR (2060)..(1230): 441254mologous to Homo sapiens dJ351K20.2.1 (novel enoyl coA/acyl coA hydratase/dehydrogenase type protein (isoform 1)),accession number AL109939,Smith-Waterman Score=351.
  misc_feature (1)...(2758): n = a,t,c or g
tttttttttttttttttagaccacaaaatccacttttatttggtagtttttacatctatggccaaatagtattgggttgacacagtaatctagagtttacctctgaaaaaaagtaatgtgagtctgtctaaccatattttcctaactcaacagtaggatcatgatggtaagggcaaatgcaagttatttttaccatgattctcaaatggtgaattgaatgttacagtagcaaatacttttgacctcttgtgatgagtcagaactagaacttaattctttgactttcacattttttaaaaagtgtattgctgggatcataaacattttatgttgtgcatttttattacatttacttttgaaagatagttgttagaaggttagttgtttttcaggaaaaaaaagaaatctgatgtaaaaatgcaaatttatgttgcaggatgcttcatgagtcccttcaagtggtttaaaactacatcaacagtagttgtttattactagttggaaattccagggcacacaaataaatgtccaattgtagaatcagttgactttccccatgtccagggcctacccactgtttagtagggtaatttacaatagaaaactaattattgaaaagaacaaagttcccaaatttgtagtgggtagtgaggtacatctttttttaaatgaagggccattcccccatgaattttaccccagctggtttggagcagaagaaaatgattgatcataccctttcttgttttcttgttcccctgatacctcnccccacttttgttcctttagcagcaacactcagttattttggtaaattatttccccnggtaaaacagaacaaaaaatggtatggaaaagtaacgcccaggaataggttttggtaatagaagctctccctttttaaacactgcctctttgggttataagcctaagaattattattgggaattgacagcaataatttttaagccaaaagtgtatattttagctaaatgttccagattacgcagtaaagtacccaagtgagtaattggcaagaaatgaggtaaatgagttcagatattcaaatgattaaaagtaagtctgcatattaatagtagccttcaaagtaattctgatgttcatatttaatatcatttaacatttatacatattagtcactgggagctttacttgggagtacatccacacggaaaaacccaattatttattaaatgggtggtttcttaggcaatagcctcttaaatttggcagggcccaccccaaaactggtccctaaaagatctctttcgttctgtaatgcttccccccaaatatagctctctgcctgaacaaacagattttttcaaaagctcttaattacttccggtggcccttggatgaattgctttagccattcttgtgcctcttctagagatttagtttcatctgaagactgcaagaccctcttcaacccattccaatgtttaagagcattttttgaatccagtttaagggccccactcaacactttggagagcttgtctacttccgattatttcaactagccgggtgggtgccaccccagcttggtattatgcccatctctttgtggacgaatctggatcttactctctggagtcattaaccctgaaatcacatgctgtagtaaattctgctccttcacccaatgcccaaccttgaaccagcgcaacacttattaaaggaagtctcataaatcttgttaaggtgttttgccatgaaacatgcaatacggcccattcccatcctctggagttcctcagtgattttcaccagcattccagatcagatccctgaaggagaaaggtatttttttgcccccacgggacaatggaggccttttcccctctgtcccaatttttccaattcaattacttttttccaggaagttgtagcatcataaccacctgaaaagggcatttcattctacttggaatggttccagagtaagaatgccaatgccattgtcttccttctgaaggtcaatggatccacccaggaaactgctgaacgtgtttttttcacttcttcctcataaaatacatgggatgagctataaagtgacaatcctgtttgatgtagcaattttgtccttccagacagaaaggctgtcttcaaaagacttttcgccatttcgtcgcaggccacggtggtgacttccttttccgctcccctacacacgcttttccgttttgcgtgcctttgtttccgctccccccgggaccatagtgcgcccctgtcccccgttctcgtaggtcctctcctcttctccgagaaattctcaaaatactatcccacgctctcctttcctttctccgggaactttatcccgttcccctgccggttcccgtgaccccggaaatcccgctccaggctccaacaccaggttgggccctacagccccagtctccaggttggcaccagtggatataggctttaggtccactgactgctggtccctacagccccaggttccagtgaacccaggttccaggcctgctccaacaaacccaaggtccaggtctaccccagtagacccaggctccaacaccaggttgggccctacagccccagtctccaggttggcaccagtggatataggctttaggtccactgactgctggtccctacagccccaggttccagtgaacccaggttccaggcctgctccaacaaacccaaggtccaggtctaccccagtagaccctggcaccagaactaccccagagggcctagc

SEQ ID NO: 18627 - DNA, 343 bp, Homo sapiens
  SIMILAR (31)..(204): 941254mologous to Homo sapiens peripheral benzodiazepine receptor,accession number L21954,Smith-Waterman Score=323.
cgccatgggcttcatcgtggcgcccagcctggggtgcttcgtgggtcccgctttgtccacggcgagggtctccgctggtacgccggcctgcagaagccctcgtggcacccgccccactgggtgctgggccctgtctggggcacgctctactcagccatggggtacggctcctacctggtctggaaagagctgggaggcttcacaggggtcagcagagcttcagaggttgccccacctgagcccccacccgggagcagtgtcctgtgctttctgcatgcttagagcatgttcttggaacatggaattttataagctgaataaagtttttgacttcctttaaaaa

SEQ ID NO: 18628 - DNA, 1156 bp, Homo sapiens
  SIMILAR (349)..(870): 651254mologous to Homo sapiens mitochondrial benzodiazepine receptor,accession number U12421,Smith-Waterman Score=530.
gaagcgcggtcccaggagtggccgacgctccctctcctgcccattccgcggatgggcaatcccaggcggaactcccttgagggtctcagaatatctgggagacctcgggctcttgatctccgagacaccccgtttcgtagtggagaacagtccagatcggggaagtttattttgcccaaagccggttagaggccccctggccctcgattcccagtgcggggctcaggtgcgttgcagcctagacgggtcttactgtgagccgagcagcctctgggacctgtctgcttcccctaccccttgcaaagaagccggagcccagagctcccctgaacagcagctgcagcagccatggccccgccctgggtgcccgccatgggcttcacgctggcgcccagcctggggtgcttcgtgggctcccgctttgtccacggcgagggtctccgctggtacgccggcctgcagaagccctcgtggcacccgccccactgggtgctgggccctgtctggggcacgctctactcagccatggggtaggtgggcgtgcactggcctggggataagcctggccctttgcaaggggaggcctggcccaggacagaggacactgggcagctggccctgaactgggcatggccccccatcttctttggtgcccgacaaatgggcggggccttggtgaatctcctgctggtcagttggggcggccggtcacactacccttggaggacgtggggcatcacatatggctggccgcccgcctgctctaccccttaccttggcctggcttggccttctacgaccacaactcaaactacttgcgtatggcggggacaaaccatggctggcatgggggacggcggcttgccagagtgagtgcccggcccaccatgggactgcagctgcaccaagcaggtgccatcacgcttgtgatgtggtggccgtcacgctttcatgaccactgggcctgctagtctgtcagggccttggcccaaggggtcagcagagcttcacgaggtggccccacctgaagcccccacccgggaagcaagtgtcctgtgctttctgcatgcttaagagcatgtttctttggaacatggaattttataagctgaataaagtttttgacttcctttaaaaaagccaataaaaaaaaaaa

SEQ ID NO: 18629 - DNA, 606 bp, Homo sapiens; identical to SEQ ID NO: 16619
  SIMILAR (358)..(603): 671254mologous to Arabidopsis thaliana ubiquinone/menaquinone biosynthesis methyltransferase-like,accession number AB019233,Smith-Waterman Score=276.

SEQ ID NO: 18630 - DNA, 1785 bp, Homo sapiens
  SIMILAR (1)..(1083): 991254mologous to Cloning vector pZC320 SopA,accession number U26464,Smith-Waterman Score=1872.
atgaaactcatggaaacacttaaccagtgcataaacgctggtcatgaaatgacgaaggctatcgccattgcacagtttaatgatgacagcccggaagcgaggaaaataacccggcgctggagaataggtgaagcagcggatttagttggggtttcttctcaggctatcagagatgccgagaaagcagggcgactaccgcacccggatatggaaattcgaggacgggttgagcaacgtgttggttatacaattgaacaaattaatcatatgcgtgatgtgtttggtacgcgattgcgacgtgctgaagacgtatttccaccggtgatcggggttgctgcccataaaggtggcgtttacaaaacctcagtttctgttcatcttgctcaggatctggctctgaaggggctacgtgttttgctcgtggaaggtaacgacccccagggaacagcctcaatgtatcacggatgggtaccagatcttcatattcatgcagaagacactctcctgcctttctatcttggggaaaaggacgatgtcacttatgcaataaagcccacttgctggccggggcttgacattattccttcctgtctggctctgcaccgtattgaaactgagttaatgggcaaatttgatgaaggtaaactgcccaccgatccacacctgatgctccgactggccattgaaactgttgctcatgactatgatgtcatagttattgacagcgcgcctaacctgggtatcggcacgattaatgtcgtatgtgctgctgatgtgctgattgttcccacgcctgctgagttgtttgactacacctccgcactgcagtttttcgatatgcttcgtgatctgctcaagaacgttgatcttaaagggttcgagcctgatgtacgtattttgcttaccaaatacagcaatagtaatggctctcagtccccgtggatggaggagcaaattcgggatgcctggggaagcatggttctaaaaaatgttgtacgtgaaacggatgaagttggtaaaggtcagatccggatgagaactgtttttgaacaggccattgatcaacgctcttcaactgctgccccgatggtggattcgttaattgcgcgcgtaggagtaatggctcgcggtaatgccattactttgcctgtatgtggtcgggatgtgaagtttactcttgaagtgctccggggtgatagtgttgagaagacctctcgggtatggtcaggtaatgaacgtgaccaggagctgcttactgaggacgcactggatgatctcatcccttcttttctactgactggtcaacagacaccggcgttcggtcgaagagtatctggtgtcatagaaattgccgatgggagtcgccgtcgtaaagctgctgcacttaccgaaagtgattatcgtgttctggttggcgagctggatgatgagcagatggctgcattatccagattgggtaacgattatcgcccaacaagtgcttatgaacgtggtcagcgttatgcaagccgattgcagaatgaatttgctggaaatatttctgcgctggctgatgcggaaaatatttcacgtaagattattacccgctgtatcaacaccgccaaattgcctaaatcagttgttgctcttttttctcaccccggtgaactatctgcccggtcaggacttgcatgggtattaggagatgctgaagaactgccctttgatgatgacaagtttgatatttacaccattgcctttgggatccggaatgtcacacacattgatcaggcaacaatcacatag

SEQ ID NO: 18631 - DNA, 879 bp, Homo sapiens
  SIMILAR (294)..(416): 601254mologous to Escherichia coli o251,accession number M87049,Smith-Waterman Score=118.
gtattacgcctagcgtggcacgagcggcggcccccgggagctgtgctctatggagctattgcggccttgggtggtcgcgggcgatgcggggctgccagggcctcgggcttcgtagctcttggcccggcgacctactaagtgctcggctcttgtcccaagagaagcgggcagcggaaacgcactttgggtttgagactgtgtcggaagaggagaaggggggcaaagaactcctttaatgtgaaagtttttgctggcatcacttcttctgggacatcttcaacctttttgtcacagctccatttcttgttcatgttgactatcaggggtttgaaagtgtggctaaaaagtatgatgtgatgaatgatatgatgagtcttggtatccatcgtgtttgggaaggattttcctgctctgggaagatgcacccacttcctggggacccagctgcttgatgttgctggaggcacaggtgacattgcattccggttccttaattatgttcagtcccagcatcagagaaaacagaagaggcagttaagggcccaacaaaatttatcctgggaagaaattgccaaagagtaccagaatgaagaagattccttgggcgggtctcgtgtcgtggtgtgtgacatcaacaaggagatgctaaaggttggaaagcagaaagccttggctcaaggatacagagctgctcacaagtctggagtcatccttgactgcctctggttccctcctattctgcatccaattgctcagcaaatctgtcagctctaccttcagaatacatctggaatctggccatctctgccctatctctgctaccacctccttgtccaagccaccattccttcttacctggactgctgcaatagcctctaa

SEQ ID NO: 18632 - DNA, 1545 bp, Homo sapiens
  SIMILAR (151)..(414): 531254mologous to Arabidopsis thaliana ubiquinone/menaquinone biosynthesis methyltransferase-like,accession number AB019233,Smith-Waterman Score=231.
cggcccccgggagctgtgccctatggagctattgcggccgtgggtggtcgcgggcgatgcgggactgccagctcctcgggcttcgtagctcttggcccggggacctactaagtgctcggctctttgtcccaagagaagcgggcagcggaaacgcactttgggtttgagactgtgtcggaagaggagaaggggggcaaagtctatcaggtgtttgaaagtgtggctaaaaagtatgatgtgatgaatgatatgatgagtcttggtatccatcgtgtttggaaggatttgctgctctggaagatgcacccgcttcctgggacccagctgcttgatgttgctggaggcacaggtgacattgcattccggttccttaattatgtttcagtcccagcatcagagaaaacagaagaggcagttaagggcccaacaaaatttatcctggggaagaatttgccaaagagtaccagaatgaagaagattccttgggcgggtctcgtgtcgtggtgtgtgacatcaacaaggagatgctaaaggttggaaagcagaaagccttggctcaaggatactagagctggacttgcttggttattatgagatgctgaagaactgccctttgatgatgacaagtttgatatttacaccattgcctttgggatccggaatgtcacacacattgatcaggcactccagggaagctcattcgggtgcttgaaaccagggaggacggtttctctgtctgggatttagccaagttgaacaatcccctcatatccaggctttatgatctatatagcttccagggtcatccctgtcctgggagaggtcatcgctggagactggaagtcctatcagtaccttgtagagaagtatccgaaggtttccgtctcaggaaagagttcaaggaccatgatagaagatgcaggctttccacaaggtgacttacgaaagtctaacatcagggcattgtggccattcattctggcttcaaactttaattcctttcctatcatggagcatgaaccagtcatatcctgtttgaaagcctggaactggaaggataatctggcaaatgggacagcagcagagcatcctccctcttaaagggataccgtgcccttgggactccatgtttgaatcggaaccagtctccaaagtggaagaaccaaattcttgtcacttttttacaagctttctttgggagctgcttcagtccatctcccagagggcatttgggtctgtatctttgcttcaactgcgtaatttctcttgggctgtaggggtgtgtgggttaagggtacaaccacccctaaagctcaagtttttgaagtgaagtgtatttataagccttctcctgcttggtgctgccttctaagaggggatgatagatcattttgaaccccagtgacaattttttaaaccagaaaatttaattgtacctggaatcaacctttccagcctaggaccgaatctaaggcccaagtccagagtattatatgtatcatgagaattgtgtgctgaatccagtaaacgatgttatccttttga

SEQ ID NO: 18633 - DNA, 422 bp, Homo sapiens
  SIMILAR (183)..(422): 971254mologous to Homo sapiens Phospholipid scramblase P37,accession number W31522,Smith-Waterman Score=409.
  misc_feature (1)...(422): n = a,t,c or g
gcagaagaggaagccatcgcctggccccggctctctggaccttgtctcgctcgggagcggaaacagcggcagccagagaactgttttaatcatggacaaacaaaactcacagatgaatgcttctcacccggaaacaaacttgccagttgggtatcctcctcagtatccaccgacagcattccaagattaaatctcttgatgaacagtgtgtggttggcaaaatttccaagcactggactggaattttgagagaggcatttacagacgctgataactttggaatccagttccctttagaccttgatgttaaaatgaaagctgtaatgattggtgcctgtttcctcattgacttcatgttttttgaaagcactggcagccaggaacaaaaatcaggagtgtggtagtggattagtgaaagtctn

SEQ ID NO: 18634 - DNA, 500 bp, Homo sapiens
  SIMILAR (237)..(4): 941254mologous to Homo sapiens Phospholipid scramblase P37,accession number W31522,Smith-Waterman Score=390.
  misc_feature (1)...(500): n = a,t,c or g
ntcactaatccactaccacactcntgatttttgttcctggctgccagtgctttcaaaaaacatgaagtcaatgaggaaacaggcaccaatcattacagctttcattttaacatcaaggtctaaagggaactggattccaaagttatcagcgtctgtaaatgcctctctcaaaattccagtccagtgcttggaaattttgccaaccacacactgttcatcaagagatttaatcttccagaagttcaatttgctgatgaatcagtatctgatctatcttggaatgctgtcggtggatactgaggaggatacccaactggcaagtttgtttccgggtgagaagcattcatctgtgagttttgtttgtccatgattaaaacagttctctggctgccgctgtttccgctcccgagcgagacaaggtccagagagccggggccaggcgatctcgtgccgaattcntacaggcggtcgagggggnntcaaggncnnnnnctcgtccn

SEQ ID NO: 18635 - DNA, 722 bp, Homo sapiens
  SIMILAR (322)..(477): 941254mologous to Homo sapiens hMmTRA1b,accession number AB006746,Smith-Waterman Score=253.
caaagaaacatttcatatttatatccttttttgcttaaattttcttttgggtcaattcaaataatttattaatgtctatattaatataaaatagaaattgttaaatatttcaggaaaactttctgaaatataatttctccgtacaatgaaacagtttttttcatatatctataaatagatacaggagcctccagttatctaatgagggttacatatggtgcataattttaataccatatttgtttcatcttacttcaaatttgaaagtacttttgctataagtttcctaaaagtatttaatacttttttttttcaatttagattaaatctcttgatgaacagtgtgtggttggcaaaatttccaagcactggactggaattttgagagaggcatttacagacgctgataactttggaatccaattccctttagaccttgatgttaaaatgaaagctgtaatgaaagtaggcatatgtggaaaaaatttagtgaaacaaggaaactttaccatgactcatagtaattaaattaaaccatctaatataggagtatgaagtacaataagagtgtacattcactcaagtgtgtagacctaactaccaaattacaggaaataattggatataccagtgattctgaaattgccttcacattagaaccacctagggactttaaaaaccccaaggactagtccatacctcagttcactaaatcagaaact

SEQ ID NO: 18636 - DNA, 1245 bp, Homo sapiens
  SIMILAR (430)..(717): 811254mologous to Homo sapiens hMmTRA1b,accession number AB006746,Smith-Waterman Score=435.
atgctgctccacaagctggcctctctcctgttgctattgctgctgccattcaacttcaccttcatagtactcagtgctcttctcctaacacctgctgccttcctagaagaaccagggcaaccatttattactcaagatggtcataccatcctcttggctctgtgccatgaagcccttgaccttttcaagaagcatcagtttgactttgccaccagcctgcagtttttatggcccactcacttgattccaacccaagccctaaggcagttttcccctatctcagtagatggaatatacaattgggctttacacctagacgttccattgcccagggacgagcaggagacagataccttcctcttatctcaactgcaaagacgcgttccttcctcttttactaatccccctcagtgcagaccctttacgggtgtcggactggtggacgttttaacaggttttgaaactaataacaaatatgaaattaagaacagctttggacagagggtttactttgcagcggaagatactgattgctgtacccgaaattgctgtgggccatctagaccttttaccttgaggattattgataatatgggtcaagaagtcataactctggagagaccactaagatgtagcagctgttgttgtccctgctgccttcaggagattaaatctcttgatgaacagtgtgtggttggcaaaatttccaagtactggactggaattttgagagaggcatttacagacgctgataactttggaatccagttccctttagaccttgatgttaaaatgaaagctgtaatgattggtgcctgtttcctcattgatcgcaactgctcaccagcaatggaacaaagctggatggagaattactttgacgagatgacagaaataggcttcagaaggtcagtaataacaaacttctctgagctaaaggagcatgttctaacccattgcaaggaagctaataaaaaccttgataaaatgttagatgaatggctaactagaaaaaacagtgtagagaaaaccctaaatgaactgatggaggtgaaaaccattaatgaaaagcttacaattgggaagatttcaaagtactggtcaggatttgtaaatgatgtcttcacaaatgctgacaatttcggaattcatgttcctgcagatctagatgtaacagtcaaagcagcaatgatcggtgcctgttttctctttgccttcaggcttggatcggaactacacaactag

SEQ ID NO: 18637 - DNA, 2443 bp, Homo sapiens
  SIMILAR (327)..(908): 801254mologous to Homo sapiens Phospholipid scramblase P37,accession number W31522,Smith-Waterman Score=792.
tcaagatccagagtctctgtaaattccatactttgctccatcttgcactatagttatgcttaactgcttgtattcttcaaatacaccatggccttcctttgcttgtgttgctgtcttttgcttttgaatatcttctactcttctttcaaaacttagttgagaaggcttgtcttgtgtgatgtattcaactcgatctatgaactcaacttgtcgcttcaggagagaaggacaacagggggtgggcgcagtccctcctccagctccttcaccctccagtagtctcgtgggtccccgagcgccagcgcggggaaccgggaaaaggaaaccgtgttgtgtacgtaagattcaggaaacgaaaccaggagccgcgggtgttggcgcaaaggttactcccagacccttttccggctgacttctgagaaggttgcgcagcagctgtgcccgacagtctagaggcgcagaagaggaagccatcgcctggccccggctctctggaccttgtctcgctcgggagcggaaacagcggcagccagagaactgttttaatcatggacaaacaaaactcacagatgaatgcttctcacccggaaacaaacttgccagttgggtatcctcctcagtatccaccgacagcattccaaggacctccaggatatagtggctaccctgggccccaggtcagcttacccacccccaccagccggccattccaggtcctggcccagctggctttcctgtcccaaatcaggcagtgtagtaatcagccagtatataatcagccagttggagctgcaggggtaccatggatgccagcgccacagcctccattaaactgtccacctgggattaggaatatttaagtcagataggttcagatactgatttcatcaggcaaatttgaacttctgggaagttttaacaggttttgaaactaataacaaatatgaaattaagaacagctttggacagagggtttactttgcagcggaagatactggattgctgtacccgaaattgctgtgggccatctagaccttttaccttgaggattattgataatatgggtcaagaagtcataactctggagagaccactaagatgtagcagctgttgttggtccctgctggcttcaggagatagaaatccaagcttcttcctgtggtaccaataggttatgttattcagacttggcacccatgtctaccaaagtttacaattcaaaatgagaaaagagaggatgtactaaaaataagtggtccatgtgttgtgtgcagctgttgtggagatgttgatttttgagattaaatctcttgatgaccagtgtgtgggttggcaaaatttcccaagcactggactggaattttgagagaggcatttacagatgctgataactttggaaatcaagttccctttagacccttgatgttaaaatgaaagctgtaatgattgggtgcctgtttcctcattggacttcatgttttttggaaagcactgggcagccagggaacaaaaattcaggagtgtgggtagtgggatttagttgaaagtctccttcagggaaatctggaagtctgtaatattgattgagactatctaaaacctcatacctggtatggaattaaagctgttaaggccctgtagctcctgggtttgtatactttttgctttttccaaatttatagtttatcttctgtataactgatttataaaggtttttgtacatttttttaatactcattgtcgaatttgagaaaaaggacgatatgagtttttgcatttattaatgaaacttcctttgaaaaactgctttgaattatgatctctgattcattgtccattttactaccaaatattaactaaggccttattaatttttatataaattatatcttgtcctattaaatctagttacaatttatttcatgcataagagctaatgttattttgcaaatgccatatattcaaaaaagctcaaagataattttctttactattatgttcaaataatattcaatatgcatattatctttaaaaagttaaatgtttttttaatcttcaagaaatcatgctacacttaacttctcctagaagctaatctataccgataatattttcatattcacaaggatattaaaattaccaattttccaaattattgttaggtaaaggaacaaaatggattgctctccccaaaggaaaggacacatttttaaatactccttcactctaaaactgtggtattataacttttgaaagttaatatttctacatgaaatgtttagctcttacactctatccttcttagaaaatggtaattgagattactcagatattaattaaatacaatatcatatatatattcacagagtataggcctaaataatgatctattagattcaaagtatttgaaataaaaacttgatttttttgtaaaaaaaaaaaa

SEQ ID NO: 18638 - DNA, 230 bp, Homo sapiens
  SIMILAR (73)..(165): 381254mologous to Proteus vulgaris frdB (AA 1-245),accession number X06144,Smith-Waterman Score=70.
catgctgtctgcctggcagctgtgcatttctctagctgggctctgaacaactcagaaacattcaactcgatctggagctgtgcctcagcaattctcggtaacctgggcattctcacgggttccccacctcttgctctatgcaggacactttgtctaacatatcccatctgatgccccagggatgccaaggcacttaggagacccagagagtgtgtaatccgacatgacag

SEQ ID NO: 18639 - DNA, 1659 bp, Homo sapiens
  SIMILAR (753)..(109): 561254mologous to Escherichia coli NADH dehydrogenase I chain nuoL,accession number D90859,Smith-Waterman Score=472.
atgaccattcccatcgcacccgcgaggatctcatccttactgaagaagcccgcagtgacagcggtagtgccgacagtgctgcgccgcccaccaggaagcagagataaacagcggaatagatttacgcagaccgcccatcttgaagatgttctgttcggatggcaggccagaatgacggaaccggatgccaggaacagcagcgctttaagaacgcgtgggtcatcaagtggaaaatcgccgcatcccatgcctgcagccaagcgcgaggaacatgtagccaatctggctcatgcgcggaaaaaccggccagcagagcgtaaccgccccgacaatacccaccagatgcagaacttccggcgtcatcaggaacaggccgttggtacgggcgatcaggtagacacccgcggttacatgcgttgcggctttgatcagcgcggagacaggcgttggggcccgccatgccgtcgtcaagccatgtctgcaagtgcaactgcgcagatttaccgacggaccgcccagcagcatcagcgtcgcccacatcagcatgttattgccgtcgcaaatgcgctggtgccagttccaccatttcgcggaagttcagggtgccagttcgttgtaaagaatgaacagtgcgaaagcgaggaacacgtcaccccacgggtcacgacgaacgctttcattgccgtgcgccattcttcggatcgtgtaatagaacccgatcagcagataggagcacaggcccacgccttcccaccgagtggagatgttgacgctggtgtttctggtgctctggatgtgtgtgttcaccaggacccgggctccaaggccgtcgccgaccgctacgctgtctactggacagcagcaaccccagtgggttcaaggtgccagaaatttgatctaatgccgggttacgtcatgtgtgcagaacaagctgccagagtggccgagccaggagctgtcatgtcggattacacactccttgggtctcctaagtgccttggcatccctggggcatcagatggcggggcgacccccagaaatctcagaggagtcgtaagtgctgcgtaccgggcggtgcgccgagaagggtggggatccggagccgcaacccagcttgtcggtgtcctggaactggttaagcggcagctgcgccggctttcgagcggtcttgcctcgaaaacctcaaagaaaagtttggctcttcgcgtcttcggcaggcacagcagcaacagagccccctcgttaatgacttgcgtggaaagccgacagcggcggcgacccatggcagcagcctcagcagagcgcgaggccgcacgcgtgaacgtggacgtggcggggggatggggctccgcccgggcgtgttgcgcgggacgcgggacggcgggcggcgcgagcgcgggtgtgagctccggacgaagcagggggagtcctcagacgggattccaggcgcttcagagctgtttagaagcgtccagacgccctccagtggtggcctgcaatccgcacccagcaggggcattgcctgccgctcaggccggaaacagggctaccttgatgactggcagctgcctgcagatgcctataatgtatgaagaagcccagttgagactagaagaactgtgcaccaaagcccgcctaaactgccaatggttcttgtaa

SEQ ID NO: 18640 - DNA, 1656 bp, Homo sapiens
  SIMILAR (1087)..(1653): 961254mologous to Escherichia coli hyaD protein,accession number M34825,Smith-Waterman Score=950.
atgtgtgtgaaagccacatctttcacaaacattacctgcctgtcacggtatcagggcttggccgaaggccttagtgttggttcagtaatatcggctttctctagaagcaggccttctgggggtccagagtttacaataagacccttttatacttcaaatgtcagcaaaacattcagactagctcttcccaaaacacgaaggggctacgttcccaagcaagatttgagttttatgttcacaattgacttgtttcagagtgaccaggtggccaaagtgcctctgaaaaccccctcagggcctgaggaaatttgtgttggcaattatgttagtcattttgcaggtgaaagtatatcagtgggggttcgttgtaccgtggcgtttgcccaggccgtgttcgatggcgaaatgacggtcgaaggcgtcactgctcgcctggcaaccagctctgcggaagcgatgaaacttaccgaacgcggattctctgaacagcgccagtgggcaagtggtgagcaggcacttggcaaagggcgaatctctaccgccacaggagaacgcgttaacgccgcgcagcgccgacgcctggcgattgcgcacaaatcccagctctgcaattttctgagactctggtttgtaaacggcacgtttgagtttctcaataaacggtcgaccgctgttgatacagaacatcccctgctcgcccagcggcggattaccttttactgcgaggatatatttgccattgtattgcgtgatgatgtcttcaaagacttcttccgcctgggttccggcggcagccatcaaagtatcgtcgtaatcgagggaaatcagggaaaggatgacgtccttcgccagtggcgacgtggcagccagactacaatatttgagaaagctgcgccgggtaacgccctgacgccgcatggcctggtaaaatgtttcctcgttattcatatcgcacgtctctcctccttgcgacaccggcaggacaccgggcgcttatggtcggcaagcgacgtccctgtagcaaggcaaaccatcgcttcacgtgagatgctgaaaacgaaagctcatccttctgcactggcgcacgtcgccagaaaggtgggcaacctgctgtggcccgatgaaggtttcggcgtgcgggtgggggaccggctgtatgcccattaccactggcccgagtatgtggagattgtcgatggcggtactcagggactgaacttgctggggtatgtcgaaagcgccagccatctgttgattctcgatgccattgactacgggctggaacctggaacgctgcgaacctatgccggagaacgcattccggcttatctcagcgcgaagaaaatgagcctgcatcagaacagtttctccgaagtgttggcgctggcggatatccgcggacatctgccagcacatattgccctcgtcggtctgcaacccgcaatgctcgacgactacggcggtagcctgagcgaactggcacgggagcaactgcccgctgcggaacaggcggcgctggcgcagcttgctgcgtggggaattgtgccgcaaccggctaatgaatcgcgctgtctcaattatgactgtctgtcgatggaaaattacgaaggcgttcgcttgcgccagtaccggatgacacaggaggagcagggatga

SEQ ID NO: 18641 - DNA, 2772 bp, Homo sapiens
  SIMILAR (1921)..(2208): 291254mologous to Homo sapiens salivary proline-rich protein precursor,accession number K03208,Smith-Waterman Score=104.
atggctagtatggtgcaggtaaatttaggaagaaacaattttagcagagatccgttttccctgcataacactgtggatggagtggtggacgcaggctccactgcacgcactgctcacagatgccgattcgctcacattgaaaaggtcctattccagctccaggatcctccttttctgaagagcctgtccctgcatctctttggcagtcatgttctgactgcggcctggtgctcccctaacctgcatggaataaatttaaagctaagagataacatattgttgttctctagaagcaggccttctgggggtccagagtttacaataagacccttttatacttcaaatgtcagcaaaacattcagactagctcttcccaaaacacgaaggggtcaagttgaagggtacggtcacctgcagggaacaggaccaagtgtgttcattgagcattttgctgttttacatgacctcgccataaaggagtgtctctacgagaaaggaaaaacctgtttcataacgcagtgcagagctttgttttctctcgtcagggtgacagccctttggttcctgccagtgggtatgcgacaggaagttcccaacccttgccgccctgggccccattcttggattagttctcaggcagctgaaaatactgatgtgctacttcctgttgagagagagagagaagagagagtgcacccgtgcaactgcaacagacagatatatatgaaagagtcaaatgatggtttaagaagaagagtcacaacgaatgatcagaaaataaagccccagacagcagaagttaccatgaagaagggttttggaggcaatgggacccagcagggctgcaaaggatatgttagacaaagtgtcctgcatagagcaagaggtggggaacccgtgagaatgcccaggttaccgagaattgctgaggcacagctccagatcgagttgaatgtttctgagttgttcagagcccagctagagaaatgcacagctgccaggcagacagcatgtgtcctgtttggtagggaagaatatggagatcggcagggagttgctaaagtagatcagaaaaaattcttgtatggatccctcaatctggactccaggcacagagccataggtactaaccaatccctttttacatttgagaggtgctatttctgcatgggtcaggcaaccccatgggtgctgaaggatctggacagcataggaggcctgggaaggtggctgctcattcctcatggccagagccagaactcagggcagcaatgcctgatcccaggacaaggcccaggccactgccaggactctcacagggacatccctacgcagaggcatcctacatcagaggactggcccttctcccttccctcttaccactgtggaagcctgggacccaacaggcttgaaatgagagctgaagagattgaatttgatgactgtgagatagagaaagatgtgggtgctcgctgtcatgtcggattacacactctcttgggtctcctaagtgccttggcatccctggggcatcagatggcctggcagcaccaggaacctgtgttcccaagaaatggaagaggccagcagggaagcacccatgggtctgctccaagcccttcctgggcagggcttcccggcagagttacacaacagctgatacatctgtgcacactcccggagcctccactccgacaggagctaaattcatccatcagtgagaaaacaaaacagatatatatgaaagagtcaaatgatggtttaagaagaagagtcacaacgaatgatcagaaaataaagccccagacagcagaagttaccatgaagaagggttttggaggcaatgggacccagcagggctgcaaaggtgctgagtgtctgtgtaagaagccggattggcccattaatttgttctcaacgccatccagcaacgagcaagacaaaaccacagggacgcccccccggcgaacaggggacgcccagggacaacccaaggagaaacaaccggccggccagaagcgcaacaccgcgaggggcacgcaaggagcacccccacgacccggggaggagccaaacgccccacagaccatcgacaagggcccccccagccccccgagccgcgggcacacgagacggctagcgagaagcgggaaccaaccgccagaaagacacacaccagccgcaggcggaaagacacgatatgttagacaaagtgtcctgcatagagcaagaggtggggaacccgtgagaatgcccaggttaccgagaattgctgaggcacagctccagatcgagttgaatgtttctgagttgttcagagcccagctagagaaatgcacagctgccaggcagacagcatgtgtcctgtttggtagggaagaatatggagatcggcagggagttgctaaagtagatcagaaaaaattcttgtatggatccctcaatctggactccaggcacatgcgtgcccctctgaagcgcataaaatgccggggaatcccagagatgggggggcggggatttgcaaatcttcgccgggcggaaagggtgagcggcgaaaagtggagggggggtccaccacccgcgcggggaccagcagagacagcgtgtcaaagaggcacgcaaacacgatgggagaacaggcacaaggtgagaaacacccgagagggacggtgtagaaaacaaaacgacggggaccaaagggccaaacccgaggcacaaaagcgccggaagaagaaacgagccgagaaccaccatgcacgggacccataa

SEQ ID NO: 18642 - DNA, 532 bp, Homo sapiens
  SIMILAR (220)..(273): 1001254mologous to Homo sapiens apolipoprotein,accession number X04898,Smith-Waterman Score=84.
acaccaaggacagagacgctggctaggtaagataaggaggcaagatgtgtgagcagcatccaaagaggcctgggcttcagttgtggagagggagagagccaggttggaatgggcagcaggtagggagatccctggggaggagctgaagcccatttggcttcagtgtcccccaaacccccaccacccttttcctaggccgccctccccactgttaccaacatgaagctgctcgcagcaactgtgctactcctcaccatctgcagccttgaaggtgggtgtgatatggagagggggccaaaagggagaatgtgctggtggttatagctacctatctgcctgtgctcttatatccagggctggcaaccaaagggctcaaaaggaagatcattccctctctaaagcccagaaagcccatccaaagatctggctggatacctttttggggagggggcagagagctggggtgggtactggcacaggtttggcgggaggccgggatccattggtggggccccctctaaaaaagtggtgg

SEQ ID NO: 18643 - DNA, 719 bp, Homo sapiens
  SIMILAR (189)..(533): 441254mologous to Homo sapiens prepro-apo AII,accession number X00955,Smith-Waterman Score=111.
ggaggcaagatgtgtgagcagcatccaaagaggcctgggcttcagttgtggagagggagagagccaggttggaatgggcagcaggtacggagatccctggggaggagctgaagcccatttggcttcagtgtcccccaaacccacaccaccctcttcctaggccgcccttccccacttgttacccaaccatgaagctgctcgccagccaactgtgcctactccctcaccccatcctgcagcccttgaaaggagcctttggttcgggagacagggcaaagggagcccatgtgtggagagccctggtttcctcagtacttcccagacccgtgactgacttatgggcaaggaccctgatggagaaggtccaagaaccccagagcttaacttcaggcccgaggcacagttcttactttgaaaagtcaaaggagcagcttgacacccctggattcaagaaaggctgggaacgggaactggttaaactttctttgagcttattttcgtgggaacttgggaacacaagcctgcccacccagttgaaagtgttccaagaccatttggtctttccaaaccccaggctgggcctcttaggaacaccccactgggcccagttccttaggaggttcttgttccctaacccatttttttgttaacaataaatagcagcatgaaacatcatgttggttcagtcagtcgacatctatgctacaagcactagtgcg

SEQ ID NO: 18644 - DNA, 317 bp, Homo sapiens; identical to SEQ ID NO: 16837
  SIMILAR (38)..(148): 351254mologous to Bacteriophage fr lysis protein (AA 1- 71),accession number X15031,Smith-Waterman Score=61.

SEQ ID NO: 18645 - DNA, 449 bp, Homo sapiens; identical to SEQ ID NO: 16836
  SIMILAR (58)..(324): 971254mologous to Homo sapiens Human secreted protein, SEQ ID NO: 5727,accession number G01646,Smith-Waterman Score=468.
  misc_feature (1)...(449): n = a,t,c or g

SEQ ID NO: 18646 - DNA, 560 bp, Homo sapiens; identical to SEQ ID NO: 16838
  SIMILAR (1)..(216): 481254mologous to Drosophila melanogaster BcDNA.LD03471,accession number AF160909,Smith-Waterman Score=189.

SEQ ID NO: 18647 - DNA, 1044 bp, Homo sapiens
  SIMILAR (79)..(978): 591254mologous to Drosophila melanogaster BcDNA.LD03471,accession number AF160909,Smith-Waterman Score=986.
atgctcccagcagagatgattgaactgttgctcggggtagggcccccagaagtgtggttcatcaaccctgactggtgggtgtcagtaattaacactgtggatacctcccatgaggacatgattcacgacgcccagatggactactatggcacccgcctggcaacctgctcatcagacaggtccgtcaaaatctttgatgtgcgcaatggagggcagatccttatcgccgacctcaggggtcatgagggtcctgtgtggcaagtggcctgggctcaccccatgtacggcaacatcctggcatcgtgctcctatgaccggaaagtcattatctggagagaggaaaacggcacctgggagaagagccacgagcatgcgggacacgactcctcagtgaactcggtgtgctgggccccccatgactacggcctgatcctggcctgtgggagctcggatggggccatctccctgctgacttacaccggggaaggccaatgggaagtaaagaagatcaacaacgctcacaccattggctgcaatgccgtcagctgggcccctgctgttgtacctggaagcctcatagaccacccatcggggcagaaacccaattacatcaagaggtttgcatcaggtggctgtgacaacctcatcaagctgtggaaggaggaggaggacggccagtggaaggaggagcagaagctagaagcgcacagtgactgggttcgagatgtggcctgggccccctccatcggcctgcccaccagcaccatcgccagctgctcccaggatggtcgtgtgttcatttggacctgtgatgatgcctcaagcaatacgtggtcccctaaattgttgcacaagttcaacgatgtggtgtggcatgtgagctggtccatcacagccaacatcctggctgtctctggtggagacaataaggtgaccctgtggaaggagtcagttgatgggcagtgggtgtgcatcagtgatgtcaacaagggccagggctccgtatcagcatcagtgacagagggccagcagaacgagcagtga

SEQ ID NO: 18648 - DNA, 941 bp, Homo sapiens
  SIMILAR (462)..(776): 1001254mologous to Homo sapiens Human secreted protein, SEQ ID NO: 5727,accession number G01646,Smith-Waterman Score=574.
cgtatatttgtaccatgacgaccgcccgaattcccggtcgacgatttcgtgccgccgggagctgccacgtccgagacctgttcagctaccgccgcaatcatggtgagtgttggtactgaggaggcctagcagggtgaaggccacggtcgcggccttcacgggttcctcggccgtcctgagtcccaaatcccaagctggagccgttcagctcccctccaccgcttaaagatttggggggctctggccccgtccttgcggaccattccgaggggagtccagaggtgaggccgaggaacctccctgactttgcggggcgcgccgctcctgcgtctcctgccagtctcccttccttcttttcgggcaacaattgaaaacaaaacgaggaacagcagaggagctactgtataccgagccctcagcattgttcgtaatctccgcctgctaacagccttgtgaagaaggtgtcagtaattaacactgtggatacctcccatgaggacatgattcacgacgcccagatggactactatggcacccgcctggcaacctgctcatcagacaggtccgtcaaaatctttgatgtgcgcaatggagggcagatccttatcgccgacctcaggggtcatgagggtcctgtgtggcaagtggcctgggctcaccccatgtacggcaacatcctggcatcgtgctcctatgaccggaaagtcattatctggagagaggaaaacggcacctgggagaagagccacgagcatgcgggacacgactcctcagtgaactcggtgtgctgggctccccacccgccagctccaggactgccccttcctgggccaactaaccagacaactgggaagagcccccaactccaacaggattattttcccaggaggagttacagatgcagccacagattgatcatctgccttaacgtgatcggagat

SEQ ID NO: 18649 - DNA, 1428 bp, Homo sapiens
  SIMILAR (1081)..(1425): 1001254mologous to Plasmid F Protein D,accession number M12987,Smith-Waterman Score=584.
gaagtaaagaagatcaacaacgctcacaccattggctgcaatgccgtcagctgggcccctgctgttgtacctggaagcctcatagaccacccatcggggcagaaacccaattacatcaagaggtttgcatcaggtggctgtgacaacctcatcaagctgtggaaggaggaggaggacggccagtggaaggaggagcagaagctagaagcgcacagtgactgggttcgagatgtggcctgggccccctccatcggccctggccaccaagcaccatcgccagctgctcccaggatggtcgtgtgttccatttggaccctgtgatgatgccctcaagcaattaccgtggtccccctaaattgtttgcacaagttcaacgatgtggtgttgggcatgttgaactggggtccatcacagccaacatccctggctgtctctggtggagacaataagaatgggactaatacagtctgccctacaggatggctgcaagattcaaacacgctagtgcatctggtgacctacaaaatgccacgcagcctgggcctgggcttcctatggtgccagctgctgtcgccaagaaaataccgagaaggaactagtcccgtgtcactctgggttggtgaagtgtggttcatcaaccctgactggtggggctcaattcgtgtctaccaccccagcccctcaggctcctacaggacacacaaaccaccattaaataatttatcttgcgacactagcattattcgcgagcttctcaagggcaaaaagttcctcttatttgtgtctgtatatccagttcctagcacagtgcttggcagaaagaaggtgtcagtaattaacactgtggatacctcccatgaggacatgattcacgacgcccagatggactactatggcacccgcctggcaacctgctcatcagacaggtccgtcaaaatctttgatgtgcgcaatggagggcagatccttatcgccgacctcaggggttggcccagggcttcccggtatcaacagggacaccaggatttatttattctgcgaagtgatcttccgtcacaggtatttattcgcgataagctcatggagcggcgtaaccgtcgcacaggaaggacagagaaagcgcggatctgggaagtgacggacagaacggtcaggacctggattggggaggcggttgccgccgctgctgctgacggtgtgacgttctctgttccggtcacaccacatacgttccgccattcctatgcgatgcacatgctgtatgccggtataccgctgaaagttctgcaaagcctgatgggacataagtccatcagttcaacggaagtctacacgaaggtttttgcgctggatgtggctgcccggcaccgggtgcagtttgcgatgccggagtctgatgcggttgcgatgctgaaacaattatcctga

SEQ ID NO: 18650 - DNA, 1617 bp, Homo sapiens
  SIMILAR (660)..(1091): 341254mologous to Drosophila melanogaster BcDNA.LD03471,accession number AF160909,Smith-Waterman Score=127.
cgtcccatggtgaaggttggtactgaggatgcctagcagggtgaaggccacggtcgcggccttcacgggttcctcggccgtcctgagtcccaaatcccaagctggagccgttcagctcccctccaccgcttacagatttggggggctctggccccgtcccttgcggaccattccgaggggagcccagaggtgtcagtaattaacactgtggatgcgctcccatgaggacatgatttattgacgcccagatggactactatgggcacccgcctgggcaacctgcttcatcagacaggtccgtcaaaatcttttgatgtgcgcaatgggagggcagatccttattcgccgaccttcaggggtcatggaggggtcctgtgtggcaagttggctgggggttcaccccattgttacgggcaacatcctgggcattcgttgcttccttattgaccggaaagttcatttattcttgggagagagggaaaacgggcaccctggggagaagagccacgagcaatgcggggacacgactcctcaagttgaacttcgggtgttgctgggccccccatggacttacggtcctgattcctgggcctgttgggtagtctcggatgggggccatcttccctggctggactttacaccgggggaaggccaatggggaagtaaagaagatcaacaacggtcacaccattggcttgcaaatgccgtcagctgggcccctgctgtttgtacctggaagcctcatagaccaccccatcggggtcagaaacccaattacatcaagaggtttgcatcaggtggctgtggacaacctcattcaagctgtggaaggaggaggaggacggccagtggaaggaggagcagaagctagaagcgccacagtgactgggtttcgagatgtggcctgggccccctccatcgggcctgcccaccagcaccatcgcccagctgctcccaggatgggtcgtgtgttcatttgggacctgtgatgatgcctcaagcaatacgtggtccccttaaattgttgcacaagttcaacgatgtggtgtggcatgtgagcttggtccatcacagccaacatcctggctgttctctggtggagacaataaggtgacccctgtggaaggagtcaagttgatgggccaagtgggttgtgccatccagtgatgtcaaacaaaggggcccagggctcccgtatcagcaatccagtgacatgagggcccagcaagaaacgagcaagtgaacaaagaccagggtggggccctggctcccccacccgcccagctcccaggacctgccccttccccgggcccaactaacccagacaacttgggaagagccccccaactcccaacagggattattttccccaggagggagttacagatgcagcccacagattgatccatctgcccttaactgtgatctgagatgctttgtaatctactgtccgagctggaaacagctcatgttacgcggaaaaaactacaagtaatgttcaaatctattttgggtcatttttatgtacctttgggttcaggcatttatttgggggggttttgtttccaaaggaactaaataaagtcgatattgcttataaaaaaaaaaaaaaaaaaa

SEQ ID NO: 18651 - DNA, 926 bp, Homo sapiens
  SIMILAR (611)..(420): 1001254mologous to Homo sapiens Human secreted protein, SEQ ID NO: 8009,accession number G03928,Smith-Waterman Score=345.
ctccatcagcatcgtcatccccggctcggatcccggccgcgacccgccagggccgccggagtccgcgaataccgcccgctcccagcaacgaagctccccggctcccggccgaccgcgagttcctggagcagcagcctccaaggttcccaaagcccacgattcaggcgagcggtgccgaccgggccgtggactgtggcattttaaaactacagaagtctcactgcacgactggcgcggccgaggtggcccaggagaccctccaagagattctggtcagctgccgggagcgtggaagagcaaccaaagccaccaaggcgccgcgccaagtccccggagcagtcacctcagctttccgttctccctctagttacaattactccacaggcttctggcgcttccttcgagaaaatgaaaaactaaaaacgcgtagaggtggtagaagtcgttggcattttccgtttaatgtgatcccccaggctccatcccttaagtggggtttccaaactcggatgcatcctcagcagaggttttccatgttgacagatctctcgcctcccacaaaatggggccggggaggcggccgcggtctcctctatgggcgccgccattttggaatccccggcactgacggttacgtaaggggctgtgcgcaagtgcggcgtttagggaatccgcacagcccgggccacgcagctccgaggcccacatctccacttcccctaagaggaccgatgggggaagggacagctgaccgggtcttcctcgcagcagcctcacccctagtcttccgcggccggcgagcttctccacctccccgggccgggtctccgcccctcacaggcttccgagacactcactggccctgggttgtcaggatcttcctagccacaaccttattccgaccccacttaagagacaaactttag

SEQ ID NO: 18652 - DNA, 399 bp, Homo sapiens
  SIMILAR (181)..(2): 831254mologous to Homo sapiens Human secreted protein, SEQ ID NO: 8009,accession number G03928,Smith-Waterman Score=294.
atggggccggggaggcggccgcggtctcctctatgggcgccgccattttgtgaggcggcggcggcgcggcggcaggagcccgggggaatccccggcactgacggttacgtaaggggctgtgcgcaagtgcggcgtttagggaatccgcacagcccgggccacgcagctccgaggcccacatctccacttcccctaagaggaccgatgggggaagggacagctgaccgggtcttcctcgcagcagcctcacccctagtcttccgcggccggcgagcttctccacctccccgggccgggtctccgcccctcacaggcttccgagacactcactggccctgggttgtcaggatcttcctagccacaaccttattccgaccccacttaagagacaaactttag

SEQ ID NO: 18653 - DNA, 422 bp, Homo sapiens
  SIMILAR (263)..(391): 341254mologous to Homo sapiens Secreted protein encoded by gene 182 clone HFXHN68,accession number W88715,Smith-Waterman Score =65.
acactagtatcactccaagtctttagcctttgatacttgctctgaaaacacactatcgtatgtttgtgtatgtacacacacacacacaacagtgacttaaaagtggcaaccgcctcttgaaaagtaaaaatatgtcatccctccattctgcccttaaatgagaaataaagacaatagatttgcccactgcagactgggataccagaaaagacgttctaagtctcgcctgagacaatattaacctgctatcttaagtcccaacttggatgacttaaatttcagtgtacgtgcctccgttcccactcttgccccatcagctccatcagcatcgtcatccccggctcggatcccggccgcgacccgccagggccgccggagtccgcgaataccgcccgctcccagcaacgaattccacgactcta

SEQ ID NO: 18654 - DNA, 1316 bp, Homo sapiens
  SIMILAR (1105)..(797): 911254mologous to Homo sapiens Human secreted protein, SEQ ID NO: 8009,accession number G03928,Smith-Waterman Score=514.
ggcacgagaaaaaaaacaaaaaacaagaaggcaaaacaaaaatattcccagacagataaacaaaactcagagaatttgttgctagcagtcatgccttacaatgacacaggattttttttggcccctttgccagggtcacagcaggggggcaccctgtctacttgtcccacctgggctaagtctgacttgtgcaccagcacagcctgcagctagaccaggggtgtcccagctcacctgtgctatagcttgtacccacattcagtggttcccaagctcttgtcccccatccgagaagaatggggatacactgacagttgaagactccatcagcatcgtcatccccggctcggatcccggccgcgacccgccagggccgccggagtccgcgaataccgcccgctcccagcaacgaagcttcccccgctcccggccgaccgcgagttcctggagcagcagcctccaaggttcccaaagcccacgattcaggcgagcggtgccgaccgggccgtggactgtggcattttaaaactacagaagtctcactgcacgactggcgcggccgaggtggcccaggagaccctccaagagattctggtcagctgccgggagcgtggaagagcaaccaaagccaccaaaggcgccgcggccaagtccccggagcagtcacctcagctttccgttctccctctagctacaattactccacaggcttacggcgcttccttcgagaaaatgaaaaacctaaaaacgcgtagaggtggtagaagtcgttggcattttccgtttaatgtgatcccccaggctccatcccttaagtggggtttccaaacatcggatgcatcctcagcagaggttttccatgttgacagatctctcgcctcccacaaaatggggccggggaggcggccgcggtctcctctatgggcgccgccattttgtgaggcggcggcggcgcggcggcaggagcccggggtgtgtataatggttgaatagaatgaccccctccagggaatccccggcactgacggttacgtaaggggctgtgcgcaagtgcggcgtttagggaatccgcacagcccgggccacgcagctccgaggcccacatctccacttcccctaagaggaccgatgggggaagggacagctgaccgggtcttcctcgcagcagcctcacccctagtcttccgcggccggcgagcttctccacctccccgggccgggtctccgcccctcacaggcttccgagacactcactggccctgggttgtcaggaacttcctagccacaaccttattccgaccccacttaagagacaa

SEQ ID NO: 18655 - DNA, 411 bp, Homo sapiens
  SIMILAR (292)..(348): 941254mologous to Homo sapiens polyamine modulated factor- 1,accession number AF141309,Smith-Waterman Score=89.
ggcacgaggaggattgaagggccactttggggacccttgctgaagatgatgggctctgctctggggatgcccagcctaggtggtcacagaacccagcttgctataaatacttgccgaatggtggggacttcctgatgtgccttcatcctaacatgctctgcagggcccatgacttagccacagactccatccatattgtcctgggggaaaccccaggcctggagtcagggacagtggagggcaaggatttgggttttcttagatcccagtttgtctgttgtctcccattgatttcaggctctacacagagaacagagggagctggttgctgtgctgagggagcctgagtgaggagaccgccagccccagaagcagagggcagtcaaggtcaagagcctgtggtccagcatg

SEQ ID NO: 18656 - DNA, 487 bp, Homo sapiens
  SIMILAR (32)..(277): 1001254mologous to Homo sapiens polyamine modulated factor- 1,accession number AF141309,Smith-Waterman Score=416.
gttgattaccgtggtgaagctcctcgacaccatggtggacacttttcttcagaagctggtcgccgccggcagctaccagagattcactgactgctataagtgcttctaccagttgcagcctgcgatgacacagcgaatctatgacaagtttatagctcagttgcagacatctatccgggaggaaatctctgacatcaaagaggaggggaacctagaagctgtcttgaatgccttggataaaattgtggaagaaggcaaagtccgcaaagagccagcctgcaacgggacaccctgcggcgccatgtgcagaaacaggaggccgagaaccagcagctggcagatgccgtcctggcagggcggaggcaggtggaggagctgcagctacaggtccaggcccagcagcaggcctggcaggctctacacagagaacagagggagctggttgctgtgctgagggagcctgagtgaggagaccgccagccccaat

SEQ ID NO: 18657 - DNA, 511 bp, Homo sapiens
  SIMILAR (8)..(406): 691254mologous to Homo sapiens Human secreted protein, SEQ ID NO: 4857,accession number G00776,Smith-Waterman Score=405.
  misc_feature (1)...(511): n = a,t,c or g
cttcaacatggccgaagcaagtagcgccaatctaggcagcggctgtgaggaaaaaaggcatgaggggtcgtcttcggaatctgtgccacccggcactaccatttcgagggtgaagctcctcgacaccatggtggacacttttcttcagaagctggtcgccgccggcagctctccactccttcattgggacggaagtgctggtccccgcctgccctctggtggacagtctgtgaaacaggccttcagttgggcggcgtgcaggttaccacaggggaggaaggaggaaatctctgacatcaaagaggaggggaacctagaagctgtcttgaatgccttggataaaattgtggaagaaggcaaagtccgcaaagagcccagcctggcgccccagcgggatcccagagaaggatctgcacagtgttatggcaccctacttcctgcagcaacgggacaccctgcggcgncatgtgcagaaacaggaggccgagaaccagcagctggcagatgccgt

SEQ ID NO: 18658 - DNA, 1218 bp, Homo sapiens
  SIMILAR (1)..(159): 1001254mologous to Homo sapiens Human secreted protein, SEQ ID NO: 4857,accession number G00776,Smith-Waterman Score=261.
  misc_feature (1)...(1218): n = a,t,c or g
gccgaagcaagtagcgccaatctaggcagcggctgtgaggaaaaaaggcatgaggggtcgtcttcggaatctgtgccacccggcactaccatttcgagggtgaagctcctcgacaccatggtggacacttttcttcagaagctggtcgccgccggcagctctccactccttcattgggacggaagtgctggtccccgcctgccctctggtggacagtctgtgaaacaggccttcagttgggcggcgtgcaggttaccacaggggaggaagctaccagagattcactgactgctataagtgcttctaccagttgcagcctgcgattgacacagcgaatctatgaccaagtttatagctcaagttgcagacatctatccgggaggaaattctcctngacaatcaaaagnaggaaggggaacctaggaagctgtcttggaatgccttgggataaaaatttgtgggaacgaagggcaaagtccgcaaagagccagcctggcgccccagcgggattcccagagaaggatctgcacagtgttatggcaccctacttcctgcagcaacgggacaccctgcggcgccattgtgcagaaacaggaggccgagaaccagcagctggcagatgccgtcctggcagggcggaagccaggtggaggagctgcagctacaggtccaggcccagcagcaggcctggcaggctctacacagagaacagagggagctggttgctgtgctgagggagcctgagtgaggagaccgccagccccagaagcagagggcagtcaaggtcaagagcctgtggtccagcatgcctggcctgggcgggctacctctgagaacggcttgaaatggtgcccagtccatcagcagtgatggaatttgctggaggacttaggccagagcaagcctcactgccacttgtgcctttggggcacccttggggtctggacatacaccccctttaagattcctctgtttcttctacctggataattcttggccatgttctctcttctctaggttcaggtcagctctgcccctccgcccacaccgcgtgtggttccccagcccttttccctggccctggcttggagaatctgttttcaatctccactgattgcccccttgctggccaagcccaggggcctttaccatgttctctccacatccgtaaataaacttccttcactacactgtaaagaaaaaaaaaaaaaaaaaaac

SEQ ID NO: 18659 - DNA, 421 bp, Homo sapiens; identical to SEQ ID NO: 11561
  SIMILAR (1)..(177): 1001254mologous to Rattus norvegicus tropomyosin,accession number L24775,Smith-Waterman Score=296.

SEQ ID NO: 18660 - DNA, 2590 bp, Homo sapiens
  SIMILAR (839)..(1444): 571254mologous to Rattus sp. tropomyosin 5; TM-5,accession number S82383,Smith-Waterman Score=435.
  misc_feature (1)...(2590): n = a,t,c or g
atgaatgctgggagacgtggattctggtgtttagctcagggagcttctgcacgacagaggaaagttggtggggaaatggaaaagtacagagacacctgggagagggagaagtggctcagaggagacgtggagggcaggtatgtaatgcaagaaagccaggcgagagtgacagaggtgcaaggaggcaaaagaggcagaaacagaaatgccagagaggcgtttacagagattgacaaacaaagagggagaagctgcaagaaagaagcaggagtggagaaatggacagagacaatgggaagggaaagaagagagaggaaagactggaacagtttggagagcttagaagaagacaggaagatgagagaaagtttggaacatgctagagacttgttaaattgttgtgaccaaaatgctgatcatcatatggacagtgaagtccaggctgaggtggtctcagaaggagatgaagaacttattgggaaatggagtaaagcatactgccataggtgtgagcaaaaagatgatctgaaatgggaacttatatttaaaagggaagcagagcataaaagtttggaaattttgcagcctgaccatgtggtagaaaagaaaaacccgggaggaggcaggaaccagagcacgagcagttagctgggtgggcaccatgagctgggatcaccaccatcgaggcggcgaagcgcacgattcaggttctgcatctacaggcaaatgatgcacaggagcgagcttgagcgctcccagcgagagtttagggaagaaaggcgggcccgggaaccaggcctgaggctgaagtagtccttcttgaaccgtaggatccagcgtggttgaagaagagcttggaccgtgctcaggagcgccttggccacttgccttgcaaaaagctttgaagaagctgaaaaaagcttgctgatgagagtgagagaaggtattgaaggttatttgaaaacccgggccttaaaaagattgaaggaaaagattggaacttccagggaaatcccaactcaaaagaagcttaagcacatttgccggaaagaggcagattaggaagtatgaagaggtgggctcgtaagttgggtgatcatttgaaggaagacttggaacccacagaaggaacgagctggagctggcagagtcccgttgctgagagatcgatgagcagatcagactgatcgaccagaacctgcagtgtctgagtgcagctgaagataagtactctcaaaaagaagacaaatggtgaggaagagatgaagattccttactaataaactcagggaggcagagaccccgtgctgagtttgctgagagatcggtagccaagctgaaaaagacaattgatgacctggaagataaactgaaatgcaccaaagaggagcacctctgtacacaaaggatgctggaccagaccctgcttgacctgaatgagatgtagaacgccccagtcccaccctgctgctgctcctccctctgacccagactccgcctgaggccagcctgcgggaagctggacctttaactgagggctgatctttaactgggaaggctgctttctccctttcaccaccccctcctttccctgtgtcttttttcgcccaaactgtctcttgccttcttcccgggagaaatccagctggggntagaggctggagcacctttgggaaacaacattttaaggggaatgttgaggcacaatggcattaatgtttttaaaaaggcatgttgttgatgtacacattttgtaaattacctttttttgttggttttgtaggcaaccatttgtaaaaacattcccaaataattccacagtcctggaaggcaggcaatcgaaatcccctttcttaactttttggaaggtgacttttcaccttaaatgcatattccccctnttcccatagaggagaggaaaaggtgtaggcctggcttaccgagagccaaacagagccaaggggagactccggctgtgggaaacctcattgttctgtacaaagtactagctaaaccagaaaggtgattccagggaggagttagccaaacaacaacaaaaacaaaaaatgttgctgtttcaagtttttcagcttttaagatatctytyggataatgttatttctatttttttatttttttcattagaagttaccaaattaagatgggtaagacctctggagaccaaaattttgtcccatctctaccccctcacaactggcttacagaatggatcatggtcccccttatggttgagggtgacccacttaattggctttcctggcctccttgaaaagaaaagaaaagaaagaagactgtggtttttggccactggatttaggccatgtggaaactcatcttcattaccctttttctggggtttggaagctggctgttcttctaggaaggtggccatctcaattggtggctttgttatcagtcaagtgctgggaggaaattcttggaataagcctatgttacaaaactttttaaattttaataatnattttggaaccttggccttggggttgtggcaccccggcaacccatctggctgtgaagcctctgcagtccgtggggtggcagttgtgat

SEQ ID NO: 18661 - DNA, 2066 bp, Homo sapiens
  SIMILAR (280)..(714): 991254mologous to Homo sapiens dJ101K10.3 (novel protein),accession number AL080276,Smith-Waterman Score=743.
  misc_feature (1)...(2066): n = a,t,c or g
ctcagctgcccccggagcggttcctccacctgaggcagactccacgtcggctggcatgagccggcgcccctgcagctgcgccctacggccaccccgctgctcctgcagcgccagccccagcgcagtgacagccgccgggcgccctcgaccctcggatagttgtaaagaagaaagttctaccctttctgtcaaaatgaagtgtgattttaattgtaaccatgttcattccggacttaaactggtaaaacctgatgacattggaagacttagtttcctacaaccctggcatatttggaaggttcctgtaaagactgcattaaagactatgaaaggctgtcatgtattgggtcaccgattgtgagccctaggattgtacaacttgaaactgaaagcaagcgcttgcataacaaggaaaatcaacatgtgcaacagacacttaatagtacaaatgaaatagaagcactagagaccagtagactttatgaagacagtggctattcctcattttctctacaaagtggcctcagtgaacatgaagaaggtagcctcctggaggagaatttcggtgacagtctacaatcctgcctgctacaaatacaaagcccagaccaatatcccaacaaaaacttgctgccagttcttcattttgaaaaagtggtttgttcaacattaaaaaagaatgcaaaacgaaatcctaaagtagatcgggagatgcctgaaggaaattatagccagaggaaattttagactgcagaatataattggcagaaaaatgggcctagaatgtgtagatattctcagcgaactctttcgaaggggactcagacatgtcttagcaactattttagcacaactcagtgacatggacttaatcaatgtgtctaaagtgagcacaacttgggaagaagatcctagaagatgataagggggcattccagttgtacagtaaagcaatacaaagagttaccgaaaacaacaataaattttcaccctcatgcttcaaccagagaatatgttatgttcagaaccccactggcttctgttcagaaatcagcagcccagacttctctcaaaaaagatgctcaaaccaagttatccaatcaaggtgatcagaaaggttctacttatagtcgacacaatgaattctctgaggttgccaagacattgaaaaagaacgaaagcctcaaagcctgtattcgctgtaattcacctgcaaaatatgattgctatttacaacgggcaacctgcaaacgagaaggctgtggatttgattattgtacgaagtgtctctgtaattatcatactactaaagactgttcagatggcaagctcctcaaagccagttgtaaagataggtcccctgcctggtacaaagaaaagcaaaaagaatttatgaagattgtgatcttcttattaaatcaattgttactgatcatgaatgttagttagaaaatgttaggttttaacttaaaaaaaaattgtattgtgattttcaattttatgttgaaatcggtgtagtatcctgaggtttttttccccccagaagataaagaggatagacaacctcttaaaatatttttacaatttaatgagaaaaagtttaaaattctcaataccaaatcaaaccaatttaaatattttaaggaaaaagggaaaagtagatagtgatactggagggtaaaaaaaaattgattccaattttatggtaaaggaaacccatgcaattttacctagacagtcttaaatatgtctggttttccatctgttagcatttcagacattttatgttcctcttactcaattgataccaacagaaatatcaacttctggagtctattaaatgtgttgtcacctttctaaagcttttttttcattgtgtgtatttcccaagaaagtatcctttgtaaaaacttgcttgttttccttatttctgaaatctgttttaatatttttgtatacatggtaaatatttctgtatttttttatattngtcaaagaatatggtctcttgtatgtccatataaaaataaattttgctcaatacaattgtaagcttaatgtaaaaa

SEQ ID NO: 18662 - DNA, 1277 bp, Homo sapiens
  SIMILAR (34)..(267): 871254mologous to Homo sapiens Human secreted protein, SEQ ID NO: 6129,accession number G02048,Smith-Waterman Score=334.
tgaaggaaagctgcttcctcatatgtttcaagaatggctctccctatcattgtaaaatggggtggacaggagtattcagtgaccacactttcagaagatgatactgtgctcgatctcaaacagtttctcaagacccttacaggagttcttccagaacgccaaaagttacttggactcaaagttaaaggcaaacctgcagaaaatgatgttaagcttggagctctcaaactgaaaccaaatactaaaatcatgatgatgggaactcgtgaggagagcttggaagatgtcttaggtccaccccctgacaatgatgatgttgttaatgactttgatattgaagatgaaagtagtttgaagtagaaaatagggaagaaaacctactgaaaatttctcgcagagtgaaagagtacaaagtggaaattttgaatcctcccagggaagggaaaaagcttttggtgctagatgttgattatacattatttgaccacaggtcttgtgcagagactggggtagaattaatgcggccatatcttcatgaatttctaacatctgcctatgaagattatgacattgttatttggtctgcaacaaatatgaagtggattgaagctaaaatgaaagtaaagcctcttggtgttatatggggaaagttttcggagttttacagcaagaaaaacaccattatgtttgatgacatagggagaaattttctaatgaacccacagaatggactaaagataaggccttttatgaaagcgcacctaaatcgtgataaagacaaagaacttttaaaattaactcagtacctcaaggagatagcaaaattagatgactttttggatctaaatcacaaatattgggaaaggccacgtgtgaggtgccacatcttccatggtaaagaagacagatatgacccctgccctatgggagcatgcagctgcaagactgtgtgcaccacaaacttagcccttccagctttaccactgggttcaatgaagaatggacagccatgtagaaatgtgattggacaaaaaggttatgctctaacggtaataaacagcggaccccagcaaggcctgtttgttcggattcttcttggcctcttcatacgggattttttccctgctgggtgtggggcaagacccttctggaatgagggtcttatggcctattttcagaggaggacactggtaggtgttatgctggtgctgtcgagcagcaaatcatttaaagccaagtgctacaatttgctggctgccatccagttcactgagtaa

SEQ ID NO: 18663 - DNA, 257 bp, Homo sapiens
  SIMILAR (256)..(206): 761254mologous to Homo sapiens PRO0657,accession number AF090942,Smith-Waterman Score=85.
  misc_feature (1)...(257): n = a,t,c or g
attcaggctgtgctgggaagaagagacctgggcttggaaggaaccggtccccgacggtttctggttgcctcgcctcttcccncttttgtcagctgagcagtttgtggtttctatgcccgcaagtttcaggcatattcacaaaagaaaaatacattttttcccccaactcactctggcctcagtagatttttttttcagttgtggttgttgcccaggctggagtgcagtggcgccatcttgggttcactgcacctcca

SEQ ID NO: 18664 - DNA, 398 bp, Homo sapiens
  SIMILAR (197)..(316): 421254mologous to Mus musculus metallothionein-III,accession number M93310,Smith-Waterman Score=61.
ttagccccaacaactcagaatttcacttccttgtacggccctcactttctccacctggccccggggcaggtctgagggtctgaagtctgttgatctgaaggtcctaggcaaatccagtcacttgggagccggagatatttaacatcacggcccggtcccctttcccaggggactcatttcctagcactctctccactgtccttgccccacccctgggggaaaaaatgtatttttcttttgtgaatacttcctgaaacttgcgggcatagaaaccacaaactgctcagctgacaaaagggggaaaaaagtctgctgcctgatcccacgctgacactcacagacccttggttgactggcagcactgaacgggtcaagaaaaaaaaaaaaaacgcacgagg

SEQ ID NO: 18665 - DNA, 432 bp, Homo sapiens
  SIMILAR (3)..(431): 931254mologous to Homo sapiens neutral calponin,accession number D83735,Smith-Waterman Score=717.
acaagggcccctcgtacgggctggcggccgaggtcaagaaccggctcctgtccaaatatgacccccagaaggaggcagagctccgcacctggatcgagggactcaccggcctctccatcggccccgacttccagaagggcctgaaggatggaactatcttatgcacactcatgaacaagctacagccgggctccgtccccaagatcaaccgctccatgcagaactggcaccagctagaaaacctgtccaacttcatcaaggccatggtcagctacggcatgaaccctgtggacctgttcgaggccaacgacctgtttgagagtgggaacatgacgcaggtgcaggccaagactaaggggctgcagagcggggtggacattggcgtcaagtactcggagaagcaggagcggaatttcgacgatgccaccatga

SEQ ID NO: 18666 - DNA, 422 bp, Homo sapiens
  SIMILAR (178)..(71): 451254mologous to porcine adenovirus 3 putative 13.1 kDa E3 protein,accession number AF083132,Smith-Waterman Score=77.
ttttttcgtacaaacagaggttttattgcgtttggtccacagtcgtatttcacattatctcacggagcagggcccctgggtggggggtccctgtgcagtaattggcggggcatgtggccggggaagatggagcagtataagctggtcgggcccagaagggaggagggctggggactccttaaaacctactgagggcctgggcacggtggctccaattgcacatttttaaggtccacataattaacaaatcagcaagttctatttatgtttttatgcgaatctatacgtctacaaggttaagtgtagacatacactgatacatttagcaagataaatttagtttgaaaacactttttttcaagtgacaggtttttgtctgatagctttcaataagtccaatattttaaaaacctaatgactgt

SEQ ID NO: 18667 - DNA, 2220 bp, Homo sapiens
  SIMILAR (68)..(1012): 491254mologous to Homo sapiens neutral calponin,accession number D83735,Smith-Waterman Score=594.
tgtcgtcccgtcctgtgcggccccgtcccgccgcccgcttgtcagccatgagctccacgcagttcaacaagggcccctcgtacgggctgttcggcccagggtcaagaaccggctcctggtccaaatatgacccccagaaggagggcagagctccgcacctgggatcgagggactcaccggcctctccatcggccccgacttccagaaggggcctgaaggatgggaactatcttatggcacactcatgaacaagctacagccggggctccgtccccaagatcaaccgctccatgcagaacttggcaccagctagaaaacctgtccaacttcatcaaaggccatggtcagctacggcatgaacccttgtggacctgttcgaggccaacgacctgttttgagagtgggaacatgaccgcaggtgcaggtgtctcttctcgccctgggggggaaaaggccaaagactaaaggggctgcagaaggggggttggacattggcgtcaagtactcggagaagcaggagcggaatttcgacgatgccaccatgaaggctggccagtgcgtcatcggggctgcagatgggcacccaacaaatgcgccagccagtcgggcatgactgcctacggcacgagaaggcatctctatgaccccaagaaccatatcctgccccccatggaccactcgaccatcagcctccagatgggcacgaaacaagtgtgccagccaggtgggcattgacggcttcccgggacccggcggcacatctatgaataccaagctgggaacccgacaagttgtgacaacttctccatgttccttgcagattgggctacacgcagggcgcccaaacccagagcggccaggtctttcggccctgggcggccagatatatgaaccccaagtacttgcccgcaaggcacaattggccgatggggctccctcgggcaccggcgactgcccggacccgggggaggtccctgaatatcccccttactaccaggaggaggccggctactgaggctcccagcacgctctctccccacatcgtcttcccatctgggtttttgggtttttctgtgttttcatcttttttttttatttttcttaacccgttcagtgctgccagtcaaccaaaagggtctgtgagtgtcagcgtgggatcaaggcaagcagagcttttttccccctttgccttgatcccttcgcaaggctgagccactgggctgtgggggaaggggtcaaggccatatcccaatacgtgtagggcgagggtccctgctggcacattcaggctgtgctgggaagaagagacctgggcttggaaggaacccggtccccgacggtttcctggttagcctcgcctctttccccttttgtcagatgagcagtttgcggttcctatgcccgcaagtttcaggaacgaattccaggagaaaaatacattttttcccccaggggtgggggcaaggacagtggagagagtgctaggaaatgagtcccctgggaaaggggaccggggccgtgatgttaaatatctccggcttcccaagtgactggatttgcctaaggaccttcagatcagacagacttcataccctcagacctgccccggggccaggtggagaaagtgagggccgtacaaggaagtgaaattctgagttgttggggctaagcctgaccccctctccatgctccccgccccaacccactctggcctcagtagatttttttttcagttgtggttgttgcccaggctggagtgcagtggcgccatcttggcttcactgcaccttccacctttccgggcttcaaagcgattctccaagccttcagcctccctgagtagcttaggacttgcaggtgctccaaccacgcccgggcttaatttttgtatttttagtagagatggggtttcccccatgttgggccaggctggtctcgaactcctggcctcaggtgtgatccgcccgcctccgcctccccaagcgctggagattacaggtgtgagccagggtgcccaggccctcagtaggttttaaggagtccccagccctcctcccttctgggcccgaccagcttatactgctccatcttccaccggccacatgccccggcaaagtactgcacagggaccccccaccccaggggacctgctccgtgagataaatgtggaaatacgactgtggaccaaacgcaattaaaacctctgttttgtacggagaa

SEQ ID NO: 18668 - DNA, 388 bp, Homo sapiens
  SIMILAR (2)..(82): 961254mologous to Homo sapiens CDA08,accession number AF212247,Smith-Waterman Score=139.
ggatttcaatggtgatctaattcctgatatttttggtatcacaaatgaatccaaccagccacagatactattaggaggccataccaccctgaacgcgccccatctcttctgatctcggaagctaaccaaggtcagacctggttagtgcttggatgggagatcacctattactttttctgtaggtttttaataaagaatatgggtgctttgatgctagtaatagggaactttgaaataattattgtgaatcctgaatgagaaacctgtttttttctccaaaatttgaaaaatatcttgaagagagtcttgctttagagacaaattggaaggagatcctgatttgcttttgtggccgtatccaaaaggaattgagtgcaggtggggtgca

SEQ ID NO: 18669 - DNA, 513 bp, Homo sapiens
  SIMILAR (83)..(196): 1001254mologous to Homo sapiens CDA08,accession number AF212247,Smith-Waterman Score=196.
tttaacattttatcattttaatatttgatgggagcaatgtttccagagatgtttttaatttttttttaattgaataactctagctggccaactcagccaatccgcacatttagctctccaactaccatacaacgtgcttggtttaggtcggagcgcaaattttcttgaccatctctacgttggtattccccgtccatataaaaggtcccagacatttttcatgaagaaccaattccatctttggccccgaaagatcaaaatatcatctgaaagattccacaggtcttgaccggcgcgaagggcacggagagcctcgggctccctctgccgatgtccgcgcttccctgcccagggtcgagcaaggctgagctgggcaaagttttgaccttgaatggaggtctgggggactagggaccggcgcccctctctgtctgctagggctggcggagacccggcaggccggcgagggtgcggggccgaggtgggcggcgcttcccgggcgcctccgtcaga

SEQ ID NO: 18670 - DNA, 2888 bp, Homo sapiens
  SIMILAR (980)..(1309): 901254mologous to Homo sapiens Human secreted protein sequence SEQ ID NO:127,accession number Y87088,Smith-Waterman Score =524.
  misc_feature (1)...(2888): n = a,t,c or g
gcagccctagaaggagagagagaaaggagccggcagcgctcttacgcgtcccggggctgccgccactctctcggccggtaacgcggtgctttgcggctgtcgtcaagcgcggcgttgggccggcgggagggggctgaggggctgccatggcggcggcgggccggctccctagctcctgggccctcttctcgccgctcctcgcaggggttgcactactgggagtcgggccggtcccagcgcgggcgctgcacaacgtcacggccgagctctttggggccgaggcctggggcacccttgcggctttcggggacctcaactccgacaagcagacggatctcttcgtgctgcgggaaagaaatgacttaatcgtctttttggcagaccagaatgcacccgtattttaaacccaaagtaaaggtatctttcaagaatcacagtgcattgataacaagtgtagtccctgggggnttatgatggagattctcaaatggatgtccttctgacatatcttcccaaaaattatgccaagagtgaattaggagctgttatcttctggggacaaaatcaaacattagatcctaacaatatgaccatactcaataggacttttcaagatgagccactaattatggatttcaatggtgatctaattcctgatatttttggtatcacaaatgaatccaaccagccacagatactattagggggggattttatcatggcatccagcattgaccactacaagtaaaatgcgaattccacattctcatgcatttattgatctgactgaagattttacagcagatttattcggggcgacattgaatggcaccactagtaccttccagtttgaaatatgggaaaatttggatggaaacttctctgtcagtactatattggaaaaacctcaaaatatgatggtggttggacagtcagcatttgcagactttgatggagatggacacatgggctcatttacttgccagggctgtggaagataaaaattgccaaaagagtaccatcttacttagtgagatctgggatgaagcagtgggttccagtcctacaagatttcagcaataagggcacactctggggctttgtgccatttgtggatgaacagcaaccaactgaaataccaattccaattacccttcatattggagactacaatatggatggctatccagacgctctggtcatactaaagaacacatctggaagcaaccagcaggcctttttactggagaacgtcccttgtaataatgcaagctgtgaagaggcgcgtcgaatgtttaaagtctactggggagctgacagacctaaatcaaatttaagggtgccatggttgccaccttctttgacatttacgaagatggaatcttggacattgtagtgctaagtaaaggatatacaaagaatgattttgccattcatacactaaaaaataactttgaagcagatgcttattttgttaaagttattgttcttagtggtctgtccctctaatgactgtcctcgtaagataacaccctttggagtgaatcaacctgggaccttatatcatgtatacaactgtagatgcaaatgggtatctgaaaaatggatccgctggcccaactcggcccaatccgcacatttagctctccaactaccatacaacgtgcttgggtttagggtcgggagcgcaaattttcttgaccatctctacgttgggtattccccgtccatcttggagaaaaatcttttacggaaaacaagagtggactgcaatcattccaaattcccagctaatttgtcattccataccctcacaatgtccccccgaagttgggagtgccaaactgtattctttacaccaagttaatattgttctggcttactgctatagctctcattcggtgtctgtgttttcaatctttggcaataaattggcattttacattgggcagggaaaagaaagcaggatggatagaggaaaaacggacaaggaaggcccaccggtttccattttggatggctatgtggacttgcctttaatattacataatgggaatgggctgtttcacttggattagttggaaacacaaaaatcctgggcttggaaaaaataggggggagattaaaatattatttaataaatgatgtatccccatgggtaaattaattgggaaagtattcaaaataaatatgggtttgaatatgtcacaaggtcttttttttttaaagcactttgtatataaaaatttgggttctctattctgtagtgctgtacatttttgttcctttgtggaatgtgttgcatgtactccagtgtttgtgtatttataatcttatttgcatcatgatgatggaaaaactatgtgtaaataaaaataattaaatgagcaggaatttttgtgtccacttgacttggtcttgcttcttattctaatgatgcaaattatacttttgtgaatatatcacggagtcattaggcattcagcttcatcacagcaggtcaggggtctcactgatggcatacaatatagtgatcgggtactctgacttggtagcacagtaagacagacttgccttaaactcctaattcaaccacttacaaagtcattgtttgaacttggctcttgtttaacctcttgaaaccctcagttttcttgtttattgagtggggctaatagttgagttactgtaaacattaaatgggatgatgtatgtgaagtgcttagcttggtgcctagcacagagtaagtggtcaatatgtggtagttgtcattattaatattttagatgatcttattagacttatgacatctaattattaggaaatacatagacttggatagaattttattttccagggcatggaaggaaatattctttggaaaagc

SEQ ID NO: 18671 - DNA, 969 bp, Homo sapiens; identical to SEQ ID NO: 11276
  SIMILAR (265)..(726): 601254mologous to Cloning vector pTM30 repressor LacI- q,accession number AF023620,Smith-Waterman Score=361.

SEQ ID NO: 18672 - DNA, 2072 bp, Homo sapiens
  SIMILAR (215)..(1033): 471254mologous to Homo sapiens E-1 enzyme,accession number AF113125,Smith-Waterman Score=403.
  misc_feature (1)...(2072): n = a,t,c or g
cggccgccttttccagttccaggtgtgcagaagtgtcctctccccacgcgcggcgggctgcacattggtcgctggctccgagatcgcgcggggccgccggaagcccaagacggtaccgggggccgcagccgcagccggcgccgccctccagccctccccaacagcaggccgagtcccgtagcatccggtagggaaatggtcgtgctttcggtccccgccgaagtcacccgtgatcctgttagatatccgaaggtaccacaaccaccgattgctttcgtgaaaggagcattttatttccttacatcgaaagaaaaatgttaaaagatgtatctgcagacacattggggaagaagaggagttccaagcaggatgtcagtctttttgaaggaaacaaggcttgaagaggacgcccacctggatgggggctgttcctatccctggcaagcatctgggaattggagttggatgattctgcaacagatgattccaagccgtggtagataatgtgtgctggcagatgtccctggatcgaaagaccactgcactcaaaacagctgcagggccacaatgtggagggcggcattcacagctgggcgcatgaaaagcagagttctttgcagatgtagttccagcaagtcaggtaagtggagagaggccggaaatgaaggtgtacatctattcctcagggagtgtggaggcacagaaactgttattcgggcattctacggagggagatattcttgagcttgtttgatggtcacttttgataccaagattggacacaaacgtngacgagtgaaagttacccgaaagacttgcagacagcattgggtgctcaaccaaacaaacattttgttttctggacagatgttacttcgaggagggccagtgctggcttgagggaagcaggatgttgcacgttagctgtggtgggtgagaccagggcaacgcagggattaacagatgattgaggaagacttactacagcctcatcacatcctttcagtggaactattacctgccttcctcaacctaggagaagggtttgtttaagggcagaccgccctgttccccagagttgtccctgtagtgtctaggtttattctaatggtaaaagtaacttacttaaaaaacatatgtacacatatgtatgcaaggtatgtatatatgtgtatgctccagattaacttccataggtacataagtgaaaggaagtcttcagtttcagtgaacacaaaactttatttaaagatgctttataatgtagaaattggtttcaaatcatactctaccccttagtgagggcaaagtgtagttggtagaagaaattgctaaatacctatctaatgtgctatgtttatcaaatcgtgtactaaaatggaaagctagttttgagaaattattcagaagccttgttattttaaaaatgaaatatttcaaagactgaatattttcaaagaaaatgaataattcattgcccttgtgatttagaagattataacagctgtatttcatatttgcctccttatatatatcaaagaccaaggtatttccttccggcttcaaaaggaaccaaaattgggaaagaaaactccacttgagtcttgatcaaaccaagtgtccttttactttanggaagaaacttgggtaatccattgtgggcaccccacagccaagccagttgccctttaccagtgaaaaaaggtggcactggaggtaacatcttaaaacagagatgtggttcttaaatgtttaacagaacagttcctaatcctgcccacggtgttatcattataggattttatagttgccctttcctaacctacttagccacagtttgaggaatacggttaattggctatttactatttaaaaaagttttactgaaattcagtcccataacctttagggtggggccctaatatgtaagattttcctctggaatggaatgtgagaaatcgtaaattttgataacagcagtatttatcctggtttaattctaatacggatgtcatgttaatttcatgttgtgattaataaaagcgttttttcttcaaaaaaaaaaaaaaaaa

SEQ ID NO: 18673 - DNA, 584 bp, Homo sapiens
  SIMILAR (197)..(367): 981254mologous to Homo sapiens BAT1,accession number Y14768,Smith-Waterman Score=286.
  misc_feature (1)...(584): n = a,t,c or g
gacaatgagctcttggactatgaagatgatgaggtggagacagcagctgggggtagtatgtctgagcccctgccaagaaggatgtcaagggctcctatttctccatccacagctctggctttcgtgacttcctgctcaagccagagttgctccgggccattgtcgactgtggctttgagcattccttcagaagttccagcatgagtgcatccctcaggccattctgggaatggatttcctgtgccaggccaagtcgggcatgggaaagacagcagtgtttgtcttggccacactgcaacagctggagccagttactgggcaggtgtctgtactggtgatgtgtcacactcgggagttggcttttcagacacggtagaagactcgcccattttggaatgtgaccgtctgtccttcaggagaggacaccagggtgggggtgaaggagacactactgcccccacccctgacagcccccaccccatggcttccatcttttgcatcaccaccactcctgaacccccatttctgatttgtcagaatttttttttnnnnnnnnnnnnnnnnnnnnnnnnnnnnnnnnnnnn

SEQ ID NO: 18674 - DNA, 388 bp, Homo sapiens
  SIMILAR (39)..(140): 291254mologous to Plasmid pSC101 unknown protein,accession number K00042,Smith-Waterman Score=42.
acagtcttctaatagctgcttggaggaaaaacaaacttatgaggctagaggccaagtacaaagattcttgtagctggggtttcaacacaaccaaaaaaggaatgaagattttcacaacacttctttataattcagaggcccaggttttaagcctagaatgttaaagtatcatacttcagtttctgggtcttcagtacggaatgtgattcagaaaagtcaaacttctcgttaacaagtatcaagagctgcaatctggcaatcgaaaaatgcttcttgagcacctgctgtgtgccttgtcctatggataggaaccccaccccatggcttccatcttttgcatcaccaccactcctgaacccccatttctgatttgtcagaattttttttg

SEQ ID NO: 18675 - DNA, 564 bp, Homo sapiens
  SIMILAR (139)..(270): 971254mologous to Homo sapiens BAT1,accession number AF029061,Smith-Waterman Score=223.
ggtggggttttcaatcttctctttcctccccatccccccatggggtgtattggagatcaacttcctccacccccccaggtttaacccccccactctgccctcctcccgttccccacccccttcctcccccccagccaattggagatcttcgtggatgatgagacgaagttgacgctgcatgggttgcagcagtactacgtgaaactgaaggacaacgagaagaaccggaagctctttgaccttctggatgtccttgagttcaaccaggtcagttagacgtccagtagggggatgagcattggagcactccagctgtagcagaaacctggatattaagtacacttttattgaggaaatcacatgtgtgatgtgggagagaataatgagggtataaatatcttaggggctgagcatgagtaaggtgggagctgcttttctattctatggctggcacgggtatgtcctcaataacctcaaggaaaataaacttcaaaaattaagatccttggccaggcacggtggcttatgtgtgtaatcccagcacttggggaggctgagggaggt

SEQ ID NO: 18676 - DNA, 1255 bp, Homo sapiens
  SIMILAR (158)..(730): 561254mologous to Homo sapiens nuclear RNA helicase (DEAD family),accession number Z37166,Smith-Waterman Score=422.
  misc_feature (1)...(1255): n = a,t,c or g
tgttgctgccgccatacgcgctctccctgtttagttatggcagagaacgatgtggacaatgagctcttggactatgaagatgatgaggtggagacagcagctgggggagatggggctgaggcccctgccaagaaggatgtcaagggctcctatgtctaccatccacagctctggctttcgtgacttcctgctcaagccagagttgctccgggccattgtcgactgtggctttgagcatccgtcagaagtccagcatgagtgcatccctcaggccattctgggaatgggatgtcctgtgccaggccaagtcgggcagtggggaaagacaggcagtgttttgtcttggccacactgcaacatctggagccagtttactgggcaaggtgtctgtgctgggtgatgttgtcacactcgggagttggcttttcagatcagcaaggaatatgagcgcttctctaaatacatgcccaatgtcaaggttgctgtttttttttggtggtctgtctatcaagaaggatgaagaggtgctgaagaagaactgccccgcatatccgtccgtggggactccaggccgtatcctagcccctggctcgaaataagagcctcaacctcaaacacattaaacactttattttggatgaatgtgataagatgcttggaacagctcgacatgccgtcgggatgtccaggaaaatttttccgcatgaccccccacgagaagcaggtcatggatgttcagtgctaccttgagcaaagagatccgtccagtctgccgcaagttcatgcaagatgtaaatacccttctaccttctctccctccactccccgcccgctgcctcctccccttcctcgccctcttcctcagactcccttgtcattcaagtgccaagaaggcggcttgtgcccaactgggagtaatgactccttgaagagacatacagaagcagagacagctagtgttagggcctgcgcgggtgccagggaaactccggaagacttggtcggggttaatgtgaaaagcgggtagtggttcgacttttttcataaatcaccaacatttttgaaccctcttcttcctttgggggangggcagggatttttttgcctaacaaccacccaatccatcgncttttaaatggccccttnaagccacgccnccttcaaggggnattcgagcggaccaggtggagcccttttggttacccaaacttctantttcccgggggcgggagaaccaaganaggggcngaccgat

SEQ ID NO: 18677 - DNA, 1970 bp, Homo sapiens
  SIMILAR (199)..(993): 501254mologous to Homo sapiens nuclear RNA helicase (DEAD family),accession number Z37166,Smith-Waterman Score=525.
  misc_feature (1)...(1970): n = a,t,c or g
cgtcgctgttgctgccgccatacgcgctctccctgtttagctcttctgttagaaatagtatctttgttttcctttgctgttcctcagtcccctgactcttcaccccttgttttcacctattttgcgagaacccatccagatcccccttcccttcttcccctgccggcccagttatggcagagaacgatgtggacaatgaagctcttggactatgaaagatgaatgaggtgggagacagcagctgggggagatggggctgaggcccctgccaagaatggatgtcaagggctcctatgtctcccatcccacagctctggctttcgtgacttcctggctcaagccagagttgctccgggccatttgtcgacttgtggctttgagcatccgtcagaagtccagcatgagtgcatccctcaggccattctggggaatgggatgtcctgtgccagggcaagtcgggcattgggaaagacagcagtgtttgtcttggccacactgcaacagctggagccagttactgggcaggtgtctgtactggtgatgtgtcacactcgggagttggcttttcagatcagcaaggaaatatgagcgcttctctaaatacatgcccaatgtcaaggttgctgtttttttttggtggtctgtctatcaagaaggatgaagaggtgctgaaggaaggaactgcccgcatatccgtcgtgggggactccaggccgtatccttagccctgggttcgaaataagagcctcaacctcaaacacattaaacactttattttggatgaatgtgataagatgcttgaacagctcgacatgcgtcgggatgtccaggaaatttttcgcatgaccccccacgagaagcaggttcatgatgtttcagtgctaccttggagccaaagagatccgtccagtctgccgcaagttcagtgcaagatccaatggagatctttcgtgggatgatgagacgaagttgacgctgcatgggttgcagcaggtactaccgtgaaactgaaggacaaccgagaagaacccggaagctctttgaccttctggatgtccttgagttcaaccacggtggtgatctttgtgaagtctgtgcaaccggtgcattgccttggccccagcttactagtgggagcagaacttcccagccaattgccatcccaccgtggggatgcccccaggaaggagaggctttctccggtaatcaagcagttttaaagattttccaacgaacgaaattcttgtnggctacccaaccctatttggccgaaggcatggaacatccgaagcgggtgaaacaattgctttttaatttatgaacatgccctgagggattctgaaaaccctaccctgccatcggggtgggcccagaacagggccggtttgggcacccaaggggcttgggctatcacatttgtgtccgatgaggaatgattgccaagatcctgcgatgatgtgcaaggatcggctttgagggtcaaatttagtgagctgcctgatgagataggacatcttcctcctacattggaacaggacacgggtagaagactcgcccattttgggaatgtggaccgtctgttcctttcagggaggagggacacccagggtggggggtgaaggagacacttactgccccccaacccctgaacagcccccaccccatgggcttccatctttttggcattcaccaccattcctgaacccccagtttctgatttgtcaagaattttttttttaacaaagactaaaaatgnnnnnnnnnnnnnnggggggcccgttttaaagaacccttagggggcccaaatttaacccggccttccaacgcaaaacttttccccttaaagggagcctatttaaaaccaacttgggaatttttgaaaggaaccttaattttggggggggaacatattgggccaacttccttccaaaatttaaagcctttagggaaaataaaaaattttaaggggt

SEQ ID NO: 18678 - DNA, 591 bp, Homo sapiens
  SIMILAR (172)..(363): 1001254mologous to Homo sapiens Human pancreatitis-associated protein,accession number W71682,Smith-Waterman Score=376.
agtgtgtcctggatgctgctttcctgcctcattctcctgtgtcaggttcaaggtgaagaaacccagaaggaactgccctctccacggatcagctgtcccaaaggctccaaggcctatggctccccctgctatgccttgtttttgtcaccaaaatcctggatggatgcagatggctctgagcctgatggagatggatgggagtggagtagcactgatgtgatgaattactttgcatgggagaaaaatccctccaccatcttaaaccctggccactgtgggagcctgtcaagaagcacaggatttctgaagtggaaagattataactgtgatgcaaagttaccctatgtctgcaagttcaaggactagggcaggtgggaagtcagcagcctcagcttggcgtgcagctcatcatggacatgagaccagtgtgaagactcaccctggaagagaatattctccccaaactgccctacctgactaccttgtcatgatcctccttctttttcctttttcttcaccttcatttcaggcttttctctgtcttccatgtcctgagatctcagagaataataataaaaatgttactttata

SEQ ID NO: 18679 - DNA, 972 bp, Homo sapiens
  SIMILAR (183)..(689): 641254mologous to Homo sapiens Human pancreatitis-associated protein,accession number W71682,Smith-Waterman Score=503.
cggacgcgtgggttttataaaaaacccagtctttgctgaccagacaaagcataccagatctcaccagagagtcctaggggactacagaaggaaaaagacaagaggcagtaggatatctgtgtgtcctcccgctgaccacacttcctttagtgacccgattgcctcctcaagtcgcagacactatgctgcctcccatggccctgcccagtgtgtcctggatgctgctttcctgcctcattctcctgtgtcaggttcaagggtgaagaaacccagaaggaactgccctctccacggatcagctgtcccaaaggctccaaggcctatggctccccctgctatgccttgtttttgtcaccaaaatcctggaatggatgcagatctggcttgcccagaagcggccctctgaaaaactggtgtctgtgctcagtggggctgagggatccttcgcgtccctcctggcggaggagcattagtaacagctactcatacatctggattgggctcccatgaccccaaaaaagggctctgagcctgatggagatggatgagagtggagtagcactgatgtgatgaattactttgcatgggagaaaaatccctccaccatcttaaaccctggccactgtgggagcctgtcaagaagcacaggatttctgaagtggaaagattataactgtgatgccaaagttaccctatgtctgcaagttcaaggactagggcaggtgggaagtcagcagcctcagcttggcgtgcagctcatcatggacatgagaccagtgtgaagactcaccctggaagagaatattctccccaaactgccctacctgactaccttgtcatgatcctccttctttttcctttttcttcaccttcatttcaggcttttctctgtcttccatgtcttgagatctcagagaataataataaaaatgttactttatacttaaaaaaaaaaaaaaaagggcggccgct

SEQ ID NO: 18680 - DNA, 459 bp, Homo sapiens
  misc_feature (1)...(459): n = a,t,c or g
ncaattgccagccacaaagcacaccataaactacttagtgcatatgaatagcaaagtgaggtccaccatgggattatcagttacacaacaggacaaggagaaaacctctctgaacccatttggaagagctggcagaggagccaggacctatgacaggagaaccaccctgagatttattcactcacatannnnnnnnnnnnnnnnnnnnnnnnnnnnnnnnnnnnnnnnnnnnnnnnnnnnnnnnnnnnnnnnnnnnnnnnnnnnnnnnnnnnnnnnnnnnnnnnnnnnnnnnnnnnnnnnngaagtttggatggatggattcatttaactcatatcaagtaactgcagtgggtgcctgtagcagagaagttgtagcagaggagtaggatagtataaaggcagggcattccnccgcncggtgtatgcaactcaattnnnnnnnccccccccctanncccc

SEQ ID NO: 18681 - DNA, 2769 bp, Homo sapiens
  SIMILAR (579)..(352): 341254mologous to Homo sapiens Human secreted protein, SEQ ID NO: 8144,accession number G04063,Smith-Waterman Score=79.
tttttttttttttttttcaaaaactttattcttttctaataaaaatgatatatgttcattataaaaagtttcaaacacacaagagtctgaagaatgtaaagatcacccaaatcccacagcccagaaaaaaaaatccttaacatttggggaagatctctctatgaaacatacattatcttaaaatattcaatgttataaatgagctcatattcaacatatatcctgtagtctactttttgattcaataatatttggggaacatatatccatagcaataaacatatatctaaatatttttaaatgacaactggcatggaatttatttaatccatccttttactggagggatggtttcagttggttcccaatggttttaatatcataaacatccatggaaatatacctttggggctcatggtttgaagacttggacaacttttattcattaggataaattcctaaacaaactggctggggaaagggggtatccacatttagggtttccatacatggtggccaaattgccttctagaaaggttctaccaattttcactcctgccagtattgaacaagaattccatttttgtcaattgctttatctttgccaatatgggaggacaaaattaataataataaaataaaataacacatctttattagctgttttcatgttcaaataggagggacacttttaatttttaaggttattctttttcaaggcagatatttcctggacttgaataaagtgtttttggtttgtattctcattccatcagtagtatgacttagggcaagagccaactcctttatgcttcatttttttaaatctaatagatcaaggaaatggaaaccggctcaataggttgtttaaagcttaagagatgtgtgaatgcacctagcacctactagacacaacaatgagcctgcatttccgcaagtaagccattcctacctccttaccccccattccaattaatgtttgtctataagaatattttaaaattcaagagccaatgtaaaactctgtaaatattatcttgctatttatagagacgaccagaaaagtttgcaatgatgcagatgacatccataatgagtctcttaaatgaaggtttggcaggcaatacaggtcttttgaataaaaatgtctcccaggaaaatacttgcaagtcaagcccacagaccatcaagtatatataaatgatttggaacgggaagacagatacaaaacacaacaaacatcagtttattggctgccataacactggtttttcattgcttagacatggtttgggaatattgtccaccatagagaaaatttataagcaacacatacaacgactaatcttcttttcgaagatatctcagatattagtatttaaaattagtagcttttattcaagaatgatgaaatggaataatttaagcaatgattgattatattccgaatacatagaaagataaacttcgggtgcaatctagatgacaatcttgattctgaagatgctttgaaggactatttgattcattcattttacaaatatttgttgaaccatattatgcaccaggtactgtgccagccattagggatccaaaaatgagcaggacatagacctttccctcagggaacctgcagttttgtggaagaagaaatataatttaacaggcaactccagtatcacgtgatagtgacctgaggtttgtgtaggtgcctcagacccccggaagatgccatcagtatccaaacaaatgccccaaagaaaccacataccaatagaagaatagaatctgtcacaattgcccagcccacaaagcacacccataaactaccttaagtgccatatgaaatagcaaagtgaggtcccacccatgggattatcagttacacaacaggacaaggagaaaacctctctgaacccatttggaagagctggcagaggagcccaggacctatgacaggagaaccaccctgagatttattcactcacatataagctccatgagggcagtgagctttgctggtttccatctgcactgtagccccagctcctagaatagtgcctgatacaaaggaagccattgctaagtatttattcaatgaatggaagtttggatggatggattcatttaactcatatcaagtaactgcagtgggtgcctgtagcagagaagttgtagcagaggagtaggatagtgataaaggcaggacacatggtacttactaaaaatctgtggaatcatcaaatgacttttcacatcctatcccttttcataggagcttgagctgccagtgacttcattgggctatttggaacgcaagaaaaagcatggattttgaagtcatgacaaatgtgagttcaaatcctggctcctccagatctggaaggacttgatgggaggactgggaggacttgattttagcaagttagtttcctgactcagtgtcctcaccttattataagatgggatccacaccttcagggtgactctaagggttaaccagaaaaaaacatgcaaagctctagacccagttcccttcacccttaccccatttttctggcattagggatggttgtgcacagctgctgtggatccccaattccttgaatagccatcctgagtgcttcgtcagtgctcttttctatttctcttaattccgtatctcttttcagaaaccttctccaagaagccttcttcatcctctcaaaaatgcatagtaatctattccttcttctcaccctttcagcatttacttcggttgcattggtg

SEQ ID NO: 18682 - DNA, 400 bp, Homo sapiens
  SIMILAR (217)..(339): 951254mologous to Homo sapiens cytokeratin 18 (232 AA),accession number X12876,Smith-Waterman Score=196.
cgttgctccgtgggtgctcctgtgtcttcaagggagtaacagttacagaggtctcccccttgaagaaagcaaactaagtattgtccctagctgtacttagtatgcaaatgaagtttggccttgagtttcccttttcagaggaggctttttccctctacctttcttgtctcccttctactccacggggctgtttataacttgggcttggtcttctgttacagtcttggtgatgccttggacagcagcaactccatgcaaaccatccaaaagaccaccacccgccggatagtggatggcaaagtggtgtctgagaccaatgacaccaaagttctgaggcattaagccagcagaagcagggtaccctttggggagcaggaggccaataaaaagttcagagttc

SEQ ID NO: 18683 - DNA, 323 bp, Homo sapiens; identical to SEQ ID NO: 15268
  SIMILAR (178)..(321): 771254mologous to Mus musculus keratin,accession number Y00217,Smith-Waterman Score=189.

SEQ ID NO: 18684 - DNA, 994 bp, Homo sapiens
  SIMILAR (140)..(559): 751254mologous to Mus musculus cytokeratin,accession number M22832,Smith-Waterman Score=533.
gcgcccagctaccgcgcccactggtcagaagtgtggcaagcgtctatgcaggccctgggagctcaggttcccggatctccatgtcccgctccaccagcttccagggtggcttggggtccaggagcatggccgcagtatggccgggggtctggcaggaatgggaggcatccagaacgagaaggagaccatgcaaagcctgaatgaccgcctggcctcctacctggacagagtgaggagcctggagatgggaaactggaagctggagagcaaaatctgggagcacctggagaagaagggaccccaggtcagagactggggccactacttcaagaccatcgaggaggacctgactcagatcttcacaagtactgtggacaatacctgcatcattctgcagatcgacaatgcccatcttgctgctgatgactttagagtcaagtatgagacagagccggccacgtgccagtctgtggagaacgacatccatgggctccacaaggtcattgatgacaccagtgtcactcagctgcagctagagacagagatcgaggctcttcaaggaggcgctgctcttcctggaagaagaaccacgaagaggaaagctgagacatacagtccaggccttggagatcgacctggactggatgaaaaatctggaggccagcttggagaacagcctgaagggggggtggaggcctgctacaccctgcagatggaacaactcaatgggatcctgctgcacctggagtcagagctggcacagacctgggcagagggacagggccaggcccaggagtaccaggccctgccaaacatcaaggtcaagctggaggctgagatcgccacctaccgccgcctgctggaagatggcgaggacttcaattttggtgatgctctggacagcagcaactccacgcaaaccatccaaaagactcccacctgccaacagtggatggcaaagtggtgtctgagaccaatgacaccaaagttctga

SEQ ID NO: 18685 - DNA, 377 bp, Homo sapiens
  SIMILAR (3)..(377): 1001254mologous to Homo sapiens cytokeratin 18 (424 AA),accession number X12883,Smith-Waterman Score=632.
caggaatgggaggcatccagaacgagaaggagaccatgcaaagcctgaacgaccgcctggcctcttacctggacagagtgaggagcctggagaccgagaaccggaggctggagagcaaaatccgggagcacttggagaagaagggaccccaggtcagagactggagccattacttcaagatcatcgaggacctgagggctcagatcttcgcaaatactgtggacaatgcccgcatcgttctgcagattgacaatgcccgtcttgctgctgatgactttagagtcaagtatgagacagagctggccatgcgccagtctgtggagaacgacatccatgggctccgcaaggtcattgatgacaccaatatcacacgactg

SEQ ID NO: 18686 - DNA, 316 bp, Homo sapiens
  SIMILAR (30)..(137): 801254mologous to Rattus norvegicus keratin 18,accession number X81448,Smith-Waterman Score=141.
aatctgagacctcgagcaccatagtcagtgtggtggaattccaatccctccagatcttcgcaaatactgtggacaatgcccgcatcgttctgcagattgacaatgcccgtcttgctgctgatgactttagagtcaagtaagtttgggggctagagagctgggggtccaggggtggagctaagaaggatctgctccccaggctgggtcagttaggggctcacagtgggatcctgttaggtgtgggtggatgagagtcagggtccatcagtgtattcatttaactgttcatttgtataaccccgtttaagaatactgt

SEQ ID NO: 18687 - DNA, 490 bp, Homo sapiens
  SIMILAR (296)..(418): 951254mologous to Homo sapiens cytokeratin 18 (232 AA),accession number X12876,Smith-Waterman Score=196.
catgtgtctgttcactggtatccactgagcactgggccgttgctccgtgggtgctcctgtgtcttcaagggagtaacagttacagaggtctcccccttgaagaaagcaaactaagtattgtccctagctgtacttagtatgcaaatgaagtttggccttgagtttcccttttctggaggaagaggctgagggtgatttggagataaaggtagaggtcaggaggctttttccctctacctttcttgtctcccttctactccacggggctgtttataacttgggcttggtcttctgttacagtcttggtgatgccttggacagcagcaactccatgcaaaccatccaaaagaccaccacccgccggatagtggatggcaaagtggtgtctgagaccaatgacaccaaagttttgaggcattaagccagcagaagcagggtaccctttggggagcaggaggccaataaaaagttcagagttcattggaaaaaa

SEQ ID NO: 18688 - DNA, 1535 bp, Homo sapiens
  SIMILAR (216)..(1031): 541254mologous to Homo sapiens cytokeratin 18 (424 AA),accession number X12883,Smith-Waterman Score=598.
gaaggcagatcaaaatggctgcaagggacgtggttgccaacattggggttgccatgacaactgtaatgcctgtgatagttgagctgagaaagcaggcggtaagaaaggggaggcgcccagctaccgcgcccactggtcagaagtgtggcaagcgtctatgcaggccctgggagctcaggttcccggatctccatgtcccgctccaccagcttccagggtggcttggggtccaggagcatggccgcagtatggccgggggtctggcaggaatgggaggcatccagaacgagaaggagaccatgcaaagcctgaatgaccgcctggcctcctacctggacagagtgaggagcctggagatgggaaactggaagctggagagcaaaatctgggagcacctggagaagaagggaccccaggtcagagactggggccactacttcaagaccatcgaggaggacctgactcagatcttcacaagtactgtggacaatacctgcatcattctgcagatcgacaatgcccatcttgctgctgatgactttagagtcaagtatgagacagagccggccacgtgccagtctgtggagaacgacatccatgggctccacaaggtcattgatgacaccagtgtcactcagctgcagctagagacagagatcgaggctcttcaaggaggcgctgctcttcctggaagaagaaccacggagaggagataaaaggcctatcaagacgccagattgccagctctggggttgacccgtggagggtagatgcccccaaatcttcagggccttcgccaaagatcatgggcagacatccggggcccaaatatgacgagctgggctcgaaaaagaacccgagaggaagctagccaagtactcgtctcaagcagattgaggagagcacccacagttggtcaccaacaccagtctgcttgaggtttggagcttgctgagacgaaccttcacaggtcttagacgtacaagtccaggtccttggaagattcgaccctggactccattgagaaatcttgaaaggcccaggcttggaagaaacagcccttgaagggaagttggaaggcccccctacggcccttaccagattggagcaagcttcaaacggggatccttgcttgcacctttgagtccagagctggcaacaagacccgggcaagagggacaagcgccccaggcccccaggagttatgagggcccttgctgaaacatcaaaaggtcaaagctggaggcttgagatcgcccaccctacccgcccgcctgctggaagatgccgaggbcctttaatctttggtggatcccttggacagcaagcaactcccatgcaataccatccaaaagaccaccaccccgcccggataagttggattgggcaaagtggtgtcttgagaccaattgacacccaaagttcttgaaggcatttaagcccagcaagaagcaagggtacccttttggggaagcaaggaaggccaataaaaagtttcagagttcaaaaaaaaaaaaaagaaaaagaaagttttg

SEQ ID NO: 18689 - DNA, 345 bp, Homo sapiens
  SIMILAR (76)..(252): 861254mologous to Rattus norvegicus ribosomal protein L10a,accession number X93352,Smith-Waterman Score=267.
  misc_feature (1)...(345): n = a,t,c or g
gncggcgtgagaagccagtgagcagcaaagtctctcgcgacaccctgtacgaggcggtgcgggaagtcctgcacgggaaccagcgcaagncncngcaagttcctggagacggtggagttgcagatcagcttgaagaactatgatccccagaaggacaagcgcttctngggcaccgtcaggcttaagtccactccccgccctaagttctctgtgtgtntcctgggggaccagcagcactgtgacgaggctaagaactggtcangaagctngccaagaagtatgatgcgtttttggcctcagagtctctgatcaagcagnttccacggantcctcggcccaggttta

SEQ ID NO: 18690 - DNA, 1133 bp, Homo sapiens
  SIMILAR (93)..(560): 381254mologous to Rattus norvegicus ribosomal protein L10a,accession number X93352,Smith-Waterman Score=157.
  misc_feature (1)...(1133): n = a,t,c or g
cgtggtgcaattcgcgcggcgtgagaagccatcgagcagcaaagtctctcagcgacacccgtgtacggaggcggtgcgggaagtcctgcacgggagaccagcgcaagtcgccgcaacgttcctgggagacggtggagttgcagatcagcttgaagaactatgatccccaggaaggacaaagcgctttctcgggcacccgtcaggctttaagtccacttccccgcccttaagttctcttgtgtgtgtcctggggggacccagcagcacgtgtgacgaggcttaaggcccgtgggatatcccccccacatgggacattcgagggcgcttgaaaaaacctcaacaaagaataaaaaaactggtccaaaaaagctggcccaaggaagtattgattgcgtttttttggccctcagaagtctcttgatcaaagcaagattccaccgaatccctccggcccagggtttaaataaagggcaggaaaagtttccctttccctggttcacacacaacggaaaacatgggtgggccaaagttggatgaaggtgaagttccaccaatccaagttttccaaatgaaagaaaggtgtttatgtctgggctgtagctgtttggtcacgtgaatgatgacagaccgatgagcttgtgtataacattcacctgggctgtcaactttcttgggtgtcattgctcaaagaaaaaaactgggcagaatgtcccgggccttatatatcaagagcacccatgggcaaagccccaagcgccttatatttaaggcacattttgaataaattctattaccagttnnnnnnnnnnnnnnnnnnnnnnnnnnnnggggggggcccgttttaaagaatccttgggggggcccaaagtttaccccggcttggcaagtttaaatttttttccttatggggggggatataaaaacctatttgggaatttttggaaaggaacctttcttttgggggggggacttattgggccaacctccctccagaatttaaaggctttagggaaaataaaaaattttaaaggggtaaagggggtaaaaactacctgaatagcttggtggttggaaagttttgcttccggggttggttttaggaaatttttatccccggggctggggtttattat

SEQ ID NO: 18691 - DNA, 555 bp, Homo sapiens
  SIMILAR (239)..(547): 821254mologous to Mus musculus matrin3,accession number AB009275,Smith-Waterman Score=392.
gccagcgccgttgctgcgggggattgtgggagtctccgcgtcccgctcgctgggagagagagttgtctgctggttctcagcttgaagaagattctgcagtccttattgatcctttttcttggcgttaccattttttgaagcaaagttaacctagctttctagtttgagctttctttttggccgtctttaaaaaaaattttttttttaatctataaaatagacaagagctagttctacaatgtccaagtcattccagcagtcatctctcagtagggactcacagggtcatgggcgtgacctgtctgcggcaggaataggccttcttgctgctgctacccagtctttaagtatgccagcatctcttggaaggatgaaccagggtactgcacgccttgctagtttaatgaatcttggaatgagttcttcattgaatcaacaaggagctcatagtgcactgtcttctgctagtacttcttcccataattgcagtctatatttaacattggaagagaggtccactccctttatcttctcaacaccgtggagatgcagacc

SEQ ID NO: 18692 - DNA, 4220 bp, Homo sapiens
  SIMILAR (419)..(2104): 871254mologous to Rattus norvegicus matrin 3,accession number M63485,Smith-Waterman Score=2496.
  misc_feature (1)...(4220): n = a,t,c or g
attcccatgagggacgtcgcaccggaccggaaatcccggaacgacccacgcgaccggacgcgcgcctaaccaagaagagggggagggggctttctttttctcgagagagggatcgttcttgggctgcagccgctgccgccgcttctcgccagcgccgatgctgcgggggattgagggagactccgcgtcccgctcgctgggagagaggaacctctccttttccctctccctttccctaagagttgtctgctggttctcagcttgaaaaagattctgcagcccttattgatcctttttcttggcgttaccattttttgaagcaaagttaacctagctttctagtttgagctttctttttggccgtctttaaaaaaaattttttttttaatctataaaatagacaagagctagttctacaatgtccaagtcattccagcagtcatctctcagtagggactcacagggtcatgggcgtgacctgtctgcggcaggaataggccttcttgctgctgctacccagtctttaagtatgccagcatctcttggaaggatgaaccagggtactgcacgccttgctagtttaatgaatcttggaatgagttctttattgaatcaacaaggagctcatagtgcactgtcttctgctagtacttcttcccataattcgcagtctatatttaacattggaagtagaggtccactccctttatcttctcaacaccgtggagatgcagaccaggccagtaacatgttggccagctttggtctgtctgctagagactcagatgaactgagtcgttatccatcagacacgattactcctgagaatttgcgcccaatccttctacagcttaaaaggaggagaactgaagaaggccctaccttgagttatggtagagatggcagatctgctacacgggagccaccatacagagtacctagggatgattgggaagaaaaaaggcactttagaagagatagttttgatgatcgtggtcctagtctcaacccagtgcttgattatgaccatggaagtcgttctcaagaatctggttattatgacagaatggattatgaagatgacagattaagagatggagaaaggtgtagggatgattctttttttggtgagacctcgcataactatcataaatttgacagtgagtatgagagaatgggacgtggtcctggccccttacaagagagatctctctttgagaaaaagagaggcgctcctccaagtagcaatattgaagacttccatggactcttaccgaagggttatccccatctgtgctctatatgtgatttgccagttcattctaataaggagtggagtcaacatatcaatggagcaagtcacagtcgtcgatgccagcttcttcttgaaatctacccagaatggaatcctgacaatgatacaggacacacaatgggtgatccattcatgttgcagcagtctacaaatccagcaccaggaattctgggacctccacctccctcatttcatcttgggggaccagcagttggaccaagaggaaatctgggtgctggaaatggaaacctgcaaggacctagacacatgcagaaaggcagagtggaaactagcaggagttgtttcacatcatgggtttttcaacggagggaaaaactttgagataccagctattacagctggtagaaccatttggagttcatttcaaattcatctgattcttaaataaaaatttattgagggcatttattgaaatggcaaccacagagggattgcttcaaggccgcagtgggattattacacaaccacaccagcggttagtattttggcaagccagtgagagttcatttatcccagaagtataaaagaataaagaaacctgaaggaaagccagatcagaagtttgatcaaaagcaagagcttggacgtgtgatacatctcagcaatttgccgcattctggctattctgatagtgctgttctcaagcttgctgagccttatgggaaaataaagaattacatattgatgaggatgaaaagtcaggcttttattgagatggagacaagagaagatgcaatggcaatggttgatccattgtttgaaaaaagccctttggtttcaggggagatgtgtgaaggttgacctgtctgagaaatataaaaaactggttctgaggattccaaacagaggcattgatttactgaaaaaagataaatcccgaaaaagatcttactctccagatggcaaagaatctccaagtgataagaaatccaaaactgatggttcccaggaggctgaaaggtccaccggaaggtaaagaacaagaagagaagtccggtgaagatggtgagaaagacacaaaggatgaccagacagagcaggaacctaatatgcttcttgaatctgaagatgagctacttgtagatgaagaagaagcagcagcactgctaggaaagtggccagttcagtggggagacgagcaccgatctttgctaatttagggtgcatgttggcttctgatggggaaaaagggaaccatcagattaaagctgtggaaaaaaggtgggaagtgctttcagcaggcagccaaagaaaaagctttaaaaaggtggacaagatcgaggaacttgatcaagaaaacgaagcagcgttggaaaatggaattaaaaatgaggaaaacacagaacccaggtgctgaatcttctgagaacgctgatgcatcccaacaaagatacaagtgaaaacgcagatgggtccaaagtgatgagaaccaaggacgacttatacaattccccgatgagtatagaattgggaccatatcagcccaatgttcctgttgggtattgactattgtgatacctaaaacagggttttactgtaagctgtgttcactcttttatacaaatgaagaagttgcaaagaatactcattgcagcagcctttccttcattatcagaaatttaaagaaattttctggaataaattgggcagaagaacgcagacagaagaaggaaacttaagatgtgcaaggagatttaatgatttcaaagaaaataatggttctttgtttttaatgttaaccttttttaaatacaatactgatagttagaagaaaactattgtactcttttgttttagtggagaaataatagatgtctgttcatgtgttaagtgttatagcaaaaaaaatacacatatggttaagttaatgaatagtttttgttttatcagaatggcaacagacagaagtactttgtagagattgacttcctaagctacttaagacaacttggcaccactaagaaaaaaatgtaggaaccatttgggaaaaatgaaattttagtagttccagttttcaaagaaatgtcaacattttattccattcaataaagaacaaaaccaatagtgtttttattactttccatctgaaacattccatgttttaatctgaggccttggcaggactttcatttgggagttttggaacccgttttgggttgccatttccattttgggaggacttaattaacgtgagattggccaattggaaatgcaggtgcagtttttcggttaatgtcatgctgttgtttagggtaataaggaaatatttaagtaattgggctttaggattttgtaatttttttccctgagttcctgctagatttcgtattctagtagtcaatgtattttccggtgaaatgccaaaaatattccccattatctttgacccagtattaatttttgagatcttactgcttgtcacttgaatcccgtgattggtccatacatcctctgggtataaagcaacatttggatttttggaagtgtgtagacccatctcttcatattttcaagatgtaattttacaatttctggcatttttaaaacaggttgggccataatcctagatggcacggcttctaattcatgtacctgcacatgtgacctttgtgaacagaaatttgcatgtataatttgtgtttacttggtaactttctgggttatatactgcttatatctgtgggattcaagttactgaagtgaatacccaataaaaggaaaaccctagggccatgttaattgggttatacatgtttgggaatgttaacccaacgtatttgtccagttgtgggttttttattcgctctttaaactttggtggccatgcctttaacaattttatttactttttaaattccagtgtgaatttctaaaggactgnccg

SEQ ID NO: 18693 - DNA, 2114 bp, Homo sapiens
  SIMILAR (195)..(815): 571254mologous to Homo sapiens ADP-ribosylation factor-like protein 4,accession number U73960,Smith-Waterman Score=480.
gcaactgcagagctgcttggagagctaagctggaagggtgcttatccctgcgtagaaacgcctgccaatgctttctcatttggacccagactccagatcgggagcagtcttatagcctggatcagctaccaagagaagttctaaaccaagaagagaaaagcatttcaatttgggacatttatttgcacctggaaatggggaatgggctgtcagaccagacttctatcctgtccaacctgccttcatttcagtctttccacattgttattcctgggtttggactgtgcctggaaaagacaactgtcttatacaaggctgcagtttcaattgaatttgtaaaataccggtaccctacccaaagggatttaacactgagaaaatttaggggtaaccttgggaaattctaaaacagtccacttttcactttctgggatgtaggtggtcaggagaaattaaggccactgtggaagtcatataccagatgcacagatggcattgtatttgttgtggactctgttgatgtcgaaaggatggaagaagccaaaactgaacttcacaaaataactaggatatcagcaaatcggggagtccctgtacttatagttgctaaccaaacaagatttgaggaactcattgtcactttccagaaattgagaaattgttagcaatgggtgaactgagctcatcaactccttggcatttgcagcctacctgtgcaatcataggagatggcctaaaggaaggacttgagaaactaccatgatatgatccattaaaagaagaaaaatgttgcggccaaccagaaaaagaaaagatgaatatcaattccctaatataatctgtgttggagtaggttttctctggtctgattttgacaaaaatagaagagtgtctacagccggggtttgcctgtctgcccctccttggatgctattaaagctttgttttgttgaacaattcagatgcccaactcgtgttgccttgtggaagatgagtaaatgcagtgcttcttaaagtggtctcttctccctaccccacaaatcgttttggtactaccatttggggaagccaagcaaggatagtaaatttgaccagaacacagttgtggggaatttggtctgaaataaatagaaataaaactttaaagagtgtctgcctagtgttttgtgcttacatctttcggggggaagcctttgcaagaaaattgcatacaaggctttgtaacgatcaagtgctaatcgatggaaatgttaaggtagattaacatatatgcagttatattgatcacattggtccaaccagtccttttttgaagtaagggacaaggagtaagtattttcttttttaagtttctgccaaatgatttttgacgctttctggaatcaagtaatttaatagtatagcttaattctagacaatgtttaagttggtctacctttattaaaaataagatatttggggtatattcaagtgcatggattagttttcctgacaaagcatgttttggtgtgtagtcttactttttagaaatagctatgcatcgttctacacaggtttaaaacaacttttttggggatttagggctattataggaatagtttgttgtcagaagcactttcacttgaagaacctaaaatgattgactcattcatagtaaatatgggcatgtaaactaataaatatgccactggatacatatatggatttatgaagaaggcgatttagtccaaggaggatgtaattaaaatatgtggtctctaaaatattcccagttacaagatatttgttttattaatatttgctggctaaaaacaaatgtggtttttatatatttttgtagtgtgttgagaagagcaaaagctttataaatatacctgatgcgctgtagaatgaaaatgtaaaagataacctgtatgtgttccgagctttaattttttgtttacaaattgaacagtgttacatgggctgtccagtcctgattatagagaggaagaaatggtaacagtatggcagataagaattccaattatagaaaatgaggggaaaataacaaacctgttttatgaaaattcactggtgctgtttacattggaataaaaagctctataaggaga

SEQ ID NO: 18694 - DNA, 1103 bp, Homo sapiens
gccgggaaaccggccttattactggagcagttatgtccattgaagattacctcaaaggcaagaattgcctagcttctcctaattatgacccggatgaccagcactcttcttggagagaagacctccctcaatttaagaaagacagggaacatctgacgttggtcaacactcgtcgtaatcggacttataacactaaactaaatcgtttcgaccctgagtattgggtagttgattacaatgccttaatggtagccaccatcattccgtatggttctaagtcttttaaagttccttgtcagtggcgtactaacaaagacttcttaggtgtccgttggatgacggaggatacctttgaccatcatctgtatcgttatgaaacagaccctaattacttaggtctgattctggcttttcgtcataaccctgatgaaccagataaattcacagttactattcagactcctgaaaaagcatatacgtatcgtctggctccatatggattcaataataaaacccgtcgatgggagtgtttggatacaaagtatggaaccaagagaacgtatcaggctgacatctttgtagctactgatgaagatattcctgaatctgaaatgacagaagtctatggcactaaggactatatcttcattctggactttgctgatttacgtacaggtgtggcatttaatggggtaactattaaccctcgtaatatcacaatgatttctttcgactgtactgaagcacatcatggtctagggaaagatgcttacattgccgccatgtataacaatgacgatggtgctactttccagatggaaattgggggtattcatactaatgctgctttagctgctggggataaactccaatgcatctggagatacttggatgttaatggtaatgctccagcagcagagaatgagttcgaagtaacagatggtcctattaaacaagtagactctgttaaatggtttactaaccttactgtatctggttccggtcgtaagcaactgggtcaacgtaaatatccacaagtagtgatgggtatgggcatgacttcaggctttgatgatggctataaccttactcctgagcgtcag

SEQ ID NO: 18695 - DNA, 844 bp, Homo sapiens
  SIMILAR (445)..(795): 281254mologous to Vibrio cholerae pilus biogenesis protein,accession number M93963,Smith-Waterman Score=86.
attagggagattcaattacagcttattaatgagatgactgatgttcatatgggggcattgacggcacagtacatgccggatgactttaccttcgaaccaggaataggacagattcatttcaatgttgagacttccagaaaggtttgtttagaccttgctaagtctgttcttagactggttcctgtttatccattacctactaacaaagatgctctggattttgtaagtaaagcccaatgtcagattttgaaagaatgccagaacttgggaatggagctgtacttccagattggtgagccttggtggtgggatggttcatacaatacaggtgagggtaagaatgccccttgtatttatgaccctaagactatggctttatacaaagaagagacaggtaatgatgtacctactccatggattaaagacatctttgctccagtagaagaacatcagtggccttatgtagattggctatgcaccaaactgggtcaatccactaactacatacgtgactatgtaaaaggtaagttccctgatgcacaggcaacccttctgttctttacaccacagattatgtcccctgcatctgaactaacaggtcgattaaacttccctgagtcagagtgggtattccctaactatgactttgttcagattgaagactatgattggattattgatggaagacttgacctggttccactgacatttgatgctgccgtgaatagactagggtatccattgaatgtagttcactacttcataggattcgtactgttacctgaagatgctaagaaaatctgggctgatgttgataaggcgtggggattggcactagaggcag

SEQ ID NO: 18696 - DNA, 1741 bp, Homo sapiens
  SIMILAR (1372)..(1716): 231254mologous to Homo sapiens keratin, type I,accession number Y16787,Smith-Waterman Score=75.
atgctgggtaatgccactgccggattgagtaatgcattaggtgattttcgaaactctgcaagacagcaagctggtgatgcaattatggctgaagccatgcgttaccaagaccctaatgagtatcgtaatgccttagcttctggagcattatttgctggctatgacccttctctaatttcttctcgtactatggagaacttagataatcgtgctggcaatctgttagaccaagcatctaaacaacaaaatctggatttcactcgatacagtaatgacagaaccatgaaggtaaatgcagctactgatgctgctgcccctgcattacaggaattagctctggcttatcaatctggtgacccaagaaaggttcaggcagcacaggctcagtatggggatgtattaaaaacccttcctgctggtgttgttatggactacatgaacaaccttcaaggacagggtactgctggtattggtcaacgtcgcagcttattcaacttaggtgttgatatacgtaacgatgcggatactcaggctgctatgcagttactgaataatattcgtcgtggtgcatacagtgctgacgatgctcgtatgcttgcagagggtacgttcgaccaaatgtcaccaggagcagtaagtcgtgcactatctcagttagatagagcatatccaggtgcatatactccgggaactggttctgcatccctatctcctcctggtactcagggtactcggaatggttctgcatatgacactacctataagttcacaccaactgatgtacctattactcagatgaacttaggtgaggtggttcagcatcaagacactatgaagaagacactaggtgcttctcctgttggtgcataccagattaaccaagatactcttaaagactttgctccaaaggtatttggtgaagattggcagaacattcctatgtctccggagaaccaagacaaactgggtgaagctatttttaatgcccgtaagaatggcaatctgaagagtacatgggctgctttaccggatgatactcctggtgcttataagaacttgtcatgggatgaaatgaaggattacattgctcaagcagaaacaggtaattctattaatccattacaggaacaagcattcacttctgttgctggtaatactgttggtactcgtaatatgcagaatattggtaatactctgctgccagaataccaagctgctactgttgacccttctacgactggtcaggtggctaaacgtattattgatagcaatgaactgaaaggcattaaccaaggtgcactggttcgacaaatcaatgaggtagcaaaacagaatgctatttctcccgctatggcaggagcaatcattcaacgtagtatcaccgccgtagaagcaaatgcaaaacttgcaactactggtactgctattgaacagaatgctcgtaatcagcttactgcacaaattcaatcaaacatctatgcagcacagaatacgttagatactgcacttgctgatttacgtgaagtacagcgtcgtattcagaccggtcaggaaaaccttagaagtgtactacctcgctatcaggagcgagttaacactgctaaacgtcttcttgatggtgctcgtagtgctgtagctgctgaccctcagaatttggatattaagagcctacaaaatattaaacaggaagagagcgaggcaaaccggagaagtttaggcagagatgccggacgtcgattgg

SEQ ID NO: 18697 - DNA, 7556 bp, Homo sapiens
  SIMILAR (6132)..(3832): 201254mologous to Staphylococcus aureus FmtB,accession number AB015223,Smith-Waterman Score=154.
ctgagtgcctgcattggtaagcagagtatctacatcattccctaatttcttatctgctttaggtacaggcatttctttaatgattgaacgtagttcttcattaaccatagccagacccaggaatgtaggtaacagactggttctgcctttggcatctacttcaaccagattagcaccagagatagtgtcatatttctgttgagcgtagtaacggtcagcagggttagtactatcagggtcagccatgaaatgttctaccgtaaggtgtttcattacatgggtataaagttcctgagcacgagccatagcgtgtgggtcaattgcagcttcagttgctaatgcagcagtaaccatctggaatacagattgttcctgagcagtcatattgaagccacgagactgaacatcacgaactagtcgagtagcactcattaatgcattagccacattgccacgacgttctacttctgtaactgggtcagtacgaaggtaatcagttaccagtttatcgaaggtctgattcaactgagacagacgttcattgttaccatatgctttgctatggaacagtgtgccatctttagctactgcctgagttgtaggttggctacgcatcagaattgcagaattaaacagcagattagagaacatatcttctcccaatgcaggagcttgtttacgtccccaaatcaatttcttaatggcctgataaacatctttcaccatttgaaccagtgaagatgttctcttctgtttagcagccagagcacggttagctaacccccaagccataaactcattaagagcagcagctttagaaatagctgggtcaacaaagccattactcaaatgaccttcaatagttgcaatagcatcagcatatgcttctctcatttctggagaatctttggaaatatccagagaacggaactgttccatcagaccttcaaggttctcaatagcctgcttagaagtagggcttacttcattaccctgatagaaggaataaacttcctcgaaggtagaagcatgaaccagttcatgaatgagggtttccatagatgggctaaccagataaatggtcttatcgtcgaagttagtccagccataaatattacctgcctgagcttcttccatttcctgagaagtcaattcagtaacattcttctgacgagcatattctgcaacctgagtaggtgtaccgtagataatcttatagtctttagctgccagtgatttctgaatctctgcaagagtagctgcctgagtagatggcagattactaatcttagccaggttacgaatagcagtagcagacaggatacgaacaccggatgccttatgctcacggcctaccataccaaagtctggattcactggttctttttcagaaacaatttcttctttgacttcagccttagccttagcgactttttgtttacgggcttctaactcttcacggaaaagtatattcagttcatcagcctgttgttcaggagtcatattgctaaggtcaatcttaccgttgttctgataaggagcacctacagcagccatctggtcaatggacagatttaccttatccagtaccttatggcgaatatctacacccagtgcaatattacgtaagttacgttcaatcaaagatgcagcattagcaatatcatctacagtagcattctcacgttggtcatattccagagcagatttaccaattgcttccaatgcttcaggggacaacttgctgaaatctacattcttcatgaacttagcatatgattcgtaaacattcttaatagggttaccctgccaagaagtgtaaacagcttcattagccttacgactagcatcagtgatgtcattcaaaccaatgttcataccatcaaagattttgagggtattctttggtgcacctttcatagtggaaagagtttgcatcatcatgccatcaccagtaccaatagtcataaatggaatacctgctacaccagcctgtgctggggcatagatactcattggtacacgcatacggtcatcaaggttagtagctaatacctgatttgctacttctgcattttctgagccagcaatgtagaaagtctgagaacctgtctcaatcataggagctaagttattcagagaagcctgaatatcattcagttctttctgagtaaggaaatcgcctttcttccatgtcgggtctttagccttctctgtcagcttctcctgtactcgctgtttgaacatatcttccagcactacagattgaatctgagtagctttctgtaattgttcagtggagtacaccagactttcacctacagtctgagtaataccattacgtagtggttctacaaagaagtgcagcatattttcctgaagtgccttcagttgctcacccttaatggtataggtcttaggattgattttccctttggctcctgcacctgtggattgtagttccagtacacctttacgtttaacaggaacagtagaagtcagtgtttccatatctttcaggaaacgagcaagaagttcttcagcatgtgcttctgaagcagcttgcttaccaaacattgccatagcagcagagatgtttgggtctttagcacgagctttcagcacatcagacatacgctcatagatggcatcagtaacagaactaaccagcttacctgcaataccacgagcaccagaaccatagatggtaatagtcagcgggttcttagcaataccacgtttaagttctaaagcaccattctcaccaagattaatatccggtaggaacaaatccatcagagaaagaagactgtctatctgggactgaataggcatattagaagcatagttactacgtaacttacccaacgattccatcaaagcattagtggatgcttgatataaatcattattgtcagcagtagaacgatgctcattcatggtcttatttggagaaccaatgaacaagccccctttggcaatattacgaatccagtcaggagtaaacaggccacctgtcattagcatcatggcattgattggaccattagtaacaccatctgcttctacatacagtggggttacaaatgcagatttatcctctgctactaagtaacgggaatactccataagagccatcaatgctacgaatgacttcctatctcctaatgctgtattcagaacatcaactgcattttctggtaaggaaccagtggtattaaactcaaccatcatatcaatggctggtttcagattaccttccagtaatttagtcaactcgtcagacataacctcacgagtcatagtatggactttaatgtccaatgcctgagccagacctaactggaatgcagagaagtcttcattgttctggttcgataaatccaaagtagctttagtaggtaggatagcctcacgaaccagtttggctgattgaggattgtatttacctaacatctgcatacgaccaacacgggtcatattgtatgcatagtgaataggcacagtagagatgtcttcactctgtgctcttacctgctcaatgacggagaacagttggttgtaagagtcctctactgaacggttcttaccttccagagatttagcatgattatcattaagtaactctttattcagagtaccagcacccatcagttcgagaatacggtctttacctaacgtctcatagaattgaaccattggagtgtgtacatagaactctgtagcctgttctgctttcaatgcagccttctgttctggagtattacgaacagcagggttacgaagctgagtattagctacaggaggaatgtcatcaccaaagaacatcttctctgtaggatttactaaaacagcttcttcaatagcagtagggaagctattaattgggtcgaaggaatccagttcagtaatggtgtacagaccaatcgtcttcttattatctgggtcaatttctgacatatccacgatgttctctacaacatcagtagactctacaaatgcagccagaatttcagcagccattgcttctggcagcagggcttggtcaataccagtaatagcagcaacatcttttgcatctttgatagcagtattgctggtagcagtaagtctccactgaagacccgctaatacagcagtctgtagcaattgctcattgtacttaaaggtatccccatcctgttcaacgatgttaagtaacttaccgcctacccaacggttggcttctgtaccctgagcaaaacgtttaccaacatccttagtgttaaggaacttagccagacgggaacgaagaatatcagcaataccttccccatgttccatgagttctttatatcgcttaataacttccccattaaaagcaggattagcaacttctttctcagtaaagagttcataacgagcacgagaagacagagcttgagctacctcttttagaggtgcttctgaaccaacagtacgggatttctgttcttccggtaaggtaaaggacaatttgaaatagttcttaataccctctgctttagaatcagcagtacctaccaatgaggggtaaacagcatcgataccttctcttaattcttctgtaactgtgctttcttttgcagaagtttcagtttctttaacagattcagtaggttgcttgatggtgtcctcattagtaaggttaacatcccgtttttcagactggctcacaggttcttttatagcctgtggtctagactctttagtagtaggttctgttttaacaggttcactaacaggagtcttagtctgtacagtagatgtaactggttcctgttttgtaacaggagtttctttaacctgattcacggagtcagctttctgttgagaaaaagcaacgtctcgattgccttgacggaatgccttgaccacctcagcagcaggggcgttaagacgtgaatccaatggagtaacttttatatgactgaccttcagttccgggtaagccgaagcgagggcattagcaatatccgctaccgttttcgcttcaagagcaacttgctgggcaaatttaaccgacttagtgtcatagggattgacccccaatccggtacggctacgaacccattctctgtcagcagtaagagcttggtagtggacagacttattcttatccgcattccccgtaacaagatgctcattcaacgctccaaccttattctgcatgtgctgggcgaactgcataaagtcgttcaggtaagcggaggccaactcgaaattaccagagttatacgcagaccgaatcctattcgcatgttgcaacgcagagtattgtccttcctgagttctgctctcatccgttttaatctgtttactcacaatgtcttgaggacgtaatccaagacgggcagcttctgcatcatattcccgtgcccccttcaggattgcagcagcattctgaagggcagcaatttggcgattattcagtttaatacgaccatcagcagcatgtttaagaacaacatttacagattctggattgagcttttcaggagctacttcagcagctaatgctacgttctgcatttcctgtggactggattcttcagtcacatccaaagaaccattctgggcagattcattaatcattcgattaataacattcagtgcaccaattacttttggtgtgttctgaatattagctgtcagatttgtataacgattgagtaactcaatagccggagaatctttaggaatactatccagtgcagcagggtcacggttaatgaattgctcaaactctgaaacagcatcatacatataagatgcagcttccatcagtgcttgaggattagattcatctaatgtgttaactaggtctgctaacttttgaataacctgtacttggtcagtagaaccagctacagcattacgaatatgctctggtgcttcctgataattttcaggattaaaacgagtagcattcattaagtcagaaacatactggtgtgctgcaactttctgttccggagtagcatcagttgcttcaacagcatcacgaatagtaacttctgcttctggtgcttgagccatagcttcttgtgctgcctgtgcaacatagtcatcagcaacaggagatgcttcttcattctgcttcataacccgctcaccacgagctaccaaagtgttcttaataggggaaacaaccttacctgctacactaccagcagctttaacaccagccattgtggtacgcaatacaggagcagttgcagcacctgctaaacgagcagcaccagccggagcctgtacaacaccagcagaaccaaagccataaagagcacctaaaccagcttgtgtaccgacacctttaagcaggtcttggttcttatcaatgttttgttgctgtgcaatattctgagccagttggcctgtagcaccctgaacaccttcttccactgtttcacgggcaaggttcatacctacagcacctaaagaaccagcacggaaaggagccatctcaaaacgagataccagaggaccagttgcagcagcaataggtaattgaatagcagcagcagtaagaccagtttcagatgcagtctgacgacgagcctgttctggagacataccatctttaatatgttgttgataaacaggagacttctctaagtctttaagactcatcttcataatttcatcagcagtttgttggtatgcaccaccagcttccattgcaccaacaccaactatacctggtgcagctctgcctacagtagaagcaatacgagccagggactgagtaccagtacctgcatcaatagcaccagccaatgcagcactacgaagagtatttgctggaacaactgctttacccagtaaagatgcaccccttaatacaggaccagcacctaatagagaacctaccccttctgctaacccatcagaaataatggagtcagtttgggcagcgttctcaattgaacctacaaaatcacgtccaaatttagataaggaagctactatgtcattagtgccttctttcttatctgtttgatactgacgttcactctctacttcactcattaagttacgagcagcaaagagcttacgtttatcttgtaatgcttggctttgggtagcatggacagcatcattaaacttactcaattgttgagcaacaacagcacctgcatcatcgttgagtaagcctgccccaagagcaccaatgcccccaagggtattaacaaaaccaagaccaacaccagtagcaatatcccccagttcttccccaggagttcttgtagtaactgaatcattgaatacctggttccctgcatcagcacgagcgttgataagttgtaagccttgctcaaccccatacttattcatgatttgcattggagtcagattcatgaaatctgattgcactgtccctggttcaaatgcattagccccaacattaccagtacgggcagcttgcatttgataagcagcatcaggagaaacaagaggagtagtgacaccttgttcagctttcttctgggcggttgcagtagagacgtcaacttgctttgcattggttacgctgt

SEQ ID NO: 18698 - DNA, 6764 bp, Homo sapiens
  SIMILAR (5415)..(4771): 231254mologous to Rattus norvegicus rat GCP360,accession number D25543,Smith-Waterman Score=97.
ttagtgggtaaggttgaaccaaggattgagggttggtgctcttagtccttgtccgaagcctaatgaataatccagtcttccttcagccagcatggttaacatgttgtcctgaattggcagacctacattaccaaacatggcaggagcaggtactactgtagcaatcagagaatgtactgggttgtttctaatcatgctcatagcaactttaatggaacgaatcttaaagttgtagaaccacatcagacccatgctttccatataaccacggaaacgaccaggcaatctgtcatagttaacaaactcttcagttacttgacctaatgcttcagaagaggatttcttcttacgtttcactaaatcatcatagatgatggctttagcaatgaagtccgaatactctactgttttctggataccctggaacagagcagtgtccttagcaataagagcataacggccagcattacgtactttttctggaagtttattagcaagtttttccatgtactcatgaatcttaccttcagctactaacaggtcatcacgactaataccagcatcagcaatagaagagaactcacctgcttcaatcaaaggccagatgctcatacgacgatggctatcagtaatagattgaatctcggttttaagtttacgaaccagattaggattgccttcagcagcacgtaattctgcttctgcatcaatctgacgtaagcgagatttaatgtactgattaatctctgacgtcttacgaggaatattcacagcaatatccttaacaggaacaccacgtccaatcatctggtagatgttagcaaggaagttaactgccggtactacaacagatttaacaacaattactgtcttagcatccttcaccaagttctgaatggtattttcagcattcattactacatgatatgccttattaccaaatgcaccgaggaacatcttcttaacagtatcaagggtgctaggtgaccaacgagagttaccagtccatacatcaccaatagatgcagcacgatagccaagtgcatcattcagcatatccctacgaacccataactcatctttaccaaagagttcttcggccttatggcgagtctcaatgttcatcaggttaattgcatcagccagtactgggtcatcaattttacctaacaggtttacatattgagatttattagcactggagtctttaatgtctttctcatacatagcatgtaattgctcaatgagaatgtcattaaaacgttgtgctttagcctcttccacctgacgaccacgccatacacccaccatcttagcaaagtgattgtcttggtttagatgcttcaacatattagggtcgacggattgctcataagcaactacctgacctttgctgttataaattggcatcagcggttcacgtccacgttcacctttagccagagctttggtaatacgctctacggttggtttgtcagtaatacgaccagcaaccatagtacctaacgtaaagcctgtaccaatatccacaccaccagcagtattacgaacgttctgaagaataccttgagagtatggggcacgggcagctactgggctgaagtaataacctttagaaccagtacgtaaaccagtgcttccctgataagtaccaatacgagtaaaagattggctatttaacttagcaaactctttatcgtcagcaataatcaaattcacaccttgctggttctctacagggatatagcccttaaagtgattcagcaaagtacggttatcacctttagctttacgcatctcttcagtacgttgacccaccatataagcaatggagaactccataccctccacttctgattgagccaattctgacaaaaggccacggtcagacttattcatcaattccagagagtacaaagtaatgagcttatcaatagcagctacatctgccacaggaccattagtaatacgttcacctaataaacgactaatagcatgggcattacgaaggaggttattacctacctcccctgtaatcatgtattgagccagttgcttagatttcttctgaaccagattccagtttctacctgcttggttctgaatctctttttccagagtagagatttcatctttcactttcttaggtgaagagagtaaatctctaatttcagccatgctcatagtttcacgtagaacagctaaatctgttttacctaaaccagtatgcattgcagaccactcggtatcagtcagtttacgggaaaacttaccagcaatgactgtaggtaaatgctcacggaattgttgacggtcttgagaaatctggctcttaaccaatttgattaagtcatagacattggcattagtcttagtacggccaacaatgtcattaactaagtcatggaaaggatgccatactttaccctggttcatagcagtcataacaccctgagccactatctcaccttgtttgtcagatgcaatagcagcagtcagtctagccagatgagcaacacctttagcagctacattagaaggattagcaattaccttatctgccttctcaataacagtttcagataaccgttcaatgctatctgttacgtactgattagcacggtcaatgaaattaccggtaggggttgctacagcatcatagaaggactctcgtttcagagcagcagccatgattgtttctgacagagcatcaatactgtcctgaacattagtagctttctgagtgcctgcattggtaagcagagtatctacatcattccctaatttcttatctgctttaggtacaggcatttctttaatgattgaacgtagttcttcattaaccatagccagacccaggaatgtaggtaacagactggttctgcctttggcatctacttcaaccagattagcaccagagatagtgtcatatttctgttgagcgtagtaacggtcagcagggttagtactatcagggtcagccatgaaatgttctaccgtaaggtgtttcattacatgggtataaagttcctgagcacgagccatagcgtgtgggtcaattgcagcttcagttgctaatgcagcagtaaccatctggaatacagattgttcctgagcagtcatattgaagccacgagactgaacatcacgaactagtcgagtagcactcattaatgcattagccacattgccacgacgttctacttctgtaactgggtcagtacgaaggtaatcagttaccagtttatcgaaggtctgattcaactgagacagacgttcattgttaccatatgctttgctatggaacagtgtgccatctttagctactgcctgagttgtaggttggctacgcatcagaattgcagaattaaacagcagattagagaacatatcttctcccaatgcaggagcttgtttacgtccccaaatcaatttcttaatggcctgataaacatctttcaccatttgaaccagtgaagatgttctcttctgtttagcagccagagcacggttagctaacccccaagccataaactcattaagagcagcagctttagaaatagctgggtcaacaaagccattactcaaatgaccttcaatagttgcaatagcatcagcatatgcttctctcatttctggagaatctttggaaatatccagagaacggaactgttccatcagaccttcaaggttctcaatagcctgcttagaagtagggcttacttcattaccctgatagaaggaataaacttcctcgaaggtagaagcatgaaccagttcatgaatgagggtttccatagatgggctaaccagataaatggtcttatcgtcgaagttagtccagccataaatattacctgcctgagcttcttccatttcctgagaagtcaattcagtaacattcttctgacgagcatattctgcaacctgagtaggtgtaccgtagataatcttatagtctttagctgccagtgatttctgaatctctgcaagagtagctgcctgagtagatggcagattactaatcttagccaggttacgaatagcagtagcagacaggatacgaacaccggatgccttatgctcacggcctaccataccaaagtctggattcactggttctttttcagaaacaatttcttctttgacttcagccttagccttagcgactttttgtttacgggcttctaactcttcacggaaaagtatattcagttcatcagcctgttgttcaggagtcatattgctaaggtcaatcttaccgttgttctgataaggagcacctacagcagccatctggtcaatggacagatttaccttatccagtaccttatggcgaatatctacacccagtgcaatattacgtaagttacgttcaatcaaagatgcagcattagcaatatcatctacagtagcattctcacgttggtcatattccagagcagatttaccaattgcttccaatgcttcaggggacaacttgctgaaatctacattcttcatgaacttagcatatgattcgtaaacattcttaatagggttaccctgccaagaagtgtaaacagcttcattagccttacgactagcatcagtgatgtcattcaaaccaatgttcataccatcaaagattttgagggtattctttggtgcacctttcatagtggaaagagtttgcatcatcatgccatcaccagtaccaatagtcataaatggaatacctgctacaccagcctgtgctggggcatagatactcattggtacacgcatacggtcatcaaggttagtagctaatacctgatttgctacttctgcattttctgagccagcaatgtagaaagtctgagaacctgtctcaatcataggagctaagttattcagagaagcctgaatatcattcagttctttctgagtaaggaaatcgcctttcttccatgtcgggtctttagccttctctgtcagcttctcctgtactcgctgtttgaacatatcttccagcactacagattgaatctgagtagctttctgtaattgttcagtggagtacaccagactttcacctacagtctgagtaataccattacgtagtggttctacaaagaagtgcagcatattttcctgaagtgccttcagttgctcacccttaatggtataggtcttaggattgattttccctttggctcctgcacctgtggattgtagttccagtacacctttacgtttaacaggaacagtagaagtcagtgtttccatatctttcaggaaacgagcaagaagttcttcagcatgtgcttctgaagcagcttgcttaccaaacattgccatagcagcagagatgtttgggtctttagcacgagctttcagcacatcagacatacgctcatagatggcatcagtaacagaactaaccagcttacctgcaataccacgagcaccagaaccatagatggtaatagtcagcgggttcttagcaataccacgtttaagttctaaagcaccattctcaccaagattaatatccggtaggaacaaatccatcagagaaagaagactgtctatctgggactgaataggcatattagaagcatagttactacgtaacttacccaacgattccatcaaagcattagtggatgcttgatataaatcattattgtcagcagtagaacgatgctcattcatggtcttatttggagaaccaatgaacaagccccctttggcaatattacgaatccagtcaggagtaaacaggccacctgtcattagcatcatggcattgattggaccattagtaacaccatctgcttctacatacagtggggttacaaatgcagatttatcctctgctactaagtaacgggaatactccataagagccatcaatgctacgaatgacttcctatctcctaatgctgtattcagaacatcaactgcattttctggtaaggaaccagtggtattaaactcaaccatcatatcaatggctggtttcagattaccttccagtaatttagtcaactcgtcagacataacctcacgagtcatagtatggactttaatgtccaatgcctgagccagacctaactggaatgcagagaagtcttcattgttctggttcgataaatccaaagtagctttagtaggtaggatagcctcacgaaccagtttggctgattgaggattgtatttacctaacatctgcatacgaccaacacgggtcatattgtatgcatagtgaataggcacagtagagatgtcttcactctgtgctcttacctgctcaatgacggagaacagttggttgtaagagtcctctactgaacggttcttaccttccagagatttagcatgattatcattaagtaactctttattcagagtaccagcacccatcagttcgagaatacggtctttacctaacgtctcatagaattgaaccattggagtgtgtacatagaactctgtagcctgttctgctttcaatgcagccttctgttctggagtattacgaacagcagggttacgaagctgagtattagctacaggaggaatgtcatcaccaaagaacatcttctctgtaggatttactaaaacagcttcttcaatagcagtagggaagctattaattgggtcgaaggaatccagttcagtaatggtgtacagaccaatcgtcttcttattatctgggtcaatttctgacatatccacgatgttctctacaacatcagtagactctacaaatgcagccagaatttcagcagccattg

SEQ ID NO: 18699 - DNA, 1174 bp, Homo sapiens
  SIMILAR (928)..(740): 331254mologous to Eimeria maxima unnamed protein product,accession number A49225,Smith-Waterman Score=92.
ttaacgagttaagcgattagctgcaatgtaagcatcagccgtagattggtcacgattttctgcaacagcacgactacgagcacggtcttccagagcagtgttataggacttaatctggttattcagattagtgttagtaacatctttagcaaaagagaactgattcttagctaacttgttagcctgtaatgcaccatagatattacccagtgcattaagaccacctaaccccaactggaatgtaggaatgttcagacccagttggtcagtaagcccttgagtctgcccaccggtattccctgtagcaccaccagtaatattctgaagccagtcattactaaggatgccagattgcatagggttatagttcatggttggggtattaaaggaaccatacccatagccaaaattgctattagttaggttcattgcgtcaatgtaacccatgccctcagtgccaaacatttcctcgtacttttcctgaatggtttttatctggtcacggtactctgccataagtttctctgtctttttgacagtttccatagcagaagcattgatgtaatcacttatgccatttcctacagatgaagtgagtttaatgatgttgtctgctttcatcatttcacccagcatcgtagacatggatgaaccagtggataaagctgtgccgacattcatggctaccatagaggcaatagtagcaacaatgattccaatcttatccccaagcagactaacagagactgtttgaataatggacatcagaatcatagctgcaatggcattagccacagccccaacgataatagcagctaaccctgcaaaacctaatgcagcaccaatagaagcagcagtacccattaccccagcaccagcagcaggagtaaagaacacagacactactactgcaacaacaaccactactactttaaaaatgccagactgataccatttcttcttaactttcttatatgagttaagaaccagataacaacatgcagtagataactgagtaccatttaccaaagacatactacgataaatgttgttatgaagagggatgataaatccggactcttcatcatcatttagtgcatctacaccagaaatgcttacagatttattcttgtaaacattattgttatggttcaggccatagacagaaatcttc

SEQ ID NO: 18700 - DNA, 1698 bp, Homo sapiens
  SIMILAR (1251)..(1469): 361254mologous to Halobacterium sp. NRC-1 glycerol-3- phosphate cytidyltransferase; TaqD,accession number AE005020,Smith- Waterman Score=77.
gtgattttcgaaactctgcaagacagcaagctggtgatgcaattatggctgaagccatgcgttaccaagaccctaatgagtatcgtaatgccttagcttctggagcattatttgctggctatgacccttctctaatttcttctcgtactatggagaacttagataatcgtgctggcaatctgttagaccaagcatctaaacaacaaaatctggatttcactcgatacaaaaaggttcaggcagcacaggctcagtatggggatgtattaaaaacccttcctgctggtgttgttatggactacatgaacaaccttcaaggacagggtactgctggtattggtcaacgtcgcagcttattcaacttaggtgttgatatacgtaacgatgcggatactcaggctgctatgcagttactgaataatattcgtcgtggtgcatacagtgctgacgatgctcgtatgcttgcagagggtacgttcgaccaaatgtcaccaggagcagtaagtcgtgcactatctcagttagatagagcatatccaggtgcatatactccgggaactggttctgcatccctatctcctcctggtactcagggtactcggaatggttctgcatatgacactacctataagttcacaccaactgatgtacctattactcagatgaacttaggtgaggtggttcagcatcaagacactatgaagaagacactaggtgcttctcctgttggtgcataccagattaaccaagatactcttaaagactttgctccaaaggtatttggtgaagattggcagaacattcctatgtctccggagaaccaagacaaactgggtgaagctatttttaatgcccgtaagaatggcaatctgaagagtacatgggctgctttaccggatgatactcctggtgcttataagaacttgtcatgggatgaaatgaaggattacattgctcaagcagaaacaggtaattctattaatccattacaggaacaagcattcacttctgttgctggtaatactgttggtactcgtaatatgcagaatattggtaatactctgctgccagaataccaagctgctactgttgacccttctacgactggtcaggtggctaaacgtattattgatagcaatgaactgaaaggcattaaccaaggtgcactggttcgacaaatcaatgaggtagcaaaacagaatgctatttctcccgctatggcaggagcaatcattcaacgtagtatcaccggtaaaccagagggatggtttagtggtattcgaaatgcctttgatactgatgttattgatttgggtggtgattaccaactggataaagcagccgtagaagcaaatgcaaaacttgcaactactggtactgctattgaacagaatgctcgtaatcagcttactgcacaaattcaatcaaacatctatgcagcacagaatacgttagatactgcacttgctgatttacgtgaagtacagcgtcgtattcagaccggtcaggaaaaccttagaagtgtactacctcgctatcaggagcgagttaacactgctaaacgtcttcttgatggtgctcgtagtgctgtagctgctgaccctcagaatttggatattaagagcctacaaaatattaaacaggaagagagcgaggcaaaccggagaagtttaggcagagatgccggacgtcgattgg

SEQ ID NO: 18701 - DNA, 938 bp, Homo sapiens
  SIMILAR (464)..(937): 231254mologous to Rattus norvegicus myosin heavy chain,accession number X04267,Smith-Waterman Score=106.
gaggattggtgtggcaataagtaagaagaaggttggcggtgttggaggggttattgcagcaatcattgctgctgtatttgctgttgagggtggatacgttaatgaccccaaagacccaggaggtgaaactaatcatggtgtaactattcaggttgctcaaaagcataagcaagaactagagtcgatgtataactgggatggttcaatgaagaacttaactcaggaaatggcatcaagtatttattacaacgattacatcttgaagcctggctttgttaagtttgcagatgtatcaccagcggtaacagaaaaactagtagatgctggtgttaatactggacctgcaagaccatctcgttggttacaagaatctcttaatgctttctccagaaatggcaaagactaccctaaaatacaagttgatggtaaagtcggttctggaactctaagtgcatataaaagccttcagaataaacgaggcaaagtagaagcctgggtagctctgggagctaccctttttcttcttggttcacaacatggtgaaaagaaagttcaagcactatgggatgaagataagaaggagtactcaaaagaacttgatagagtaaaactggcttatgaccaaaagaatcgggaacacagttatgaagtcgggcaacttacccttcgacttgataaagccaaagagtcttatgaagtcgttattgattctattactaaccagtacaatagtcggttgctccagtcagaaaaacgagccgagagttataaacgtcaagcctcaaccggaaccactcaatgcctcaatcttgcaagccatgcagccagactcgactcaagtcttgaagaaggcagacgtttggttgaagaactcagggcaactgttagactccgtgataaccaactgattgaactggggaaccagattcgttctgacc

SEQ ID NO: 18702 - DNA, 410 bp, Homo sapiens
  SIMILAR (149)..(382): 291254mologous to Homo sapiens Human secreted protein, SEQ ID NO: 4305,accession number G00224,Smith-Waterman Score=70.
ctccctacagatgctgtcataaaaggacagatactctgctgcctttgctgaactctctgggtatttcagagaagtgtaataacggtaagcaatgtaggcatccaaagctgggtcaagggtatcaggaatgtctatctcattatagccatcctctgctgtagacagtttaggatgtttagcctgatacattacgttcaatactccccatgcttttggagcaattgttctgtagaacgtttggcctgctaagtccataatgaagggacacttcacttcatttgggtcataagactgaacagcatacttagctagtaatgggtagttggttctaccttcttgcatctcaacaaccacgttgttgttacgcatgttgaagcgaccatgcagacgagtcagtgcctcattagcag

SEQ ID NO: 18703 - DNA, 1692 bp, Homo sapiens
  SIMILAR (374)..(580): 321254mologous to Mus musculus immunoglobulin heavy chain,accession number U21569,Smith-Waterman Score=90.
cttccgtggtgttaaattcactgaatttaacctgaacacgaccgacatctacgattagagaaccataaggtactttatagattccgtgcataccacgagagtacatgatacccataccttccaatggggcatcaagtaaagaaccatctggtttagcaatcttcaatacgaaggaactatcagtatgactcttcagttgtgccgtaagctgagtaccatcggtaggtaacagtaagctaaatgtaacagtagaatctatgataagagtactgtgatataccgttaactcaccagatactgtatcgaatgcacaataagtacccgaatcccaatcagatacagcagcccaaccaccacctgaatatttcagttgtgcttctgcttcaccaaccataaccagtacagcagcccctgccgtaacactggagaatcgtggggtcagtggagccttgcctgtaggggtaatgaaagtcatcactggttctacagtctgaaggctaggtggatatccaagagtgatgccaccatatgcatctacattcagagtcactgcactggaaggcatgatacgggtattcacaccggagattgctttagcagttaggtctgctttaaaacggagtggggcagtaacagatacagtagctgtattgtcagtagtagatgcacccataatcaggccatccaatgccatttgttgactaggtgctaccaacaaaccactaactttaccggctttataattaagaaccaggttagctactgcaccagcagtaggggcattcatgttgatggaaccagtagctaacgaccatactccaccagtagaggtcagtttacctgctacagcataaccacctttgtcattatccatagtaataagctgacggagcattgcacctactgtattagctgcataagtctgtgcctgattaaagccaatcagacctgcaccttcagcagtagcatacttttcatggtcagcaatgattgtgtctagctgctctgcaatggtaactaagtcacctaatctggcatgtacagctaatagttcagtcatgtgattatccaaatcaagcagtgctgccatattggtattcacattcttaatcgcattgatattagtacttactgtattaacagcatcaatggaaccagcaacggtattcacgttggtaatgctattagcaacagtaattactttatcaatttgagcagaaacaataattactttagcaatatcagttgctactgtattaactgcgtcaatgttagaagctacagtattgattggagtcaggttgtcatagaccctcagcaatgcctgaagattgtcatatagaccagtcagtttagataattgattgtagagttcctgtaacttatccagattattatgaataagttgtagttcatctagcttagtgtagatagcagatagctcagttaactccctacagatgctgtcataaaaggacagatactctgctgcctttgctgaactctctgggtatttcagagaagtgtaataacggtaagcaatgtaggcatccaaagctgggtcaagggtatcaggaatgtctatctcattatagccatcctctgctgtagacagtttaggatgtttagcctgatacattacgttcaatactccccatgcttttggagcaattgttctgtagaacgtttggc

SEQ ID NO: 18704 - DNA, 595 bp, Homo sapiens
  SIMILAR (510)..(61): 271254mologous to Zymomonas mobilis secretion activator protein,accession number D17522,Smith-Waterman Score=92.
ttaattaatggtgtcttcattacacctctccagagggacattaccaatacgattagcaatccatcctgtagtgtactcaggcatattaagagataaatagtagtttaactgtttaccatctagagccttcaaaatgagcttacaggcttctactttgcctcgtttattctgaagggttttatatgcacttagagttccagaaccgactttaccatcaacttgtattttaggggaggctttggcatttctggagaaagcattaagagattcagcatctactagtttttctggtaccggtggtgatacatctgcaaacttaacaaaggcaggcttcaagatgtaatcggtgtaataaatacttgatgccatttcctgagttaaggtcttcattgaaccatcccaggtatacatcgactctagttcttgcttatgcttttgagcaacctgaatagttacaccatgattagtttcacctcctgggtctttggggtcattaacgtatccaccctcaacagcaaatacagcagcaatgattgctgcaataacccctccaacaccggcaaccttcttcttacttattgccacaccaatcctc

SEQ ID NO: 18705 - DNA, 209 bp, Homo sapiens
  SIMILAR (77)..(172): 441254mologous to Aplysia sp. R15-1 neuroactive peptide precursor,accession number M17535,Smith-Waterman Score=52.
ctcacgagtagttagttgttctgtggttatcttctctatctctgcatagatagggctattaatgccaccaggaatatcatactcactgccagacatgtcgatgtcaggaagcgtaaaatcctcacctttggtaactcgaatgttcaggaacttacgttctttgaggaagttataaatacagtaagggatgtgatagccctcatcagtag

SEQ ID NO: 18706 - DNA, 932 bp, Homo sapiens
  SIMILAR (134)..(511): 301254mologous to Arabidopsis thaliana arabinogalactan- protein,accession number AF082302,Smith-Waterman Score=106.
cagaggaccagttgcagcagcaataggtaattgaatagcagcagcagtaagaccagtttcagatgcagtctgacgacgagcctgttctggagacataccatctttaatatgttgttgataaacaggagacttctctaagtctttaagactcatcttcataatttcatcagcagtttgttggtatgcaccaccagcttccattgcaccaacaccaactatacctggtgcagctctgcctacagtagaagcaatacgagccagggactgagtaccagtacctgcatcaatagcaccagccaatgcagcactacaaagagtatttgctggaacaactgctttacccagaaaagatgcaccccttaatacaggaccagcacctaagagagaacctaccccttctgctaacccatcagaaataatggagtcagtttgggcaggggtctcaattgaacctactaaatcacgtccaaatttagataaggaagctactatgtcattagcgccttctttcttatctggttgatactgacgttcactctctacttcactcattaagcgacgagcagcagagagcttacgtttatcttgtaatgcttggctttgggtagcatggacagcatcattaaacttactcaattgttgagcaacaacagcacctgcatcatcgctgagtaagcctgccccaagagcaccaatgccctcaagggtgttaacaaaaccaagaccaacaccagtagcaatatcccccagttcttgcccaggagatcttgtagtaactgaatcattgaatacctgggtcccattaccagtacgggcagcttgcatgtgataagcagcatcaggagaaacaagaggagtagtgacaccttgttcagctatcttctgggcggttgcagtagagacgtcaacttgcttcgcattggttacgctgt

SEQ ID NO: 18707 - DNA, 1107 bp, Homo sapiens
atgtccattgaagattacctcaaaggcaagaattgcctagcttctcctaattatgacccggatgaccagcactcttcttggagagaagacctccctcaatttaagaaagacagggaacatctgacgttggtcaacactcgtcgtaatcggacttataacactaaactaaatcgtttcgaccctgagtattgggtagttgattacaatgccttaatggtagccaccatcattccgtatggttctaagtcttttaaagttccttgtcagtggcgtactaacaaagacttcttaggtgtccgttggatgacggaggatacctttgaccatcatctgtatcgttatgaaacagaccctaattacttaggtctgattctggcttttcgtcataaccctgatgaaccagataaattcacagttactattcagactcctgaaaaagcatatacgtatcgtctggctccatatggattcaataataaaacccgtcgatgggagtgtttggatacaaagtatggaaccaagagaacgtatcaggctgacatctttgtagctactgatgaagatattcctgaatctgaaatgacagaagtctatggcactaaggactatatcttcattctggactttgctgatttacgtacaggtgtggcatttaatggggtaactattaaccctcgtaatatcacaatgatttctttcgactgtactgaagcacatcatggtctagggaaagatgcttacattgccgccatgtataacaatgacgatggtgctactttccagatggaaattgggggtattcatactaatgctgctttagctgctggggataaactccaatgcatctggagatacttggatgttaatggtaatgctcaagcagcagagaatgagttcgaagtagtaagctatgaaggctttggtacttctaacttctctggtaaatgcaaaggtatgctcccagactctgttaaatggtttactaaccttactgtatctggttccggtcgtaagcaactgggtcaacgtaaatatccacaagtagtgatgggtatgggcatgacttcaggctttgatgatggctatacccttactcctgagcgtcag

SEQ ID NO: 18708 - DNA, 355 bp, Homo sapiens
  SIMILAR (233)..(54): 261254mologous to Bacteriophage T4 dihydrofolate reductase,accession number M12742,Smith-Waterman Score=58.
actctgttaaatggtttactaaccttactgtatctggttccggtcgtaagcaactgggtcaacgtaaatatccacaagtagtgatgggtatgggcatgacttcaggctttgatgatggctatacccttactcctgagcgtcaggttgctattcacttcatgtctggtgcataccctgaccgtggctatgatgtattccagaagtacatgactgaaacttggggcattaactatgcaggtgtacgccctattaatgggacaactggttctactgctgtagaccgtgcatgtgcagttaatcctgattctgaagtatttgaccctacccaatcatccgatgcaggtggtctttggtg

SEQ ID NO: 18709 - DNA, 1400 bp, Homo sapiens
agcaagtaggtaagctcaagcctaaagctattattggggggcaaggtgaccaagatgccactgctttggcatatccaggtgaccgtgacccagcaccatcattaaccagaaccaagcaagctactaagaaggtatttgagtatcttcgtagtttgtatggacagattcctatcttcattcaggaactgagctatgcatggggcatcactaacactgatgaacctaatgtacctattcgtacaggattaccttctttcctggcagcccgtcgtaatacatggggagatattgagttccgttggaagtcttacggattagaccctgcattagctcaatatcgtattgaaatctataacccttctaatttgaaccagatacttcactcatttgtagtatcaggtactcaagaagcaaatggttatgtatatgctgacttcactgtagaagactggattcctgtaatgatggaagcggttggttctcctaatccgtgggagttcatgaagtggcgagtagtttgtctgtatcaggaaagagaaattccttcagcaccttggtcagataacattcctttggataatgcagggcttgttaagaagaccattctggtaggtattaaccagtttggtggtggacactttactgatatgtctgacccaactgctaccacagctaatggtgcaattggtcgtaaagacaaggtatctgcttctacgttacgtctgacttttgcagagaaagctggattacgtcctattcaggtaatgcctattaacgtagctgctgatagtgcagctactgttactgtacgtgataaacagattcagatggctacagctaatataggctttaaactgggttcctttgttcctggttctaacctgtacactgcgtaccgtaatgtggaatccagttggatttactacacggtagaagcattccatgccacagccattgagctaggtgaagcactggctcttaatgttaaccgtgctactaatccacctgattggtcttacttgcgcccaccagcaaatctgcaaggtcgtaagttagctactcgtgatattaagatgacatgggataaccgtgctgggattacccactggaagtatgctaaccgtcatgtcaccacaggggcagaaatctcttctggtatcctcaccagtcccgagtatgtgtttaccctgaatgaccagcaaaatgcttataacggggacactcttaatatgagtttctctgtttctgagtatgctgctgattctggtgcagtaggtgcatcttcttcctttgtaggggtagtccagaatggttcctatatgcagactcctagtcaactgaaagctgctaaacagcttaatggtgacattatcttcacttgggtaggacgtccttcatga

SEQ ID NO: 18710 - DNA, 1540 bp, Homo sapiens
  SIMILAR (1087)..(1533): 271254mologous to Litomosoides sigmodontis microfilarial sheath protein SHP3,accession number U54556,Smith-Waterman Score= 107.
atggaagcatgtatggctaatgctgtgcaattcctcaccactaaagaccaggcttattggaatgctgttactgctcaggtagctgcaattactgctcgtgctaatcttggtattatcaaagctaactttgttacagctaagattcaggctctggctactaaagctgaatatgcccttactaagctgaagctgtctaatgagtcagtaacttactgtactgctcaatacaatctatcctctatgcttcctcaacaattactgatgttgaagaaccagaccactcaggttgctgaacagactaagttaactactgaacaaatcaatatgacgaaagagcagaaggaagcacaacgtgctcagacttctgatactcgtactgatggtactcgtgtagctggttctgtaggtaaacagaaagaactctatgaccaacagattacgtcttataaacgtgatgctgaagttaaagctgccaaactgtttactgatgcatgggtcactcagaaaaccattgatgagggtctgtctcctcctaatggcttcactaacaccagtctggatagcattcttactgcattgagaataacaacgcatgcgggggatatacataaacgtcccaattatttcaagactacggtgattggtaccatcgtcagtaaatctgactttagtatgggtgataccatcactaactcttatttaaatggacctggtattcgtttacgtagattccctggttggcctgcacctaactatgacccttcaattggtattgcttatgggaccttgtcaatactgtctcagatagaccctgaagtagttaaatgccaagttcctcaaaaagcaggttatgaggtacaggttcagaccagtaggattggatttggtgattttgaggaatgggctgataaattcctctatgagaattatccaggccgtattactgaagagtttgaaatagacatcatggatgatgccaggattgtactcactgctactgatggtagtgagttatccttttatccagagaattacagtcaggatgcaatgtatctgtatgtgaactattactacatacagcctactagtgttgcagacccagtggttcatcctgctgtatctgtaccatctgctgatgacttaccttctacttctgaatggactcaggtatctcagccccatactcctaagtcagctaccctgaagccagttactcatattaagagtgtattctctgatggcagacctgatgaggaaagtaccaatactgaagaagaacaggttagttggactaacttctcagatgtttacgagaaagaatttcgtgaaccaagtgaagtaggcttaatcattattcgtaagactacaatgacccaggtacagactggtactgtatctactggttccactacaaacactgaagttattgatttaggtggtggggttactgaaaccagaactactacagtaactacagatactttaggttatacatggtcttatcagaatacagatgtagttactactatgtctgctggtg

SEQ ID NO: 18711 - DNA, 549 bp, Homo sapiens
atgattaacaatgtgacccaagaccagacagcagcagagcaaattagaaataactttgtgacttatgctggggtgatgaaggatggaaagtttaagacccaggattatcttaatgctgttcaatatgttacttacaaacacatggggtatagcaacaaagatgcttacttcaaaacattccccaacagacaagctgaattagtagcaaggggaaccagtgagaaggacatctctgcttatgtatctgcttaccataggggatttgttcaggaagcattgaaccatcaggcatggctcatgaagaatgctaccagtgagaaggtacagtgtgatgctgccaactctatccttactcacctccagaaaccgaaggatgctgttactaatatcaatctggatttgagagaaaactctggattgactgaactcaagaacacactaacccagttggctgaagctcagaaagcagctattgaagctggtacacctactaaagtaattgcaggttccacactggttcgagaagacgaggatattattgatgtctga

SEQ ID NO: 18712 - DNA, 2717 bp, Homo sapiens
  SIMILAR (2379)..(1492): 241254mologous to Staphylococcus simulans lysostaphin,accession number U66883,Smith-Waterman Score=143.
agtctgagtaatagcattacgtagtggttctacaaagaagtgcagcatattttcctgaagtgccttcagttgctcacccttaatggtataggtcttaggattgattttccctttggctcctgcacctgtggattgtagttccagtacacctttacgtttaacaggaacagtagaagtcagtgtttccatatctttcaggaaacgagcaagaagttcttcagcatgtgcttctgaagcagcttgcttaccaaacattgccatagcagcagagatgtttgggtctttagcacgagctttcagcacatcagacatacgctcatagatggcatcagtaacagaactaaccagcttacctgcaataccacgagcaccagaaccatagatggtaatagtcagcgggttcttagcaataccacgtttaagttctaaagcaccattctcaccaagattaatatccggtaggaacaaatccatcagagaaagaagactgtcttccagtaatttagtcaactcgtcagacataacctcacgagtcatagtatggactttaatgtccaatgcctgagccagacctaactggaatgcagagaagtcttcattgttctggttcgataaatccaaagtagctttagtaggtaggatagcctcacgaaccagtttggctgattgaggattgtatttacctaacatctgcatacgaccaacacgggtcatattgtatgcatagtgaataggcacagtagagatgtcttcactctgtgctcttacctgctcaatgacggagaacagttggttgtaagagtcctctactgaacggttcttaccttccagagatttagcatgattatcattaagtaactctttattcagagtaccagcacccatcagttcgagaatacggtctttacctaacgtctcatagaattgaaccattggagtgtgtacatagaactctgtagcctgttctgctttcaatgcagccttctgttctggagtattacgaacagcagggttacgaagctgagtattagctacaggaggaatgtcatcaccaaagaacatcttctctgtaggatttactaaaacagcttcttcaatagcagtagggaagctattaattgggtcgaaggaatccagttcagtaatggtgtacagaccaatcgtcttcttattatctgggtcaatttctgacatatccacgatgttctctacaacatcagtagactctacaaatgcagccagaatttcagcagccattgctgtagggatacctttggtataacccaatggagcatttggattacgagataatccccagtaagactcaattttctgagccagggaactaactgcttcagtgagtgtcataccagtatcaaattgctctactaaaccttctggcagcagggcttggtcaataccagtaatagcagcaacatcttttgcatctttgatagcagtattgctggtagcagtaagtctccactgaagacccactaatacagcagtctgtagcaattgctcattgtacttaaaggtatccccatcctgttcaacgatgttaagtaacttaccgcctacccaacggttggcttctgtaccctgagcaaaacgtttaccaacatccttagtgttaaggaacttagccagacgggaacgaagaatatcagcaataccttccccatgttccatgagttctttatatcgcttaataacttccccattaaaagcaggattagcaacttctttctcagtaaagagttcataacgagcacgagaagacagagcttgagctacctcttttagaggtgcttctgaaccaacagtacgggatttctgttcttccggtaaggtaaaggacaatttgaaatagttcttaataccctctgctttagaatcagcagtacctaccaatgaggggtaaacagcatcgataccttctcttaattcttctgtaactgtgctttcttttgcagaagtttcagtttctttaacagattcagtaggttgcttgatggtgtcctcattagtaaggttaacatcccgtttttcagactggctcacaggttcttttatagcctgtggtctagactctttagtagtaggttctgttttaacaggttcactaacaggagtcttagtctgtacagtagatgtaactggttcctgttttgtaacaggagtttctttaacctgattcacggagtcagctttctgttgagaaaaagcaacgtctcgattgccttgacggaatgccttgaccacctcagcagcaggggcgttaagacgtgaatccaatggagtaacttttatatgactgaccttcagttccgggtaagccgaagcgagggcattagcaatatccgctaccgttttcgcttcaagagcaacttgctgggcaaatttaaccgacttagtgtcatagggattgacccccaatccggtacggctacgaacccattctctgtcagcagtaagagcttggtagtggacagacttattcttatccgcattccccgtaacaagatgctcattcaacgctccaaccttattctgcatgtgctgggcgaactgcataaagtcgttcaggtaagcggaggccaactcgaaattaccagagttatacgcagaccgaatcctattcgcatgttgcaacgcagagtattgtccttcctgagttctgctctcatccgttttaatctgtttactcacaatgt

SEQ ID NO: 18713 - DNA, 1680 bp, Homo sapiens
  SIMILAR (475)..(888): 211254mologous to Equine rotavirus VP4,accession number D13398,Smith-Waterman Score=110.
gataaagaaacgggtgagttaatcacagaacagactgtattagattacccaattctatttgctggtgaatctcaggttgctattcacttcatgtctggtgcataccctgaccgtggctatgatgtattccagaagtacatgactgaaacttggggcattaactatgcaggtgtacgccctattaatgggacaactgggtctactgctgtagaccgggcatgtgcagttaatcctgattctgaactatttgaccctaccaatcatccgatggcagtgtcctttggtggttattgctgcgaaacacttaatgacccaatcgttgataagatgattggtaatgcttactacgttgttaagttcgtagcattacgaatgacctttattaaaaatgtcagtgataatatgactcagctacttgctatccataacaagttaactgagctatctgctatctacactaagctagatgaactacaacttattcataataatctggataagttacaggaactctacaatcaattatctaaactgactggtctatatgacaatcttcaggcattgctgagggtctatgacaacctgactccaatcaatactgtagcttctaacattgacgcagttaatacagtagcaactgatattgctaaagtaattattgtttctgctcaaattgataaagtaattactgttgctaatagcattaccaacgtgaataccgttgctggttccattgatgctgttaatacagtaagtactaatatcaatgcgattaagaatgtgaataccaatatggcagcactgcttgatttggataatcacatgactgaactattagctgtacatgccagattaggtgacttagttaccattgcagagcagctagacacaatcattgctgaccatgaaaagtatgctactgctgaaggtgcaggtctgattggctttaatcaggcacagacttatgcagctaatacagtaggtgcaatgctccgtcaggttattactatggataatgacaaaggtggttatgctgtagcaggtaaactgacctctactggtggagtatggtcgttagctactggttccatcaacatgaatgcccctactgctggtgcagtagctaacctggttcttaattataaagccggtaaagttagtggtttgttggtagcacctagtcaacaaatggcattggatggcctgattatgggtgcatctactactgacaatacagctactgtatctgttactgccccactccggtttaaagcagacctaactgctaaagcattctccgggttctgtgcccggtataggttgggaaacacaaacccacatttaaaatttacggggggtggttgggctgctgtatctgattgggattcgggtacttattgggcattcgatacagtatctggtgagttaacggtatatcacagtactcttatcaaagattctactgttacatttagcttactgttacctaccgatggtactcagcttacggcacaactgaagagtcatactgatagttccttcgtattgaagattgctaaaccagatggttctttacttgatgccccattggaaggtatgggtatcatgtactctcgtggtatgcacggaatctataaagtaccttatggttctctaatcgtagatgtcggtcgtgttcag

SEQ ID NO: 18714 - DNA, 3951 bp, Homo sapiens
  SIMILAR (2188)..(2547): 211254mologous to Homo sapiens immunoglobulin heavy chain variable region,accession number AF103340,Smith-Waterman Score=83.
gtaaccaaccctcaacgtatggaacagcctccatatcaggccgagtgtgaggatattatccaagcactgaatatgacctttgatgaagggtgtctgttcaaggcattgtggcgtaatgctgctgctcgtttaggtaatggtaaaccaggtaacaatgccgtttatgatgcagagaagatggttcattatgctaaccgcatttttattaaagaatccgctgggcagaaaaaagaagcagaagaaccagtttctgcggctctgaagaagggtgaagagattcatatgtctctgtctgaattattcaccctggtaactggtgaagcagcagaagatagattcacagttactattcagactcctgaaaaagcatatacgtatcgtctggctccatatggattcaataataaaacccgtcgatgggagtgtttggatacaaagtatggaaccaagagaacgtatcaggctgacatctttgtagctactgatgaagatattcctgaatctgaaatgacagaagtctatggcactaaggactatatcttcattctggactttgctgatttacgtacaggtgtggcatttaatggggtaactattaaccctcgtaatatcacaatgatttctttcgactgtactgaagcacatcatggtctagggaaagatgcttacattgccgccatgtataacaatgacgatggtgctactttccagatggaaattgggggtattcatactaatgctgctttagctgctggggataaactccaatgcatctggagatacttggatgttaatggtaatgctcaagcagcagagaatgagttcgaagtagtaagctatgaaggctttggtacttctaacttctctgttaaatgcaaaggtatgctcccaggtaagttcataggatgtgatgcattctatggtaaatacttacagacagatggtcctattaaacaagtagactctgttaaatggtttactaaccttactgtatctggttccggtcgtaagcaactgggtcaacgtaaatatccacaagtagtgatgggtatgggcatgacttcaggctttgatgatggctataaccttactcctgagcgtcaggataaagaaacgggtgagttaatcacagaacagactgtattagattacccaattctatttgctggtgaatctcaggttgctattcacttcatgtctggtgcataccctgaccgtggctatgatgtattccagaagtacatgactgaaacttggggcattaactatgcaggtgtacgccctattaatgggacaactggttctactgctgtagaccgtgcatgtgcagttaatcctgattctgaagtatttgaccctacccaatcatccgatgcaggtggtctttggtggtgggatttagaagcagataaacccggtcctgcattactatattgtgtagagcaagtaggtaagctcaagcctaaagctattatttgggggcaaggtgaccaagatgccactgctttggcatatccaggtgaccgtgacccagcaccatcattaaccagaaccaagcaagctactaagaaggtatttgagtatcttcgtagtttgtatggacagattcctatcttcattcaggaactgagctatgcatggggcatcactaacactgatgaacctaatgtacctattcgtacaggattaccttctttcctggcagcccgtcgtaatacatggggagatattgagttccgttggaagtcttacggattagaccctgcattagctcaatatcgtattgaaatctataacccttctaatttgaaccagatacttcactcatttgtagtatcaggtactcaagaagcaaatggttatgtatatgctgacttcactgtagaagactggattcctgtaatgatggaagcggttggttctcctaatccgtgggagttcatgaagtggcgagtagtttgtctgtatcaggaaagagaaattccttcagcaccttggtcagataacattcctttggataatgcagggcttgttaagaagaccattctggtaggtattaaccagtttggtggtggacactttactgatatgtctgacccaactgctaccacagctaatggtgcaattggtcgtaaagacaaggtatctgcttctacgttacgtctgacttttgcagagaaagctggattacgtcctattcaggtaatgcctattaacgtagctgctgatagtgcaggtatgacggtaggtactcacaaatggtggaatacttccagtaattccccaggtgatgcactactggctattaacgatatggttaaaggtttgggtgttaaacctgattacttcattgaagctaatccgtgggaaaccatgtatatgaaggatgttaattcttctacatggcctgctttaatgactgcttttgaatcgtctaacaaagcaatgcttgcatggatgagaaccaactggggcaaccctaatctggagatttggttccagggggctactactgtttggtttggtgttgctccacctaatgaccttaactctgaagctactgttactgtacgtgataaacagattcagatggctacagctaatataggctttaaactgggttcctttgttcctggttctaacctgtacactgcgtaccgtaatgtggaatccagttggatttactacacggtagaagcattccatgccacagccattgagctaggtgaagcactggctcttaatgttaaccgtgctactaatccacctgattggtcttacttgcgcccaccagcaaatctgcaaggtcgtaagttagctactcgtgatattaagatgacatgggataaccgtgctgggattacccactggaagtatgctaaccgtcatgtcaccacaggggcagaaatctcttctggtatcctcaccagtcccgagtatgtgtttaccctgaatgaccagcaaaatgcttataacggggacactcttaatatgagtttctctgtttctgagtatgctgctgattctggtgcagtaggtgcatcttcttcctttgtaggggtagtccagaatggttcctatatgcagactcctactcaactgaaagctgctaaacagcttaatggtgacattatcttcacttgggtaggacgtccttcatggcaacacttctgggtagtgaataccagtgttaatgattctaagactgttatcttctctaaagaatggtctagtgaatctctaacatggactgttgcagaacagaacgagttctacggcctggaagaaggtggtgctactcatgtcatcttcatggtatctgagtatgacccaagtaacggattagtatctattggtgctcaagttactggtcaaacagagcagccatctaatccaatgaatcctgttgctggattgtatgcagtgttcaccggtgacccaggtaactctaatattaagattatgtgggataaaccttctgttggtggacgtgatgttcgtattcgaaatatgcatgtaacgtccagtgcaactattagtgaccagtttgtatctgataacaatcttgtgttcacacgagaagaacaggtagctgcttatggctttactgcttcaagcgtatctgttcgtgctcaagaacatgatattgaatcaggtgcattgggtcttactactgagtatgttgctgtaccggaaacagcaggaacagttggacagggctttgctaagaaagactctgtaggtaactgtactatgtcatgggaagtaggtgatgctgtccaatggcaggttgagattatcaatgctgagaactctactgttgttaaaacagagattgttgtagcacctacaatcacttggacggctgaagaaattacagccgagtatggttacctgactgaccatatggtttggcgagtaagaccttatcgtgcagatggggcatctaac

SEQ ID NO: 18715 - DNA, 6448 bp, Homo sapiens
  SIMILAR (4037)..(4363): 911254mologous to Homo sapiens putative p150,accession number U93572,Smith-Waterman Score=499.
ctttcagtttagctttcttcgcagcagtatctttagttaccagattttgctgaaagtcaggctggctcatatgacccaagtagctgacgttcaggaatacaatatcccgtacatctaccacttgaccaaaacggtcattcagattctgaaacagagcagactgagcacgtcccagaatggttctttggatgtgactgaagaatccagtgcacaggaaatgcagaacgtagcattagctgctgaagtagctcctgaaaagctcaatccagaatctgtaaatgttgttcttaaacatgctgctgatggtcgtattaaactgaataatcgccaaattgctgcccttcagaatgctgctgcaatcctgaagggggcacgggaatatgatgcagaagctgcccgtcttggattacgtcctcaagacattgtgagtaaacagattaaaacggatgagagcagaactcaggaaggacaatactctgcgttgcaacatgcgaataggattcggtctgcgtataactctggtaatttcgagttggcctccgcttacctgaacgactttatgcagttcgcccagcacatgcagaataaggttggagcgttgaatgagcatcttgttacggggaatgcggataagaataagtctgtccactaccaagctcttactgctgacagagaatgggttcgtagccgtaccggattgggggtcaatccctatgacactaagtcggttaaatttgcccagcaagttgctcttgaagcgaaaacggtagcggatattgctaatgccctcgcttcggcttacccggaactgaaggtcagtcatataaaagttactccattggattcacgtcttaacgcccctgctgctgaggtggtcaaggcattccgtcaaggcaatcgagacgttgctttttctcaacagaaagctgactccgtgaatcaggttaaagaaactcctgttacaaaacaggaaccagttacatctactgtacagactaagactcctgttagtgaacctgttaaaacagaacctactactaaagagtctagaccacaggctataaaagaacctgtgagccagtctgaaaaacgggatgttaaccttactaatgaggacaccatcaagcaacctactgaatctgttaaagaaactgaaacttctgcaaaagaaagcacagttacagaagaattaagagaaggtatcgatgctgtttacccctcattggtaggtactgctgattctaaagcagagggtattaagaactatttcaaattgtcctttaccttaccggaagaacagaaatcccgtactgttggttcagaagcacctctaaaagaggtagctcaagctctgtcttctcgtgctcgttatgaactctttactgagaaagaagttgctaatcctgcttttaatggggaagttattaagcgatataaagaactcatggaacatggggaaggtattgctgatattcttcgttcccgtctggctaagttccttaacactaaggatgttggtaaacgttttgctcagggtacagaagccaaccgttgggtaggcggtaagttacttaacatcgttgaacaggatggggatacctttaagtacaatgagcaattgctacagactgctgtattagcgggtcttcagtggagacttactgctaccagcaatactgctatcaaagatgcaaaagatgttgctgctattactggtattgaccaagccctgctgccagaaggtttagtagagcaatttgatactggtatgacactcactgaagcagttagttccctggctcagaaaattgagtcttactggggattatctcgtaatccaaatgctccattgggttataccaaaggtatccctacagcaatggctgctgaaattctggctgcatttgtagagtctactgatgttgtagagaacatcgtggatatgtcagaaattgacccagataataagaagacgattggtctgtacaccattactgaactggattccttcgacccaattaatagcttccctactgctattgaagaagctgttttagtaaatcctacagagaagatgttctttggtgatgacattcctcctgtagctaatactcagcttcgtaaccctgctgttcgtaatactccagaacagaaggctgcattgaaagcagaacaggctacagagttctatgtacacactccaatggttcaattctatgagacgttaggaattactatggaacaaaacactgattctatggttccattgccagacccaagccaagctactaagttaactagctggaagaatgaaccttccttgcaagcacttaaagcagacttggatgcagcaaagccatctcatactgccatgatgattaaggtcaaagaatggaatgaccttatgcgtattgaaggcaaagccaagccacctaaagtcaaaggacgttcacaggtacagcctaaacttgtacgtcgtcaagctgaatggcgttattctgctttaactgaacctttccttggttctaataagttattcaaagttactcctgtaacttgggaagatgtacaaggtgcacgccagaatgaactggttcttaactaccaattccgtaccaaactaaatcgtgtaagtttcattgataactatgttcgttcagttgttgatgatggtactggtattgttcgtgttggttggaacagggaaattcgtaaagagaagcaagaagttcctgtatttagtttgttccctattcaaacacaagaacaagctgatgctttacaacaggctctacaacttcgtacagataaccctcgcggttatgaagagaatgtagatgaagctattaaggaatcagtacgtttctttgatgaaacgggacaagcaacgtatgcagtacaaactgggacaactacaactgaagttgaagttcctttagcaaaccatcctacggtggaaatgctaaacccagagaacattattatcgacccttcatgtcagggtgatattaataaggcaatgtttgccattgtctcttttgaaacttgtaaggcagacctgcttaaagagaaagaccgttatcacaatctaaataagattgattggcaaagctctgctcccgttaatgaaccagaccatgcaaccactactcctcaagaatttcagattagtgaccctatgcgtaagcgtgtagttgcttatgaatattggggattctgggatattgaagggaatggtgtattagagcctatcgttgctacttggattggttctacccttattcgtttagagaagaatccttatcctgacggcaaactcccatttgtattaattccgtatatgcctgttaaacgggatatgtatggcgaaccagatgcagagttattaggtgataaccaagcagtacttggtgctgtaatgcgtgggatgattgacttacttggacgtagtgccaatggtcaacgtggtatgcctaaaggtatgcttgatgccctgaatagtcgtcgttacagggaaggtgaggattatgaatacaatcctacacaaaaccctgctcaaatgattattgagcataagttccgtgaattgccacaatcagcactgactatggctacccttcagaaccaggaagcagaatctcttactggtgttaaagcatttgctggtggggtaactggtgagtcttatggtgatgtagctgctggtattcgtggtgtattagatgctgcttctaaacgtgagatggctatccttcgtcgtttagctaaaggcatgtctgaaattggtaataagattattgctatgaatgctgtgttcttggcagagcatgaagtagtacgtattaccaatgaagaatttgtcactattaaacgtgaagacctgaaaggtaactttgaccttgaagtagatatttctactgctgaagtagacaaccaaaagtcccaagacttaggctttatgcttcagactattggtccaaacgtagaccagcaaatcactttgaatattcttgcagagattgctgacttgaaacctcaaaatctccttaagctgataaggaacttcagcatagtctcaggatacaaaatcagtgtgcaaaaatcacaagcattcctatacaccaataacagacaaacagagagccaaatcatgagtgaactcccattcacaattgcttcaaagagaatcaaatacctaggaatccaacttacaagggatgtgaaggacctcttcaaggagaactacaaaccactgctcaatgaaataatagaggatacaaacaaatggaagaacattccctgctcatgtgtaggaagaaccaatatcgtgaaaatggccatactgcccaagataatttgtaggaagactatgagcacactactgactaagacagacattgattctgcattggcttcccagtttaaaagcagtgttactgaccaactggtaaacatgattaacaatgtgacccaagaccagacagcagcagagcaaattagaaataactttgtgacttatgctggggtgatgaaggatggaaagtttaagacccaggattatcttaatgctgttcaatatgttacttacaaacacatggggtatagcaacaaagatgcttacttcaaaacattccccaacagacaagctgaattagtagcaaggggaaccagtgagaaggacatctctgcttatgtatctgcttaccataggggtaagttagtaaacctcattatggaacaatcactgattccagtatggattgttaatcaggatttgtttcaggaagcattgaaccatcaggcatggctcatgaagaatgctaccagtgagaaggtacagtgtgatgctgccaactctatccttactcacctccagaaaccgaaggatgctgttactaatatcaatctggatttgagagaaaactctggattgactgaactcaagaacacactaacccagttggctgaagctcagaaagcagctattgaagctggtacagtaactacggcaacttctttacgtcaccagcaacgcttagaacaattaaagctggttcgagtacgtattcagaaccttgaccctaagaagaaagacctgcctggtgatgatcttacgcttcctgacatcgacatgtctggcagtgagtatgatattcctggagtcattactcgccctatctatgcagagatagagaagctaaccacagaacaactaactactcaccaggcttattggaatgctgttactgctcaggtagctgcaattactgctcgtgctaatcttggtattatcaaagctaactttgttacagctaagattcaggctctggctactaaagctgaatatgcccttactaagctgaagctgtctaatgagtcagtaacttactgtactgctcaatacaatctatcctctatgcttcctcaacaattactgatgttgaagaaccagaccactcaggttgctgaacagactaagttaactactgaacaaatcaatatgacgaaagagcagaaggaagcacaacgtgctcagacttctgatactcgtactgatggtactcgtgtagctggttctgtaggtaaacagaaagaactctatgaccaacagattacgtcttataaacgtgatgctgaagttaaagctgccaaactgtttactgatgcatgggtcactcagaaaaccattgatgagggtctgtctcctcctaatggcttcactaacaccagtctggatagcattcttactgcattgaagaataacaacgcattgggattccctggttgggctgcaactaactatgacccttcaattggtattgcttatgggaacttgtcaatactgtctcagatagaccctgaagtagttaaatggcaagttcctcaaaaagcaggttatgaggtacaggttcagagcagtaggattggatttggtgattttgaggaatgggctgataaattcctctatgagaattatccagaccgtattactgaagagtttgaaatagacatcatggatgatgacaggattgtactcactgctactgatggtagtgagttatccttttatccagagaattacagtcaggatgcaatgtatctgtatgtgaactattactacatacagcctactagtgttgcagacccagtggttcatcctgctgtatctgtaccatctgctgatgacttaccttctacttctgaatggactcaggtatctcagaaccatactcctaagtcagctaccctgaagacagttactcatattaagagtgtattctctgatggcagacctgatgaggaaagtaccaatactgaagaagaacaggttagttggactaacttctcagatgtttacgagaaagaatttcgtgaaccaagtgaagtaggcttaatcattattcgtacagactggtactgtatctactggttccactacaaacactga

SEQ ID NO: 18716 - DNA, 32313 bp, Homo sapiens
  SIMILAR (19866)..(24821): 151254mologous to Streptococcus cristatus srpA,accession number U96166,Smith-Waterman Score=184.
atgagcacactactgactaagaaagacattgtttctgcattgcctccccagtttaaaagcagtgttactgaccaactggtaaacatgattaacaatgtgacccaagaccagacagcagcagagcaaattagaaataactttgtgacttatgctggggtgatgaaggatggaaagtttaagacccaggattatcttaatgctgttcaatatgttacttacaaacacatggggtatagcaacaaagatgcttacttcaaaacattccccaacagacaagctgaattagtagcaaggggaaccagtgagaaggacatctctgcttatgtatctgcttaccataggggtaagttagtaaacctcattatggaacaatcactgattccagtatggattgttaatcaggatttgtttcaggaagcattgaaccatcaggcatggctcatgaagaatgctaccagtgagaaggtacagtgtgatgctgccaactctatccttactcacctccagaaaccgaaggatgctgttactaatatcaatctggatttgagagaaaactctggattgactgaactcaagaacacactaacccagttggctgaagctcagaaagcagctattgaagctggtacacctactaaagagttggatgaatggctagaccaagtggactattccgttctgaatacccctacgtatataccaaccgaatttgcactgacctttgctaactttattaagctggttaatggtaaggagggggaatcaaacaaaacccctcctgttcacttaaagatgctggataagataaccagtaagaatcagtacattgctaacttatgtttccgtggtgcagcaaagacaactctgttcatggaatactttactttgttcttagcagtgtttgggcatctacctagcttgggtaaagtagaaggaatgatttatgtatctgactctatggataacggtgttaagtctgcccgtaagaacattgagtttcgatacaacaattcaccattcctgcaacaatggattcctaaagctaccttcacagataactaccttgagtttgtaaatgctgaaggtcaccgtcttggtgtgaagatgtttggtgctaagacaggtcttcgtggtactaagatttttggtaaacgtcctgttctttgtgtactggatgacttagttagtgatgatgatgctcgctcacgtacatcaatggaagccattaaagacacggtatataagggtgtgaaccatgctcttgacccaacaagacgtaaggtaatctttaatggtactccctttaataaggaagatattcttattgaagcagttgaatctggtgcttgggatgtcaacgtatggcctgtatgtgagaaattcccatgtacgcgagaagaatttcaaggtgcttgggaagaccgtttctcctatgactacatcaatgaccaataccagatggcattgaagacaggtaagctggcatccttttatcaggaattgatgttacgtatcagctctgaagatgaacgtctgattcaagattcagagattaaatggtattcccgtacgcagctattacgtctacgttcttgttataacttctatatcaccactgactttgctaccagcgagaagcaggtatctgactactctgtaatatcagtatgggcatatggttctaacggtgactggttctgggtagatggtattgcttgccgtcaaactatggataagaactttgatgacttattccgtctggttcaggaataccaaccacaacaagttggtgtagaaactactggacagcaaggtggttttatttctcttcttcagaaggaaatgcttaaccgtaatgtgttctttaactttgcatccagtcgtggaggccaaccgggtattcatcctgtaaccagtaagctatcaaggtttaacctcgtggttccctggttcaaagctggtaagatgtattttcctgctgaaatgaaagatagcccaatcatgacactctttatggggcaaattcgtttagccactatcaatggtcttaaaggtaaggatgactgtattgataccatttcaatgcttggctacctgaacccgtggaaaccacaagcaggtatcgttacagatgacaaaggtgacattgaagatgatagtaagcctttcattatcgtagctgctaatgaggcactgactcgtctgcatggtcgcttcaacatgcgtaacaacaacgtggttgttgagatgcaagaaggtagaaccaactacccattactagctaagtatgctgttcagtcttatgacccaaatgaagtgaagtgtcccttcattatggacttagcaggtgagaagtttgctgaggatgttattcgtattctggaagtgtatgacgataagggtcgtagacgtccgttgaatgaccgaaataatcctcacagtttgttcaccccaaggccaaacgttctacagaacaatgctccaaaagcatgggaagtattgaacgtaatgtatcaggctaaacatcctaaactgtctacagcagaggatggctataatgagatagacattcctgatacccttgacccagctttggatgcctacattgcttaccgttattacacttctctgaataccccagagagttcagcaaaggcagcagagtatctgtccttttatgacagcatctgttattgctgcgaaacacttaatgacccaatcgttgataagatgattggtaatgcttactacgttgttaagttcgtagcattacgaatgacctttattaaaaatgtcagtgataatatgactcagctacttgctatccataacaagttaactgagctatctgctatctacactaagctagatgaactacaacttattcataataatctggataagttacaggaactctacaatcaattatctaaactgactggtctatatgacaatcttcaggcattgctgagggtctatgacaacctgactccaatcaatactgtagcttctaacattgacgcagttaatacagtagcaactgatattgctaaagtaattattgtttctgctcaaattgataaagtaattactgttgctaatagcattaccaacgtgaataccgttgctggttccattgatgctgttaatacagtaagtactaatatcaatgcgattaagaatgtgaataccaatatggcagcactgcttgatttggataatcacatgactgaactattagctgtacatgccagattaggtgacttagttaccattgcagagcagctagacacaatcattgctgaccatgaaaagtatgctactgctgaaggtgcaggtctgattggctttaatcaggcacagacttatgcagctaatacagtaggtgcaatgctccgtcaggttattactatggataatgacaaaggtggttatgctgtagcaggtaaactgacctctactggtggagtatggtcgttagctactggttccatcaacatgaatgcccctactgctggtgcagtagctaacctggttcttaattataaagccggtaaagttagtggtttgttggtagcacctagtcaacaaatggcattggatggcctgattatgggtgcatctactactgacaatacagctactgtatctgttactgccccactccgttttaaagcagacctaactgctaaagcaatctccggtgtgaatacccgtatcatgccttccagtgcagtgactctgaatgtagatgcatatggtggcatcactcttggatatccacctagccttcagactgtagaaccagtgatgactttcattacccctacaggcaaggctccactgaccccacgattctccagtgttacggcaggggctgctgtactggttatggttggtgaagcagaagcacaactgaaatattcaggtggtggttgggctgctgtatctgattgggattcgggtacttattgtgcattcgatacagtatctggtgagttaacggtatatcacagtactcttatcaaagattctactgttacatttagcttactgttacctaccgatggtactcagcttacggcacaactgaagagtcatactgatagttccttcgtattgaagattgctaaaccagatggttctttacttgatgccccattggaaggtatgggtatcatgtactctcgtggtatgcacggaatctataaagtaccttatggttctctaatcgtagatgtcggtcgtgttcaggttaaattcagtgaatttaacaccacggaaggccgggaaaccggccttattactggagcagttatgtccattgaagattacctcaaaggcaagaattgcctagcttctcctaattatgacccggatgaccagcactcttcttggagagaagacctccctcaatttaagaaagacagggaacatctgacgttggtcaacactcgtcgtaatcggacttataacactaaactaaatcgtttcgaccctgagtattgggtagttgattacaatgccttaatggtagccaccatcattccgtatggttctaagtcttttaaagttccttgtcagtggcgtactaacaaagacttcttaggtgtccgttggatgacggaggatacctttgaccatcatctgtatcgttatgaaacagaccctaattacttaggtctgattctggcttttcgtcataaccctgatgaaccagataaattcacagttactattcagactcctgaaaaagcatatacgtatcgtctggctccatatggattcaataataaaacccgtcgatgggagtgtttggatacaaagtatggaaccaagagaacgtatcaggctgacatctttgtagctactgatgaagatattcctgaatctgaaatgacagaagtctatggcactaaggactatatcttcattctggactttgctgatttacgtacaggtgtggcatttaatggggtaactattaaccctcgtaatatcacaatgatttctttcgactgtactgaagcacatcatggtctagggaaagatgcttacattgccgccatgtataacaatgacgatggtgctactttccagatggaaattgggggtattcatactaatgctgctttagctgctggggataaactccaatgcatctggagatacttggatgttaatggtaatgctccagcagcagagaatgagttcgaagtagtaagctatgaaggctttggtacttctaacttctctgttaaatgcaaaggtatgctcccaggtaagttcataggatgtgatgcattctatggtaaatacttacagacagatggtcctattaaacaagtagactctgttaaatggtttactaaccttactgtatctggttccggtcgtaagcaactgggtcaacgtaaatatccacaagtagtgatgggtatgggcatgacttcaggctttgatgatggctataaccttactcctgagcgtcaggtaaagatggcctatggcttaggataccgtgactggtggactacttatattggcatgtcccactactggaagggtcttactgcatttcaggataaagaaacgggtgagttaatcacagaacagactgtattagattacccaattctatttgctggtgaatctcaggttgctattcacttcatgtctggtgcataccctgaccgtggctatgatgtattccagaagtacatgactgaaacttggggcattaactatgcaggtgtacgccctattaatgggacaactggttctactgctgtagaccgtgcatgtgcagttaatcctgattctgaagtatttgaccctacccaatcatccgatgcaggtggtctttggtggtgggatttagaagcagataaacccggtcctgcattactatattgtgtagagcaagtaggtaagctcaagcctaaagctattatttgggggcaaggtgaccaagatgccactgctttggcatatccaggtgaccgtgacccagcaccatcattaaccagaaccaagcaagctactaagaaggtatttgagtatcttcgtagtttgtatggacagattcctatcttcattcaggaactgagctatgcatggggcatcactaacactgatgaacctaatgtacctattcgtacaggattaccttctttcctggcagcccgtcgtaatacatggggagatattgagttccgttggaagtcttacggattagaccctgcattagctcaatatcgtattgaaatctataacccttctaatttgaaccagatacttcactcatttgtagtatcaggtactcaagaagcaaatggttatgtatatgctgacttcactgtagaagactggattcctgtaatgatggaagcggttggttctcctaatccgtgggagttcatgaagtggcgagtagtttgtctgtatcaggaaagagaaattccttcagcaccttggtcagataacattcctttggataatgcagggcttgttaagaagaccattctggtaggtattaaccagtttggtggtggacactttactgatatgtctgacccaactgctaccacagctaatggtgcaattggtcgtaaagacaaggtatctgcttctacgttacgtctgacttttgcagagaaagctggattacgtcctattcaggtaatgcctattaacgtagctgctgatagtgcaggtatgacggtaggtactcacaaatggtggaatacttccagtaattccccaggtgatgcactactggctattaacgatatggttaaaggtttgggtgttaaacctgattacttcattgaagctaatccgtgggaaaccatgtatatgaaggatgttaattcttctacatggcctgctttaatgactgcttttgaatcgtctaacaaagcaatgcttgcatggatgagaaccaactggggcaaccctaatctggagatttggttccagggggctactactgtttggtttggtgttgctccacctaatgaccttaactctgaagctactgttactgtacgtgataaacagattcagatggctacagctaatataggctttaaactgggttcctttgttcctggttctaacctgtacactgcgtaccgtaatgtggaatccagttggatttactacacggtagaagcattccatgccacagccattgagctaggtgaagcactggctcttaatgttaaccgtgctactaatccacctgattggtcttacttgcgcccaccagcaaatctgcaaggtcgtaagttagctactcgtgatattaagatgacatgggataaccgtgctgggattacccactggaagtatgctaaccgtcatgtcaccacaggggcagaaatctcttctggtatcctcaccagtcccgagtatgtgtttaccctgaatgaccagcaaaatgcttataacggggacactcttaatatgagtttctctgtttctgagtatgctgctgattctggtgcagtaggtgcatcttcttcctttgtaggggtagtccagaatggttcctatatgcagactcctactcaactgaaagctgctaaacaggttaatggtgacattatcttcacttgggtaggacgtccttcatggcaacacttctgggtagtgaataccagtgttaatgattctaagactgttatcttctctaaagaatggtctagtgaatctctaacatggactgttgcagaacagaacgagttctacggcctggaagaaggtggtgctactcatgtcatcttcatggtatctgagtatgacccaagtaacggattagtatctattggtgctcaagttactggtcaaacagagcagccatctaatccaatgaatcctgttgctggattgtatgcagtgttcaccggtgacccaggtaactctaatattaagattatgtgggataaaccttctgttggtggacgtgatgttcgtattcgaaatatgcatgtaacgtccagtgcaactattagtgaccagtttgtatctgataacaatcttgtgttcacacgagaagaacaggtagctgcttatggctttactgcttcaagcgtatctgttcgtgctcaagaacatgatattgaatcaggtgcattgggtcttactactgagtatgttgctgtaccggaaacagcaggaacagttggacagggctttgctaagaaagactctgtaggtaactgtactatgtcatgggaagtaggtgatgctgtccaatggcaggttgagattatcaatgctgagaactctactgttgttaaaacagagattgttgtagcacctacaatcacttggacggctgaagaaattacagccgagtatggttacctgactgaccatatggtttggcgagtaagaccttatcgtgcagatggggcatctaacattagggagattcaattacagcttattaatgagatgactgatgttcatatgggggcattgacggcacagtacatgccggatgactttaccttcgaaccaggaataggacagattcatttcaatgttgagacttccagaaaggtttgtttagaccttgctaagtctgttcttagactggttcctgtttatccattagtaagtcctgttaagaaacagcatgatgattattggtttgttggccgtttaggattagaccctgtgtctgaaccagagcctattaacatgcctactatggagttttataaacgattcctgtctttattacatgaacgggatatgaagtttgttaactctgttgcttatgaaattcttaacttctttatgcctgacgaatggaaacagcttaactggaagggtgacccagcactttccggttggtatccaccatctagttttattcagcctactaacaaagatgctctggattttgtaagtaaagcccaatgtcagattttgaaagaatgccagaacttgggaatggagctgtacttccagattggtgagccttggtggtgggatggttcatacaatacaggtgagggtaagaatgccccttgtatttatgaccctaagactatggctttatacaaagaagagacaggtaatgatgtacctactccatggattaaagacatctttgctccagtagaagaacatcagtggccttatgtagattggctatgcaccaaactgggtcaatccactaactacatacgtgactatgtaaaaggtaagttccctgatgcacaggcaacccttctgttctttacaccacagattatgtcccctgcatctgaactaacaggtcgattaaacttccctgagtcagagtgggtattccctaactatgactttgttcagattgaagactatgattggattattgatggaagacttgacctggttccactgacatttgatgctgccgtgaatagactagggtatccattgaatgtagttcactacttcataggattcgtactgttacctgaagatgctaagaaaatctgggctgatgttgataaggcgtggggattggcactagaggcaggatttagcatgagtcatgaatccgtagaggtgctcctagctcgaatggaggaacgtatgaagacactcttcgaaaataatgcccgtgatgctaaatctcggcaagatttagatgatgctgtacgtaaccttcaactgtctattaataagatggacactcgactggagaatgtagaaaagtctctggctgagtctgtccctactattgaagagttcattaccatcaaacacaaagttgttggtgctggattgtttggtaaatgggtatgggctggatcaggtatcattattggtatactggctgctgccagacgggagatttttgcatggaggattggtgtggcaataagtaagaagaaggttggcggtgttggaggggttattgcagcaatcattgctgctgtatttgctgttgagggtggatacgttaatgaccccaaagacccaggaggtgaaactaatcatggtgtaactattcaggttgctcaaaagcataagcaagaactagagtcgatgtataactgggatggttcaatgaagaacttaactcaggaaatggcatcaagtatttattacaacgattacatcttgaagcctggctttgttaagtttgcagatgtatcaccagcggtaacagaaaaactagtagatgctggtgttaatactggacctgcaagaccatctcgttggttacaagaatctcttaatgctttctccagaaatggcaaagactaccctaaaatacaagttgatggtaaagtcggttctggaactctaagtgcatataaaagccttcagaataaacgaggcaaagtagaagcctgtaagctcattttgaagtctctagatggtaaacagttaaactactatttatctcttaatatgcctgagtacactacaggatggattgctaatcgtattggtaatgtccctctggagaggggtagctctgggagctaccctttttcttcttggttcacaacatggtgaaaagaaagttcaagcactatgggatgaagataagaaggagtactcaaaagaacttgatagagtaaaactggcttatgaccaaaagaatcgggaacacagttatgaagtcgggcaacttacccttcgacttgataaagccaaagagtcttatgaagtcgttattgattctattactaaccagtacaatagtcggttgctccagtcagaaaaacgagccgagagttataaacgtcaagcctcaaccggaaccactcaatgcctcaatcttgcaagccatgcagccagactcgactcaagtcttgaagaaggcagacgtttggttgaagaactcagggcaactgttagactccgtgataaccaactgattgaactggggaaccagattcgttctgaccgaattactatggaacaaaacactgattctatggttccattgccagacccaagccaagctactaagttaactagctggaagaatgaaccttccttgcaagcacttaaagcagacttggatgcagcaaagccatctcatactgccatgatgattaaggtcaaagaatggaatgaccttatgcgtattgaaggcaaagccaagccacctaaagtcaaaggacgttcacaggtacagcctaaacttgtacgtcgtcaagctgaatggcgttattctgctttaactgaacctttccttggttctaataagttattcaaagttactcctgtaacttgggaagatgtacaaggtgcacgccagaatgaactggttcttaactaccaattccgtaccaaactaaatcgtgtaagtttcattgataactatgttcgttcagttgttgatgatggtactggtattgttcgtgttggttggaacagggaaattcgtaaagagaagcaagaagttcctgtatttagtttgttccctattcaaacacaagaacaagctgatgctttacaacaggctctacaacttcgtacagataaccctcgcggttatgaagagaatgtagatgaagctattaaggaatcagtacgtttctttgatgaaacggtacaagcaacgtatgcagtacaaactgggacaactacaactgaagttgaagttcctttagcaaaccatcctacggtggaaatgctaaacccagagaacattattatcgacccttcatgtcagggtgatattaataaggcaatgtttgccattgtctcttttgaaacttgtaaggcagacctgcttaaagagaaagaccgttatcacaatctaaataagattgattggcaaagctctgctcccgttaatgaaccagaccatgcaaccactactcctcaagaatttcagattagtgaccctatgcgtaagcgtgtagttgcttatgaatattggggattctgggatattgaagggaatggtgtattagagcctatcgttgctacttggattggttctacccttattcgtttagagaagaatccttatcctgacggcaaactcccatttgtattaattccgtatatgcctgttaaacgggatatgtatggcgaaccagatgcagagttattaggtgataaccaagcagtacttggtgctgtaatgcgtgggatgattgacttacttggacgtagtgccaatggtcaacgtggtatgcctaaaggtatgcttgatgccctgaatagtcgtcgttacagggaaggtgaggattatgaatacaatcctacacaaaaccctgctcaaatgattattgagcataagttccctgaattgccacaatcagcactgactatggctacccttcagaaccaggaagcagaatctcttactggtgttaaagcatttgctggtggggtaactggtgagtcttatggtgatgtagctgctggtattcgtggtgtattagatgctgcttctaaacgtgagatggctatccttcgtcgtttagctaaaggcatgtctgaaattggtaataagattattgctatgaatgctgtgttcttggcagagcatgaagtagtacgtattaccaatgaagaatttgtcactattaaacgtgaagacctgaaaggtaactttgaccttgaagtagatatttctactgctgaagtagacaaccaaaagtcccaagacttaggctttatgcttcagactattggtccaaacgtagaccagcaaatcactttgaatattcttgcagagattgctgacttgaaacgtatgcctaaactggctcatgatttacgtacatggcaacctcaaccagacccagtacaggaacaactcaaacaattggctgttgagaaagcacagcttgagaatgaagagttacgttctaaaattcgtcttaatgatgcacaagctcaaaaagctatggcagaacgagacaataagaatctggattatctggaacaagaatctggcactaaacatgctcgtgaccttgagaagatgaaagctcaatcacaaggtaatcagcaattagaaattactaaagcattaaccaagccacgtaaggaaggagaacttccccctaacttatctgctgcaattgggtataatgcattgactaatggggaggatacaggtattcaatctgtatctgaacgggatatagctgctgaagccaaccctgcttattcacttggttccagtcagtttgacccaacccgtgacccagctcttaacccaggaattagattagactgtgctcgttatgtacaagaatcctgtgacccattgcttgaagaccgtcaacgtgctgatgctcttgctatggctcaagctgctggttgtttaaaacgttatctggaaattactcttcagaaagcagaaacactggtaggtgtccaatcagatattgagaatgcattggatgttgctcgtgatacccccatgactacggaagctgcaaaaacagcttccgacatttttaaaatgtcggatgaagagattctgaacatgcctggtccatcaagcattcagaacaacccggaaccggtagaaaataatactcctgcacaaccagacccaattgttgaagttgaacaaactgatgaaccagaagtaactactgaaccaactgaagtagaaaatacttctgaatcagaaagcaattcagatgcattcacaactggtaatgatagtgctacagttgacccaaataaggttgacagcaacagtaagcctgctactgataatgcaccttctactactgagcaaggccaagcaaaagtagtagaagacaagcaggtatcagaccagaaaactgacttcgactataaggctggttatgaacggataatggctccgtttaaagctaacggcaaaatgattactcctcagagtcctgaagaggtcattagcttgatgcaaatgggagctaactatacccgtaaaatgcaggagattcagccgtatcgtaagtatctcctgatgttagaaaacaacggattattagatgaagggcaactctcttatgctatcgatttagttaaagggaatcctgatgctattaagaagttggttaaagaatctggtattgatgttctggatattaatccagaagaggaagttaaataccaagctggtaatcaccgtgtgtcagatgctgaagcagcatttgcaaccgaactggaagatgctaaatccactccagaaggacaagctactcttcagttaatttcgactacgtgggatgaccacagcaaacaggcattgctggaaaatcgtggtctggttaataccatcgttgaacagaaagctaacggtatttacgaccgtattgtttctgaaattgaacgactcaaaatcttaggccaaatcccaatcggtacagcattcctggatgcttataatcaagtcggtaactaccttgctgctaatggtggttttaatgatttgattaagcagaaacctgttgaacaacctgaaccagtggttcagccagtagcaactcgtgttgcaacacctaagtctgaaatcactaatactcaacaggcagcagcggcatccccatcacgggttacaccgcgtaagacagaaaaatctagtattgatggtgctaactctgaccagatgcaaaccttcttctggctgaagaaagcaatcatcactgcccgtaaagagcagtacttcatgccactggcctctgtaactaacatgccgaagcattacggtaagaccatcaaggtatatgaatatgttcctctgctggatgaccgtaacatcaatgaccagggtattgatgcaagtggtgctactattgttaacggtaacctgtatggttccagcaaagacatcggtaacattacttccaaactgcctctactgactgaaaacggtggtcgagttaaccgtgttggttttactcgtattgctcgtgaaggttctattcacaagtttggcttcttctatgagttcactcaggaatctattgacttcgattctgatgatggcctgatggaacacctgtcccgtgaactgatgaatggtgctactcagattactgaagctgtactgcaaaaagacctgctggctgctgctggtactgttctgtatgctggtgctgctacttctgatgccaccatcactggtgaaggttctactccgtctatcgtttcttataagaacctgatgcgtcttgaccagattctgacagagaaccgtactcctactcagactaccattatcactggttcccgtatgattgatactaaagtcatcggtgctactcgtgttatgtatgtaggttctgaactggttccagaactgaaagcaatgaaagacctgttcggtaataaagcctttatcgaaactcagcactatgctgatgcaggtactatcatgaatggtgaagtcggttctattgataagttccgtatcattcaggttccagaaatgctgcactggggcaggtgctggtgcacaggctactgtagctaaccctggttaccgtacctctatggtatctggccaagagcactatgacgtttacccaatgctggtagtaggtgatgattcctttacctccattggcttccagactgacggatatatacacatgagcattaacgataaaccgaccgctgatttaactcagggcaacgatgacaccgttgatgaagttaaggttgatgaactttctctgctgaaacaacgagctaatatgatgggtatttcatactcaaataatattagtgctgaaactcttcgtaagaagattgaagcagctcaggaaccagtagaacctcagcctaatcctctggctctgtctacaggtacagtaactacggcaacttctttacgtcaccagcaacgcttagaacaattaaagctggttcgagtacgtattcagaaccttgaccctaagaagaaagacctgcctggtgagattattacagtagctaacgaatatattggtactgttcgtaaattcgttccatttggtgaagctactgatgagggctatcacatcccttactgtatttataacttcctcaaagaacgtaagttcctgaacattcgagttaccaaaggtaagaatggtcagcctaatattacgtctgcatgggtacgtgagtttgccattgaagttctgtctccactgactaaggaagaattacaaactctggctgctgctcagattgctgctggtgaggattttacgcttcctgacatcgacatgtctggcagtgagtatgatattcctggtggcattaatagccctatctatgcagagatagagaagataaccacagaacaactaactactcgtgaggttgggggttctggtgtatttgacgctttaatgcaatcagcaagcaatcatctactggcagaatttaagaataaccgaattactggtggtgattacgttaaggcatacattgctactatggaagcatgtatggctaatgctgtgcaattcctcaccactaaagaccaggcttattggaatgctgttactgctcaggtagctgcaattactgctcgtgctaatcttggtattatcaaagctaactttgttacagctaagattcaggctctggctactaaagctgaatatgcccttactaagctgaagctgtctaatgagtcagtaacttactgtactgctcaatacaatctatcctctatgcttcctcaacaattactgatgttgaagaaccagaccactcaggttgctgaacagactaagttaactactgaacaaatcaatatgacgaaagagcagaaggaagcacaacgtgctcagacttctgatactcgtactgatggtactcgtgtagctggttctgtaggtaaacagaaagaactctatgaccaacagattacgtcttataaacgtgatgctgaagttaaagctgccaaactgtttactgatgcatgggtcactcagaaaaccattgatgagggtctgtctcctcctaatggcttcactaacaccagtctggatagcattcttactgcattgaagaataacaacgcattgggtaagactaaaatctacgtagcatcctctgtctacaatttggcaggggatatacataaacgtccaaattatttaaagactacggtgattggtaacatcgtcagtaaatctgactttagtatgggtgataccatcactaactcttatttaaatggacctggtattcgtttacgtagattccctggttgggctgcaactaactatgacccttcaattggtattgcttatgggaacttgtcaatactgtctcagatagaccctgaagtagttaaatggcaagttcctcaaaaagcaggttatgaggtacaggttcagagcagtaggattggatttggtgattttgaggaatgggctgataaattcctctatgagaattatccagaccgtattactgaagagtttgaaatagacatcatggatgatgacaggattgtactcactgctactgatggtagtgagttatccttttatccagagaattacagtcaggatgcaatgtatctgtatgtgaactattactacatacagcctactagtgttgcagacccagtggttcatcctgctgtatctgtaccatctgctgatgacttaccttctacttctgaatggactcaggtatctcagaaccatactcctaagtcagctaccctgaagacagttactcatattaagagtgtattctctgatggcagacctgatgaggaaagtaccaatactgaagaagaacaggttagttggactaacttctcagatgtttacgagaaagaatttcgtgaaccaagtgaagtaggcttaatcattattcgtaagactacaatgacccaggtacagactggtactgtatctactggttccactacaaacactgaagttattgatttaggtggtggggttactgaaaccagaactactacagtaactacagatactttaggttatacatggtcttatcagaatacagatgtagttactactatgtctgctggtggtatgcctcaattgtttatttataaacagaacagtggtaatgccatccttgatgctctgtttattaataagacgaccaataacagattctattcattcatccctatccgtagtgataagaactggatttctggttctacatatactctttgtaagaaagcctttaagaaggctacagggggtaagatttctgacattatggatgacctgaagaagaacaaagatattggtgatattcagtatatctatgctgtatttggttgttctcttaatagtcctgaaaatacagctaaagagtacatatacagattcttccagttagtgaatcagtcaatgcctgctgacccaaactacccaactatggatgctttggtagaaggctttgctcaggctaacagagactttgatgcttatcaggaatggtgggaatctcgcagtggtaatagggatattcccatagggaagcctcctaaaagacccgtatatccaacaataccttctaaatccattaatattcgttctaacggtggataccgttacaacatgactattagttggaacttcattgaagaatcagttggttcaggtaaagcattctctggagccaagaaagggcagctcaagtttgcttatgaaggtactgtagtccttatgcagaaagccgttatgtactctgaaaagggtaatgacaaagttgggtttactatctacaggctagataagataacaatgtattggcagaatggggataattcatggaggaagatttctgtctatggcctgaaccataacaataatgtttacaagaataaatctgtaagcatttctggtgtagatgcactaaatgatgatgaagagtccggatttatcatccctcttcataacaacatttatcgtagtatgtctttggtaaatggtactcagttatctactgcatgttgttatctggttcttaactcatataagaaagttaagaagaaatggtatcagtctggcatttttaaagtagtagtggttgttgttgcagtagtagtgtctgtgttctttactcctgctgctggtgctggggtaatgggtactgctgcttctattggtgctgcattaggttttgcagggttagctgctattatcgttggggctgtggctaatgccattgcagctatgattctgatgtccattattcaaacagtctctgttagtctgcttggggataagattggaatcattgttgctactattgcctctatggtagccatgaatgtcggcacagctttatccactggttcatccatgtctacgatgctgggtgaaatgatgaaagcagacaacatcattaaactcacttcatctgtaggaaatggcataagtgattacatcaatgcttctgctatggaaactgtcaaaaagacagagaaacttatggcagagtaccgtgaccagataaaaaccattcaggaaaagtacgaggaaatgtttggcactgagggcatgggttacattgacccaatgaacctaactaatgtaggccaacaatttgaaccactggattcattccttagccgtactcttatgactggtcatgatatagctgatatgtctaacaacatgattaccaactttgcagatataacgttgcagcttgatttagataccaattttggctatgggtatggttcctttaataccccaaccatgaactataaccctatgcaatctggcatccttagtaatgactggcttcagaatattactggtggtgctacagggaataccggtgggcagactcaagggcttactgaccaactgggtctgaacattcctacattccagttggggttaggtggtcttaatgcactgggtaatatctatggtgcattacaggctaacaagttagctaagaatcagttctcttttgctaaagatgttactaacactaatctgaataaccagattaagtcctataacactgctctggaagaccgtgctcgtagtcgtgctgttgcagaaaatcgtgaccaatctacggctgatgcttacattgcagctaatcgcttaactcgtgattttcgaaactctgcaagacagcaagctggtgatgcaattatggctgaagccatgcgttaccaagaccctaatgagtatcgtaatgccttagcttctggagcattatttgctggctatgacccttctctaatttcttctcgtactatggagaacttagataatcgtgctggcaatctgttagaccaagcatctaaacaacaaaatctggatttcactcgatacagtaatgacagaaccatgaaggtaaatgcagctactgatgctgctgcccctgcattacaggaattagctctggcttatcaatctggtgacccaagaaaggttcaggcagcacaggctcagtatggggatgtattaaaaacccttcctgctggtgttgttatggactacatgaacaaccttcaaggacagggtactgctggtattggtcaacgtcgcagcttattcaacttaggtgttgatatacgtaacgatgcggatactcaggctgctatgcagttactgaataatattcgtcgtggtgcatacagtgctgacgatgctcgtatgcttgcagagggtacgttcgaccaaatgtcaccaggagcagtaagtcgtgcactatctcagttagatagagcatatccaggtgcatatactccgggaactggttctgcatccctatctcctcctggtactcagggtactcggaatggttctgcatatgacactacctataagttcacaccaactgatgtacctattactcagatgaacttaggtgaggtggttcagcatcaagacactatgaagaagacactaggtgcttctcctgttggtgcataccagattaaccaagatactcttaaagactttgctccaaaggtatttggtgaagattggcagaacattcctatgtctccggagaaccaagacaaactgggtgaagctatttttaatgcccgtaagaatggcaatctgaagagtacatgggctgctttaccggatgatactcctggtgcttataagaacttgtcatgggatgaaatgaaggattacattgctcaagcagaaacaggtaattctattaatccattacaggaacaagcattcacttctgttgctggtaatactgttggtactcgtaatatgcagaatattggtaatactctgctgccagaataccaagctgctactgttgacccttctacgactggtcaggtggctaaacgtattattgatagcaatgaactgaaaggcattaaccaaggtgcactggttcgacaaatcaatgaggtagcaaaacagaatgctatttctcccgctatggcaggagcaatcattcaacgtagtatcaccggtaaaccagagggatggtttagtggtattcgaaatgcctttgatactgatgttattgatttgggtggtgattaccaactggataaagcagccgtagaagcaaatgcaaaacttgcaactactggtactgctattgaacagaatgctcgtaatcagcttactgcacaaattcaatcaaacatctatgcagcacagaatacgttagatactgcacttgctgatttacgtgaagtacagcgtcgtattcagaccggtcaggaaaaccttagaagtgtactacctcgctatcaggagcgagttaacactgctaaacgtcttcttgatggtgctcgtagtgctgtagctgctgaccctcagaatttggatattaagagcctacaaaatattaaacaggaagagagcgaggcaaaccggagaagtttaggcagagatgccggacgtcgattggacagcgtaaccaatgcaaagcaagttgacgtctctactgcaaccgcccagaagaaagctgaacaaggtgtcactactcctcttgtttctcctgatgctgcttatcaaatgcaagctgcccgtactggtaatgttggggctaatgcatttgaaccagggacagtgcaatcagatttcatgaatctgactccaatgcaaatcatgaataagtatggggttgagcaaggcttacaacttatcaacgctcgtgctgatgcagggaaccaggtattcaatgattcagttactacaagaactcctggggaagaactgggggatattgctactggtgttggtcttggttttgttaatacccttgggggcattggtgctcttggggcaggcttactcaacgatgatgcaggtgctgttgttgctcaacaattgagtaagtttaatgatgctgtccatgctacccaaagccaagcattacaagataaacgtaagctctttgctgctcgtaacttaatgagtgaagtagagagtgaacgtcagtatcaaacagataagaaagaaggcactaatgacatagtagcttccttatctaaatttggacgtgattttgtaggttcaattgagaacgctgcccaaactgactccattatttctgatgggttagcagaaggggtaggttctctattaggtgctggtcctgtattaaggggtgcatctttactgggtaaagcagttgttccagcaaatactcttcgtagtgctgcattggctggtgctattgatgcaggtactggtactcagtccctggctcgtattgcttctactgtaggcagagctgcaccaggtatagttggtgttggtgcaatggaagctggtggtgcataccaacaaactgctgatgaaattatgaagatgagtcttaaagacttagagaagtctcctgtttatcaacaacatattaaagatggtatgtctccagaacaggctcgtcgtcagactgcatctgaaactggtcttactgctgctgctattcaattacctattgctgctgcaactggtcctctggtatctcgttttgagatggctcctttccgtgctggttctttaggtgctgtaggtatgaaccttgcccgtgaaacagtggaagaaggtgttcagggtgctacaggccaactggctcagaatattgcacagcaacaaaacattgataagaaccaagacctgcttaaaggtgtcggtacacaagctggtttaggtgctctttatggctttggttctgctggtgttgtacaggctccggctggtgctgctcgtttagcaggtgctgcaactgctcctgtattgcgtaccacaatggctggtgttaaagctgctggtagtgtagcaggtaaggttgtttcccctattaagaacactttggtagctcgtggtgagcgggttatgaagcagaatgaagaagcatctcctgttgctgatgactatgttgcacaggcagcacaagaagctatggctcaagcaccagaagcagaagttactattcgtgatgctgttgaagcaactgatgctactccggaacagaaagttgcagcacaccagtatgtttctgacttaatgaatgctactcgttttaatcctgaaaattatcaggaagcaccagagcatattcgtaatgctgtagctggttctactgaccaagtacaggttattcaaaagttagcagacctagttaacacattagatgaatctaatcctcaagcactgatggaagctgcatcttatatgtatgatgctgtttcagagtttgagcaattcattaaccgtgaccctgctgcactggatagtattcctaaagattctccggctattgagttactcaatcgttatacaaatctgacagctaatattcagaacacaccaaaagtaattggtgcactgaatgttattaatcgaatgattaatgaatctgcccagaatggttctttggatgtgactgaagaatccagtccacaggaaatgcagaacgtagcattagctgctgaagtagctcctgaaaagctcaatccagaatctgtaaatgttgttcttaaacatgctgctgatggtcgtattaaactgaataatcgccaaattgctgcccttcagaatgctgctgcaatcctgaagggggcacgggaatatgatgcagaagctgcccgtcttggattacgtcctcaagacattgtgagtaaacagattaaaacggatgagagcagaactcaggaaggacaatactctgcgttgcaacatgcgaataggattcggtctgcgtataactctggtaatttcgagttggcctccgcttacctgaacgactttatgcagttcgcccagcacatgcagaataaggttggagcgttgaatgagcatcttgttacggggaatgcggataagaataagtctgtccactaccaagctcttactgctgacagagaatgggttcgtagccgtaccggattgggggtcaatccctatgacactaagtcggttaaatttgcccagcaagttgctcttgaagcgaaaacggtagcggatattgctaatgccctcgcttcggcttacccggaactgaaggtcagtcatataaaagttactccattggattcacgtcttaacgcccctgctgctgaggtggtcaaggcattccgtcaaggcaatcgagacgttgctttttctcaacagaaagctgactccgtgaatcaggttaaagaaactcctgttacaaaacaggaaccagttacatctactgtacagactaagactcctgttagtgaacctgttaaaacagaacctactactaaagagtctagaccacaggctataaaagaacctgtgagccagtctgaaaaacgggatgttaaccttactaatgaggacaccatcaagcaacctactgaatctgttaaagaaactgaaacttctgcaaaagaaagcacagttacagaagaattaagagaaggtatcgatgctgtttacccctcattggtaggtactgctgattctaaagcagagggtattaagaactatttcaaattgtcctttaccttaccggaagaacagaaatcccgtactgttggttcagaagcacctctaaaagaggtagctcaagctctgtcttctcgtgctcgttatgaactctttactgagaaagaagttgctaatcctgcttttaatggggaagttattaagcgatataaagaactcatggaacatggggaaggtattgctgatattcttcgttcccgtctggctaagttccttaacactaaggatgttggtaaacgttttgctcagggtacagaagccaaccgttgggtaggcggtaagttacttaacatcgttgaacaggatggggatacctttaagtacaatgagcaattgctacagactgctgtattagcgggtcttcagtggagacttactgctacccggcaatactgctatcaaagatgcaaaagatgttgctgctattactggtattgaccaagccctgctgccagaaggtttagtagagcaatttgatactggtatgacactcactgaagcagttagttccctggctcagaaaattgagtcttactggggattatctcgtaatccaaatgctccattgggttataccaaaggtatccctacagcaatggctgctgaaattctggctgcatttgtagagtctactgatgttgtagagaacatcgtggatatgtcagaaattgacccagataataagaagacgattggtctgtacaccattactgaactggattccttcgacccaattaatagcttccctactgctattgaagaagctgttttagtaaatcctacagagaagatgttctttggtgatgacattcctcctgtagctaatactcagcttcgtaaccctgctgttcgtaatactccagaacagaaggctgcattgaaagcagaacaggctacagagttctatgtacacactccaatggttcaattctatgagacgttaggtaaagaccgtattctcgaactgatgggtgctggtactctgaataaagagttacttaatgataatcatgctaaatctctggaaggtaagaaccgttcagtagaggactcttacaaccaactgttctccgtcattgagcaggtaagagcacagagtgaagacatctctactgtgcctattcactatgcatacaatatgacccgtgttggtcgtatgcagatgttaggtaaatacaatcctcaatcagccaaactggttcgtgaggctatcctacctactaaagctactttggatttatcgaaccagaacaatgaagacttctctgcattccagttaggtctggctcaggcattggacattaaagtccatactatgactcgtgaggttatgtctgacgagttgactaaattactggaaggtaatctgaaaccagccattgatatgatggttgagtttaataccactggttccttaccagaaaatgcagttgatgttctgaatacagcattaggagataggaagtcattcgtagcattgatggctcttatggagtattcccgttacttagtagcagaggataaatctgcatttgtaaccccactgtatgtagaagcagatggtgttactaatggtccaatcaatgccatgatgctaatgacaggtggcctgtttactcctgactggattcgtaatattgccaaagggggcttgttcattggttctccaaataagaccatgaatgagcatcgttctactgctgacaataatgatttatatcaagcatccactaatgctttgatggaatcgttgggtaagttacgtagtaactatgcttctaatatgcctattcagtcccagatagacagtcttctttctctgatggatttgttcctaccggatattaatcttggtgagaatggtgctttagaacttaaacgtggtattgctaagaacccgctgactattaccatctatggttctggtgctcgtggtattgcaggtaagctggttagttctgttactgatgccatctatgagcgtatgtctgatgtgctgaaagctcgtgctaaagacccaaacatctctgctgctatggcaatgtttggtaagcaagctgcttcagaagcacatgctgaagaacttcttgctcgtttcctgaaagatatggaaacactgacttctactgttcctgttaaacgtaaaggtgtactggaactacaatccacaggtgcaggagccaaagggaaaatcaatcctaagacctataccattaagggtgagcaactgaaggcacttcaggaaaatatgctgcacttctttgtagaaccactacgtaatggtattactcagactgtaggtgaaagtctggtgtactccactgaacaattacagaaagctactcagattcaatctgtagtgctggaagatatgttcaaacagcgagtacaggagaagctgacagagaaggctaaagacccgacatggaagaaaggcgatttccttactcagaaagaactgaatgatattcaggcttctctgaataacttagctcctatgattgagacaggttctcagactttctacattgctggctcagaaaatgcagaagtagcaaatcaggtattagctactaaccttgatgaccgtatgcgtgtaccaatgagtatctatgccccagcacaggctggtgtagcaggtattccatttatgactattggtactggtgatggcatgatgatgcaaactctttccactatgaaaggtgcaccaaagaataccctcaaaatctttgatggtatgaacattggtttgaatgacatcactgatgctagtcgtaaggctaatgaagctgtttacacttcttggcagggtaaccctattaagaatgtttacgaatcatatgctaagttcatgaagaatgtagatttcagcaagttgtcccctgaagcattggaagcaattggtaaatctgctctggaatatgaccaacgtgagaatgctactgtagatgatattgctaatgctgcatctttgattgaacgtaacttacgtaatattgcactgggtgtagatattcgccataaggtactggataaggtaaatctgtccattgaccagatggctgctgtaggtgctccttatcagaacaacggtaagattgaccttagcaatatgactcctgaacaacaggctgatgaactgaataaacttttccgtgaagagttagaagcccgtaaacaaaaagtcgctaaggctaaggctgaagtcaaagaagaaattgtttctgaaaaagaaccagtgaatccagactttggtatggtaggccgtgagcataaggcatccggtgttcgtatcctgtctgctactgctattcgtaacctggctaagattagtaatctgccatctactcaggcagctactcttgcagagattcagaaatcactggcagctaaagactataagattatctacggtacacctactcaggttgcagaatatgctcgtcagaagaatgttactgaattgacttctcaggaaatggaagaagctcaggcaggtaatatttatggctggactaacttcgacgataagaccatttatctggttagcccatctatggaaaccctcattcatgaactggttcatgcttctaccttcgaggaagtttattccttctatcagggtaatgaagtaagccctacttctaagcaggctattgagaaccttgaaggtctgatggaacagttccgttctctggatatttccaaagattctccagaaatgagagaagcatatgctgatgctattgcaactattgaaggtcatttgagtaatggctttgttgacccagctatttctaaagctgctgctcttaatgagtttatggcttgggggttagctaaccgtgctctggctgctaaacagaagagaacatcttcactggttcaaatggtgaaagatgtttatcaggccattaagaaattgatttggggacgtaaacaagctcctgcattgggagaagatatgttctctaatctgctgtttaattctgcaattctgatgcgtagccaacctacaactcaggcagtagctaaagatggcacactgttccatagcaaagcatatggtaacaatgaacgtctgtctcagttgaatcagaccttcgataaactggtaactgattaccttcgtactgacccagttacagaagtagaacgtcgtggcaatgtggctaatgcattaatgagtgctactcgactagttcgtgatgttcagtctcgtggcttcaatatgactgctcaggaacaatctgtattccagatggttactgctgcattagcaactgaagctgcaattgacccacacgctatggctcgtgctcaggaactttatacccatgtaatgaaacaccttacggtagaacatttcatggctgaccctgatagtactaaccctgctgaccgttactacgctcaacagaaatatgacactatctctggtgctaatctggttgaagtagatgccaaaggcagaaccagtctgttacctacattcctgggtctggctatggttaatgaagaactacgttcaatcattaaagaaatgcctgtacctaaagcagataagaaattagggaatgatgtagatactctgcttaccaatgcaggcactcaggtaatggaatctctgaaccgtcgtatggctggtgaccagaaagctactaatgttcaggacagtattgatgctctgtcagaaacaatcatggctgctgctctgaaacgagagtccttctatgatgctgtagcaacccctaccggtaatttcattgaccgtgctaatcagtacgtaacagatagcattgaacggttatctgaaactgttattgagaaggcagataaggtaattgctaatccttctaatgtagctgctaaaggtgttgctcatctggctaaactgactgctgctattgcatctgaaaaacaaggtgaaatagtggctcagggtgttatgactgctatgaaccagggtaaagtatggcaacctttccatgacttagttaatgacattgttggccgtactaagactaatgccaatgtctatgacttaatcaaattggttaagagccagatttctcaagaccgtcaacaattccgtgagcatttacctacagtcattgctggtaagttttcccgtaaactgactgataccgagtggtctgcaatgcatactggtttaggtaaaacagatttagctgttctacgtgaaactatgagcatggctgaaattagagatttactctcttcacctaagaaagtgaaagatgaaatctctactctggaaaaagagattcagaaccaagcaggtagaaactggaatctggttcagaagaaatctaagcaactggctcaatacatgattacaggggaggtaggtaataacctccttcgtaatgcccatgctattagtcgtttattaggtgaacgtattactaatggtcctgtggcagatgtagctgctattgataagctcattactttgtactctctggaattgatgaataagtctgaccgtggccttttgtcagaattggctcaatcagaagtggagggtatggagttctccattgcttatatggtgggtcaacgtactgaagagatgcgtaaagctaaaggtgataaccgtactttgctgaatcactttaagggctatatccctgtagagaaccagcaaggtgtgaatttgattattgctgacgataaagagtttgctaagttaaatagccaatcttttactcgtattggtacttatcagggaagcactggtttacgtactggttctaaaggttattacttcagcccagtagctgcccgtgccccatactctcaaggtattcttcagaacgttcgtaatactgctggtggtgtggatattggtacaggctttacgttaggtactatggttgctggtcgtattactgacaaaccaaccgtagagcgtattaccaaagctctggctaaaggtgaacgtggacgtgaaccgctgatgccaatttataacagcaaaggtcaggtagttgcttatgagcaatccgtcgaccctaatatgttgaagcatctaaaccaagacaatcactttgctaagatggtgggtgtatggcgtggtcgtcaggtggaagaggctaaagcacaacgttttaatgacattctcattgagcaattacatgctatgtatgagaaagacattaaagactccagtgctaataaatctcaatatgtaaacctgttaggtaaaattgatgacccagtactggctgatgcaattaacctgatgaacattgagactcgccataaggccgaagaactctttggtaaagatgagttatgggttcgtagggatatgctgaatgatgcacttggctatcgtgctgcatctattggtgatgtatggactggtaactctcgttggtcacctagcacccttgatactgttaagaagatgttcctcggtgcatttggtaataaggcatatcatgtagtaatgaatgctgaaaataccattcagaacttggtgaaggatgctaagacagtaattgttgttaaatctgttgtagtaccggcagttaacttccttgctaacatctaccagatgattggacgtggtgttcctgttaaggatattgctgtgaatattcctcgtaagacgtcagagattaatcagtacattaaatctcgcttacgtcagattgatgcagaagcagaattacgtgctgctgaaggcaatcctaatctggttcgtaaacttaaaaccgagattcaatctattactgatagccatcgtcgtatgagcatctggcctttgattgaagcaggtgagttctcttctattgctgatgctggtattagtcgtgatgacctgttagtagctgaaggtaagattcatgagtacatggaaaaacttgctaataaacttccagaaaaagtacgtaatgctggccgttatgctcttattgctaaggacactgctctgttccagggtatccagaaaacagtagagtattcggacttcattgctaaagccatcatctatgatgatttagtgaaacgtaagaagaaatcctcttctgaagcattaggtcaagtaactgaagagtttgttaactatgacagattgcctggtcgtttccgtggttatatggaaagcatgggtctgatgtggttctacaactttaagattcgttccattaaagttgctatgagcatgattagaaacaacccagtacattctctgattgctacagtagtacctgctcctgccatgtttggtaatgtaggtctgccaattcaggacaacatgttaaccatgctggctgaaggaagactggattattcattaggcttcggacaaggactaagagcaccaaccctcaatccttggttcaaccttacccactaa

SEQ ID NO: 18717 - DNA, 479 bp, Homo sapiens
  SIMILAR (109)..(477): 821254mologous to Homo sapiens P29,accession number AF273089,Smith-Waterman Score=500.
  misc_feature (1)...(479): n = a,t,c or g
nttgagacttcgtagaccctagtccagngtggtggaattcggaagtgggaagagagaaaggttgtgatggcggctatagctgcatccgaggtgctggtggacagcgcggaggaggggtccctcgctgcggcggcggagctggccgctcagaagcgcgaacagagactgcgcaaattccgggagctgcacctgatgcgggaatgtgcggcaagaggagaagactatgagaaagtgaagttgctggagatcagtgcagaagatgcagaaagatgggagaggaaaaagaagaggaaaaaccctgatctgggattttcagattatgctgctgcccagttacgccagtatcatcggttgaccaagcagatcaaacctgacatggaaacatatgagagactgagagaaaaacatggagaagagtttttcccaacatccaatagtcttcttcatggaacacatgtgccttccacagaggaaattgg

SEQ ID NO: 18718 - DNA, 1624 bp, Homo sapiens
  SIMILAR (270)..(845): 721254mologous to Homo sapiens P29,accession number AF273089,Smith-Waterman Score=632.
tttcgtgagaaaggttgtgatggcggctatagctgcattcgaggtgagttccacccaccgtacaccgggggttttgttggtgagggttccggggagcggcctggagagaggaggaggccaagtctagtttcgcttcagggaggctcagacactgtggggtcaagtcggcggtggaggccctaggcccaacctgtggggaccggcggggactcggcctgggcagtcctgggagaagctgagccggctctgcctgaagccagttctccttgtcgcaggtgctggtggacagcgcggaggaggggtccctcgctgcggcggcggagctggccgctcagaagcgcgaacagagactgcgcaaattccgggagctgcacctgatgcggaatgaagctcgtaaattacatcaccaggaagttgtggaagaagataaaagactaaaattacctgcaaattgggaagccaaaaaagctcgtttggagtgggaactaaaggaagaggaaaagaaaaaggaatgtgcggcaagaggagaagactatgagaaagtgaagttgctggagatcagtgcagaagatgcagaaagatgggagaggaaaaagaagaggaaaaaccctgatctgggatttttcagattatgctgctgcccagttacgccagtatcatccggtttgacccaagcagatcaaacctggacatggaaacatatcgagagactgagagaaaaacatgggagaagagtttttcccaacatccaatagtcttcttcatgggaacacatgttgccttccacagagggaaatttgacagggtggttcttagatctgggaaaaaccagtttgaaaaacgagacaattttaggcccggagacgtccttataatgatgatgcagatatcgacctacattaatgaaaggaatgcccaattcaacaagaaagctgaaagattctattgggaaatacacagctgaaattaaacagaatttggaaagaggaacagctgtctaatcccttcaagaactgtttatagaagcttgagaatggggtaaaaatttctgctagcaaaatcaaggttcttttttgaaattttatcagtaatccagaatttagtagtccatgccttctcactcagcatttagaacataaaaatgcggtttcttaaaccgtatatccctttccatgtatatttcccacattttttgtgcttggatattaagatgtatttcttgtaagtgaaagttgttttgtaaatcttactttgtaatacattcctaattatattatttttctatgtattttaaatgtatatggctgtttaatcctttgaagcattttgggcttaagattgccagcagcaccacatcagatgcaagtcattgttgcctatcagtgtggaaatttgatagagtctagactcgggccacttggagttgtgtactccaaaagctaaggacgagtgatgaggaagatggcagtggccaccggagacctggaacaagtccctcctcatggcggccctgtgaccaaggtcggggaaggagtggagctatccttcccatgatctgatcatgtacagttccctttttaaaaagcaataaatgcctggggattagaatttctaaaaaaaaaaa

SEQ ID NO: 18719 - DNA, 415 bp, Homo sapiens
  misc_feature (1)...(415): n = a,t,c or g
cccacgcgtacgcttttacttacctcttgnnnnnnnnnnnnnnnnnnnnnnnnctcatttattcattctgtttctatatagcaaaactgaatgtcaaaagtaccttctgtccacacacacaaaatctgcatgtattggttggtggtcctgtcccctaaagatcaagctacacatcagttttacaatataaatacttggactaccttaatgataaggactccttaaagttccatttgctaatgattaatacactgtttgggctggccagattttcatgcatgcagcttgacgattgagcacagtcaggcctttgtattaaaaatgaaaaatgaataaacaaattcaaaacctattcaaatgggttctagttcaatttgtttagtataaattgtcatagctggtttactgaaaacaa

SEQ ID NO: 18720 - DNA, 423 bp, Homo sapiens
  SIMILAR (3)..(209): 1001254mologous to Electrophorus electricus calmodulin,accession number M36168,Smith-Waterman Score=352.
  misc_feature (1)...(423): n = a,t,c or g
cagatagtgaagaagaaatccgtgaggcattccgagtctttgacaaggatggcaatggttatatcagtgcagcagaactacgtcacgtcatgacaaacttaggagaaaaactaacagatgaagaagtagatgaaatgatcagagaagcagatattgatggagacggacaagtcaactatgaagaattcgtacagatgatgactgcaaaatgaagacctactttcaactcctttttcccccctctagaagaatcaaattgaatcttttacttacnnnnnnnnnnnnnnnnnnnnnnnnnnnnnnnttcatttattcattctgtttctatatagcaaaactgaatgtcaaaagtaccttctgtccacacacacaaaatctgcatgtattggttggtggncctgtcccctaaagatcaagctaccg

SEQ ID NO: 18721 - DNA, 239 bp, Homo sapiens
  SIMILAR (116)..(229): 311254mologous to Saccharomyces cerevisiae dihydrofolate reductase,accession number M26668,Smith-Waterman Score=63.
gggctgcaggaattcggcacgaggatgactgcaaaatgaagacctactttcaactcctttttcccccctctagaagaatcaaattgaatcttttacttacctcttgcaaaaaaaagaaaaaagaaaaaagttcatttattcattctgtttctatatagcaaaactgaatgtcaaaagtaccttctgtccacacacacaaaatctgcatgtattgggtgggggggccgtgtcccccaaag

SEQ ID NO: 18722 - DNA, 3839 bp, Homo sapiens
  SIMILAR (979)..(1443): 471254mologous to synthetic construct calmodulin mutant SYNCAM53,accession number AF084406,Smith-Waterman Score=225.
  misc_feature (1)...(3839): n = a,t,c or g
gacctgggaaaaacaaaacgacccgccgtagaggaaaaggaaaccccaaacaaaactcgggcgcagagcctatttctactggccaaagagcgccgccaagaccccttccgtccggggctgtccgcgctgccactagtaaagatggcggccataggcggagccgctcactccgaaggccgcaggctaccctgccggccacgaccattcacgcggagccctccacgcccttcgcggcttgacgcattgcaggtgcagcgcgaccaatcagacggcgcggctcttttcggccaaccactgcagggtcgcgccggcctatcagagcgtccttgtcaaactgaacgaggaaagaagcctcagcagcgccaactaagcaaccggctacagaccgcgttccggaggggcccgctgggctcgggttttcagctgcgttggagctgcagaggctgcggagtgaacgcggccaggagcccgcctgggagcgcgcagcgctctaggagccgagagccgctgcttggccctcgctggccgggaagcagaggatggatccagttatgtgaaagtctgaagaaaattgccaaaggatgggtcagccaagacccctctcctcggcagctgaaggagtgtggccaatctgcctccacctccccgcggaccccctactctcaggacctcctgcagcaccccaaactggaagtggccgctgcagacccaaggacgaggggcacgcgggagccggcagccctagtggagcggttggagatgttgagtggtgctgggagtgtcgtggacgccgtgccgttacttcgtagtcagggcgggcggcgcaggcgggcggcggcggcattagcgcacaacgcacattagcagcagcagcagcagcagcagcatcggaggtacccccgccgtcgcagcccccgcgcatggtgcagccaccctcgctcccctctgctcttcctcccttcgctcgcaccatggcctgatcagctgaccgaagaacagattgctgaattcaaggaagccttctccctatttgataaagatgggcgatggcaccatcacaacaaaggaactttggaactgtcatgaaggtcactgggtcaagaacccaacaagaagcttgaattgccaggatatgatcaatgaaagtgggatgctgatgggtaaatggcacccatttgactttcccccgaattttttgactaatgatggcaagaaaaatgaaagacacagacagtgaagaaggaaatcccgtgaggcattccgagttctttgcaaaggatggcaatggttatatcagtgcagcagaactacggtcacgtcatgacaaacttaggagaaaaaactaccagatttagaaagtagatgaaatgatcagagaagccagatattgatggagacggacaagtcaactatgaggaattcgtacagatgatgactggcaaaatggaggaccttactttccaactccctttttccccccctctagaggaatcaaattggaatcttttacttaccttcttgcaaaaaaaagaaaaaaagaaaaaagttcatttattccattcctgtttcctatatagcaaaactgaatgtcaaaagtaccttctggtccacacacaccaaaatctgcatgtattggttggtgggccctgccccctaaaagatcaagctacacatcagttttacaatataaatacttgtactaaccttaatgataacggactccttaaacgttccattttgctaatgattaatacactgtttgggctggccagttttttccatgcatgcagctttgacgattggagcacaagtcagggcctttggtacttaaaattggaaaatggaaaaaaccaaatttcaaaacctattccaaatggggttctagttcactttgtctagtctaaattgtcataggctggtttacctgaaaaccaaacaccattttaaaattgggtttacctccagggatggacgtgcaggaaaaatggggtgaagggataaacccnttgaagacgtggccccactggtagggatggtcctcttggtacttcggtgtgctcccgacccgatgggtgaccgatgacacaccctgggtggcatgcccgtgttatgttgggtttaggcgttgtcttgcattggttccaagagtggaaacagggtgttcagggctgttcacttgtttcacacaaatttttaattaaggaaacatttacccaaggggagcatcctttggactctctggttttttaaaacctttctggaaccatggactttgggagcccgggcagagtagggctgtgggctgtgggactttcagcacaacccttcaacattggctgtttcaaaggaatttacagttttacgtccatttccaagttgtaaatgctagtctttaaatttttctttttttccaataaaaaagaccgattaacttaaagtggtgttaaatgctttgtaaagctgagatctaaatggggacaaggcaggtgggaggggaggccagtgtacatgtaagatgcccacagcccagcattggggtttccctccccaaggccccagcaccaacctctgagcccaagaccttgcctgaaaacaagcagataccgattgcttcatcctatttatggacatgtaggtctagttgcattttcactggggggaggggggaaggtgaattatggtaacttttaatgatctattcaggcagtagagctcttaagaaaaaaaaaaacccactttctctcaagcatgtatttaggggttgttctcaattgtgcctgctgattacctgtcttatgtaactacttgagaccatctgcaagagacatgatttagtgtgtctgtaattcaatcttcgctgtgtgtggtagaagcagtagtcacttttgtaagccagtctcttcatgcctaaaagacactaccagtcacctttgattcgcgacttttaatttatgattatacttagcctcctcctccttttttttttttttccgaagttgacttgactttgcttttttccccccaagtagaactaatgctagcttccagcttgaaagtaaaactccagtgtggagtgaattttgtgtctaattataaacctgtaaccaaaactcagacatctggtactggtctttgcattgagattggtccctgtaaaaccccctttaaaagcatattgcatttagtacagagctcttttttgaaatgaaggctggagatgtgcattttttcacgggtgttaactgggtgtattcttatttagcaaaggagattgggggttttgagtgtttgcgtgggtgggtttcaaatttgccaggggaaccagtgggcaggctgctagcaaggcagtgaggaagctctttggcagccaaatggggtgcattcagggctgaatttaaagagacccttggcttctccttctcctactccctgtctttctgggcattttgtagcttgttagattttctgccaaagggggtgggtcagagcagtggaggggagacatcgcccatgtgcttctgctactggtccttgggctgggtggttggtagaggagatgttgacactatgagctaagggttggcttttgtaattacctgaatctgaaaggaatgcctaaggttaccttggggtttctcttctggtgagatagggttcctgggtttgagtaagttaaatgtcctgggatatttctttttgccaggggggttgtcaaagagcctgattgctggacccagtcttcaggcctgtgggtcggatgacctcttcggttagttttcaaaggggggctggagggggatattttgacttgtttttttcgaaatgtagccttctaaacc

SEQ ID NO: 18723 - DNA, 555 bp, Homo sapiens
  SIMILAR (1)..(225): 851254mologous to Homo sapiens unc-50 related protein homolog,accession number AF077038,Smith-Waterman Score=326.
  misc_feature (1)...(555): n = a,t,c or g
tgggttgtactcaagaattgtgtaggcgttggtcttctgatagcaacttaaatgtggttcatctctaacaagtatttagtgnaacgacagagcagagactatgatgtggaatggggctatgcttttgatgtgcatctcaatgctttttatccactcctggtcattttgcattttatccagctttttttcatcaacccattgccatttttgaaaaatacagtaattcttctgtatccatttgcacctctgattctgctctacgggctttccctggcactgggatggaacttcacccatactctctgttctttctataagtacagagtgaaataaaaagtgagaagaagattcaatcgtaactgtgtcaacagtattgtgaagtgatcatttcttgtaaaacttgtaaataaactatcatctttgtagatatcttaaaggtgtaaagtttgcaaatttgaagaaatatatattaacactgtggtcaggtacattccttaaaactaattaaatgtacatttctataataaatattttttaaactaaaaaaaaaaaaaa

SEQ ID NO: 18724 - DNA, 635 bp, Homo sapiens
  SIMILAR (33)..(395): 901254mologous to Homo sapiens unc-50 related protein homolog,accession number AF077038,Smith-Waterman Score=572.
gttccgagtaactcagtgaattctttagtgcaggggaacggagtcttgaattccagggatgcggcaagacaccagccggagcgaaacgctacaaatatctgagaaggcttttccgctttcggcaaatggactttgaatttgctgcctggcagatgctctacctgttcacatccccacagagagtttacagaaattttcattatcgaaaacagacgaaggaccagtgggccagagatgaccctgctttcttggtcctgttaagtatctggctctgtgtgtccactataggatttggctttgtgctggacatgggattctttgagacaataaagcttctcctttgggttgtactcatagattgtgtaggcgttggtcttctgatagcaactttaatgtgcattgccatttttggaaaaaacaagtaattcttctgtatccatttgcacctctgattctgctctacgggctttccctggcactgggatggaacttcacccatactctctgttctttctataagtacagagtgaaataaaaagtgagaagaagattcaatcgtaactgtgtcaacagtattgtgaagtgatcatttcttgtaaaacttgtaaataaactatcatctttgtagataaaaa

SEQ ID NO: 18725 - DNA, 570 bp, Homo sapiens
  SIMILAR (334)..(570): 701254mologous to Homo sapiens Secreted protein CC198_1,accession number W70321,Smith-Waterman Score=252.
  misc_feature (1)...(570): n = a,t,c or g
ctctatcactatcctcggagtcatggggcagtcacatcatccctgtctctgtaatggtagctgcccctggataagtgttattaggtgattcagaagggtgggctgttgcctntgcttgaggttgcagtctgcggttcccaagccccaagacccgcctcagaactaactgcatttgcttttgactcctggcctttctctagggttgggaagaacatggaaagtgacctccctgccaaataactcagaagaggagtgtcggtagccaaaagtttcttcagaatacgtgtaaaagaaatgtttttcttccatctaggaagatgttaccgagtactttcagtgaattccttagttgcaggggaacggagtcttgaattccaggggatggcggcaagacacacagccggagcgataacgttacaaatatctggaggaaggctttttccgcttttcgggcaaatggactttgaatttgctgcctggcagatgctctacctgttcacatccccacagagagtttacagacattttcattatctganacagacgaaagaccagtgggccagagatgat

SEQ ID NO: 18726 - DNA, 1794 bp, Homo sapiens
  SIMILAR (842)..(1564): 521254mologous to Homo sapiens Secreted protein CC198_1,accession number W70321,Smith-Waterman Score=460.
  misc_feature (1)...(1794): n = a,t,c or g
ccggtactaatggggtaatccaatggaagagtcaagtttggcaaataacagtcttnccccatttccggtgctttaagaacaattcctcaaaaacacatttaattatggctcccccaaccccataccctgttccaattaggtttttccttcctaaaaataacttgggatcaagagaatcatttactttaatacatattccgaaaacaactcatcccactttccttccagtgttcccacggaggggaaatcgggtcccaaccaaaacagatgtaagtaaaaagtatggttccctgttttgggcttcctttgtgttaaatgacccagggaaaaaaattgttgttttcccatgttggcttcaacataatgcatcaaatatccttttcttcctctgaatcttgccctgttatccacacctgatcttttacactcaaaaattgcgtacttcaaagagtttccagtatccttccttcaaacactgccgaggtggattttccttcctggaccacacagtccgactggcagcagacacgcgcccaggtcctccttcaggcccgcgcacgcgccgccctgcggcttgtcctcataatacttaggcatgacggcgcttcccctccgatgcggacgcgactttctcccaccgcaacacttgcaaccgggtcgggagcgagcgaggccccagtctcaggggaccggaagccagcggcaacaacttccggcgggccgcggcggaagatgttaccgagtacttcagtgaattccttagtgcaggggaacggagtcttgaattccagggatgcggcaagacacacagccggagcgaaacgctacaaatatctgaggaaggcttttccgctttcggcaaatggactttgaatttgctgcctggcagattgctctacctgttncacatccccatagagagtttacagaaattttcatttatcgaaaacagacgaaggaccagtgggccaggagatgaccctgcttttcttgggttcccgtttaagtattctggcttctgtgtgtccactataggatttgggctttgtgctggacatggggattctttgagacaataaagcttctcctttgggttggactcatagatttgtgtaggcgttggtcttctggatagcaactttaaatgtgggttcatctctaacaagtatttagtgaaacgacagagccagagactatgatgtggaatggggctatgcttttggatgtgcatctcaatgctttttatccactcctggtcattttgcattttatccagctttttttcatcaaccatgttaatctgacagacacatttaattggatatttagttggaaatacccttatggttgggttgcagttggctattatatcctaaggtaactttccctgggatacagtgttggactccttttcttttccagcattgcccatttttgaaaaaatacaagtaattcttctgtatccatttgcaccctctgattcctgcctcctacgggctttcccctggcactgggatggaacttcacccatactctctgttctttctataagtacagagtgaaataaaaagtgagaagaagattcaatcgtaactgttgcaacagtattgtgaagtgatcaatttcttgtaaaacttggtaaataaactatcatctttgtagatatcttaaaggtgtaaagtttgcaaatttgaagaaatatatatcaacattgtggtcaggtacattccttaaaactaattaaatgtacatttctgtaataaatattttttaaactaaaaaaaaaaaaaaaaa

SEQ ID NO: 18727 - DNA, 891 bp, Homo sapiens
  SIMILAR (142)..(369): 571254mologous to Schizosaccharomyces pombe 40s ribosomal protein s0,accession number AL049474,Smith-Waterman Score=221.
atgcctggcctgctactcttaaggggatctcagaacctcaagcagcaagcagaaatactctgtggcctgggactggcacttgttatttctgctgtcaaacctttgtccaaaaagttcatgttgccaaacccaacttcaatgaagccagaaagtgatggcatctacagcataaatctgaagaggacctgggagaagcttctgctggcaggtcatgccattgttgtcattgaaaactctgctgatgtcagtgtcatatcctccaggaatactggccagaaggctatgctgaagtttgctgctgccactggagccactccaattgctggccacttcactcctggaaccttcctaaccagatccaggcagcctactgggagccacggcttcttgtggtttctgaccccagggctgaccaccagtctctcacagaggcatcttgtgttaacccacctgccattgctttatgcaacacagattctcctctgtgccattggacattgccatcacatgcaacaacaagggagctccctcagtgggtcagatgtggtagatgctggcctgggaagttctgcacatgcgtggcaccatttcctgcaacacccatgggaggtaatgtctaatctctacttctacagagatcctgaagagactgaaaaagaagagcaggctgctgctgaaaaggctgtgaccaagaaggaatttcagggtaaatggactgtttcagctcctgagttcactgttactcagcctgaagttgcagactggtctgaaggcatgcagatctgcaatttgggcaaggctcagcagggacagctcagctcagatgctgaggatgacttctggagcctagagtcattggatggttactcacacacagtaaccttcagatga

SEQ ID NO: 18728 - DNA, 848 bp, Homo sapiens
  SIMILAR (459)..(848): 971254mologous to Homo sapiens laminin-binding protein,accession number J03799,Smith-Waterman Score=688.
gtccagtgcggtggaattcggcacgagcacaagggcccatacgggggggctgtggattaccgtcgtaacttaaagggaaatttttatcaatgtccggagtctcttgatggcctgctttgtgaaggaggaggatgtccttaagttccttgcagcgaggaacccactgtaggtggcaccaatcttgacttccagatggaacagtacatctatattaggaaaagtgatggcatctatatcataaggctcaagaggacctgggagaagcttctgctggcagctcgtgcaattgttgccattgaaaaccctgctgatgtcagtgttatatcctccaggaatactggccagagggctgtgctgaagtttgctgctgccactggagccactccaattgctggccgcttcactcctggaaccttcactaaccagatccaggcagccttccgggagctcacggcttcttgtggttacttgaccccagggctgaccaccagcctctcacggaggcatcttatgttaacctacctaccattgcgctgtgtaacacagattctcctctgcgctatgtggacattgccatcccatgcaacaacaagggagctcactcagtgggtttaatgtggtggatgctggctcgggaagttctgcgcatgcgtggcaccatttcccgtgaacacccatgggaggtcatgcctgatctgtacttctacagagatcctgaagagattgaaaaagaagagcaggctgctgctgagaaggcagtgaccaaggaggaatttcagggtgaatggactgctcccgctcctgagttcactgctactcagcctgaggttgcagactggtctgaaggg

SEQ ID NO: 18729 - DNA, 623 bp, Homo sapiens
  SIMILAR (127)..(525): 411254mologous to Homo sapiens ribosomal protein,accession number M64716,Smith-Waterman Score=137.
aagtactcacagcggacggtggtttttgggcccgtttctgagcagcgcttcctttttgtccgacatcttgagacgaggcttgcggtgtctgctgctattctcccggagcttcgccaatgccgccttaaggacggaccaggaaggaaggaaggaccgctggaaaagtccggcccaaggaaaggccaaagaccccagtgaaccaaatccggggggcaagggccaaaaaggaagaattggtccaaaaggcaaaagttccgggacaagcttcaataactttagtcttgtttgacaaagcttacctatgataaactctgtaaggaagttcccaacttataaacttataaccccaagcctgtggtctcctgagagacttgaagattcgaggctccctggccaagggcaagccctttcaggaagctccttaagtaaaaggacttattcaaacttggtttcaaagcacagagctccaagtaattttacaccaggaaattaccaagggtgggaggatgctcccagcttgctgggttgaagattgcatgaataggtccaaccaggctgtacattttggaaaaataaaactttattaaatcaaaaaaaaaaaaaaaaaaaaaaaaaatttcatt

SEQ ID NO: 18730 - DNA, 365 bp, Homo sapiens
  SIMILAR (3)..(233): 971254mologous to Homo sapiens dJ453C12.4 (novel protein (similar to Drosophila CG11753)),accession number AL021578,Smith- Waterman Score=382.
  misc_feature (1)...(365): n = a,t,c or g
agggcatggcgggtcagttccgcatctacttgtgggacccgctgctgatcctgtcgcaaatcgtcctcatgcagaccgtgtattacggctcgctgggcctgtggctggcgctggtggacgggctagtgcgaagcagcccctcgctggaccaaatgttcgacgccgagatcctgggcttttccacccctccaggccggctctccatgatgtccttcatcctcaacgccctcaccnnnnnnnnnnnnnnnnnnnnnnnnnnnnnnnnnnnnnnnnnnnnnnnnnnnnnnnnnnnnnnnnnnnnnnnnnnnnnnnnnnnnnnnnnnnnnnnnnnnnnnnnnnnnnnnnnnnnnnnnnnnnnnnnnngg

SEQ ID NO: 18731 - DNA, 452 bp, Homo sapiens
  SIMILAR (221)..(289): 951254mologous to Homo sapiens dJ453C12.4 (novel protein (similar to Drosophila CG11753)),accession number AL021578,Smith- Waterman Score=111.
gtaaaatgagaataatccctttccacctgctgtgagaaacaaatgaaatcccataatggatgtctatgaaagcacctattggaaataggctgccgtacagatgtagggaggtattatcttctgtgctctgggaagaatgcttgttccttaggaggcttgctgagatcctggggctctgccaagtcacttctccagtatatttccatttgtgattccccctcagatcctgggcttttccacccctccaggccggctctccatgatgtccttcatcctcaacgccctcacctggtgagtatcaccagttttgctatccagcttttgggctcttagtgctgggactaacttcctaagtttgaacatgagacaggctggcacttgtttatggggagtggtggagtaaagtgggtgacagaggccagttccgggaccctcgtgccaagctgagcgta

SEQ ID NO: 18732 - DNA, 1484 bp, Homo sapiens
  SIMILAR (152)..(667): 651254mologous to Homo sapiens dJ453C12.4 (novel protein (similar to Drosophila CG11753)),accession number AL021578,Smith- Waterman Score=456.
  misc_feature (1)...(1484): n = a,t,c or g
cggaaacgtttctttcctacgcagccgctcctgccgtcgtggtcgctggagctttgcctctctaggccggcagcgcctctcctacatggtcctgtctgtcagcgctgttttgggagcccgccggtagaggccgggccacgctcagacacttggatcgccgagtctggcactgggcatggcgggtcagttccgcagctacgtgtgggacccgctgctgatcctgtcgcagatcgtcctcatgcagaccgtgtattacggctcgctgggcctgtggctggctgctggtggacgggctattgcgaatcagcccctcgctggaccagatgttcgacgccgagatcctgggcttttccaacccttccaaggccggctctccatgatgtccttcatcctcaacgccctcacctgtgccctgggctttgctgtaatttcatccggcgaggaaaagcagtgtctggatttcactgtcactgtccatttctttcacctccttgggctgctgggttctaacagctccccgttttccccttcgggcggctgaaccttggtgggcttgggtccaaagcccgttgttgcattgcactcattggctgtcatcggggagtacctgtgcatgcggacggagctcaaggagatacccctcaactcagcccctaaatccaatgtctagaatcaggccctttggacatcctgctgacacttgggccccttaacaccttgggctgctcagaccctccagattgaggtccagcccagatctgagaggaaccctggaaatgtgaagtctctgttggtgtgggagagatagtgagggcctgtcaaagaaggcaggtagcagtcagcatgacagctgcaagaatgacctctgtctgttgaagccttggtatctgagaggtcaggaaggggacctctttgagggtaataacataattggaaccatgccactcttgagccccaaatacctgtcaccagcctgttgttttaaaaaaaaaaaaaaatccagggatatttgatgggagcaaaccacttctttagtcatctgtcttacctccctgggaccgcttgtaacttttgcagtgttgccgaatcacagcagttacctttgcagtgttgccgaatcacagcagttctgttggagaaacgcttggtttccggatccagagccacagaaagaaatgtaggtgtgaagtattagggctgctgtcaggggagagggatgggcagatgggagggcatcaaggcacaagggaaaatggcacaacctgtgcccctgtttattacacacgtttcatgttgcaccccaaggaacctatgactttctttccagtttcctttttaccagggtccccatactgctgccagctctcaacattgccaggccattagggcccagagaagaatccccagtgttggtccaaagccttaaccatcattaagacactggctgtntttttagggatggcccaggganccaggtcccactg

SEQ ID NO: 18733 - DNA, 1066 bp, Homo sapiens
  SIMILAR (301)..(789): 471254mologous to Homo sapiens Human secreted protein, SEQ ID NO: 7912,accession number G03831,Smith-Waterman Score=229.
atggccgaactgacagtaatgagatttcacacggaaccacaaggcagtgaaggtctgagacttcccagaatatcaggttccaagcccaaacaaatgcatgtaacctggttagaacccctggaaaatggcatttgtaatggaaacactggtaacgcacagctgctgatcccgcccggagtgatcttccataaatacccatctcattatgtcactgccatgcttaaaagcctcaagtggccaccattacaaacagaattaacttccagctccggccaggctctctggggactggttggaggtggcagcccccacaggcaggctagcacagaaaagctgttttcagagaaggttccaaagacagcagaaaattttccgtgctctgaactttcatgctttcatggagagaacggatttgggttataaggggttccctgctttcacagattatttcccagggtttatgctgtcaggggtggtgactttcacaccgccataaatggcacctggtggcaagtcccatcctatggggaagaaatttgaaggatgagaaacttcatccctaaagcataccgggtcctggcgatcttgtcccatggcaaaatgctggaccccaacacaaatggttccccagtttttttaacatcttgcactgcccaagaactgagtgggttggatggcaagccttgtggtgttttggcaaaagtgaaagaaaggcatgaatattgtggaggccatggagcggctttgggtccagggaatggcaagaccagcaagaagatcaccattgcttgactgtgggacaactccgaataaagtttgaccttgtgttttattctttaaccaccagattcattcccttctgtgctctcctctcagggagagcaccccctccaccccatttggctcggagtaatcctagaatctatgtggctctgcgctgcaagttcccttttggtttccatgttttccttgttccctcccatgcctaggtggattaaaaagttcccctttatgattattgaaataaaaacctaattaccatttgtcaaaaaaaaaaaaaaaaaaa

SEQ ID NO: 18734 - DNA, 454 bp, Homo sapiens
  SIMILAR (97)..(453): 1001254mologous to Homo sapiens pre-mRNA splicing factor,accession number L10838,Smith-Waterman Score=662.
tgagagagttggttggtgttgggccggaggaaagcgggaagactcatcggagcgtgtggatttgagccgccgcattttttaaccctagatctcgaaatgcatcgtgattcctgtccattggactgtaaggtttatgtaggcaatcttggaaacaatggcaacaagacggaattggaacgggcttttggctactatggaccactccgaagtgtgtgggttgctagaaacccacccggctttgcttttgttgaatttgaagatccccgagatgcagctgatgcagtccgagagctagatggaagaacactatgtggctgccgtgtaagagtggaactgtcgaatggtgaaaaaagaagtagaaatcgtggcccacctccctcttggggtcgtcgccctcgagatgattatcgtaggaggagtcctccacctcgtcgcagatctccaagaaggagaa

SEQ ID NO: 18735 - DNA, 981 bp, Homo sapiens
  SIMILAR (712)..(972): 751254mologous to Homo sapiens Human transmembrane protein HP02219,accession number Y52389,Smith-Waterman Score=338.
atgcgttgggcctgtgacttcacgaagctgctttcttccacctggaccctgatacagtacccagagaatgccatgattatagcccggtgggctcttcttgccgactgccctgagaaaaccaaggcactgagaacaacagaagatggaatcgtagatgctgccaattttgagcagtttttgcaagaaaggatcaaagtgaacggaaaagttgggaaccttggtggaggggtggtgaccatcgagaagagcaagagcaagatcaccgtgacatccaagggtcactttcaattctatgtaaatttgaggatcagcttcctcatttgtggaaaagaaaaggctgttggaattttagaagagattgtgttgaatttgctgatcattttcagtagtattgacatcttaacagtgaaagggacctgctccggctgcgagagaggcttcttcttggagatctacgacgaggtggaagactcctcctatgataatcatctcaaggacgatgaccccaagagggagggacctggtgctgagcaagctttatcaacaccgccctgctgtccgttagagaaaaggcccattaatgatcagacgctgattatttcttggtcaggaagtacgaatgtgatagaagaagctggaaggcattctgtggttcaggaaggctggggggcactgggtgtgctcagaactacactgcccagcttgccgcagataacaggaggcgcagggttcgtgggctcccatctaactgacaaactcatgatggacggccacgaggtgaccgtggtggacaatttcttcacgggcaggaagagaaacgtggagcactggatcggacatgagaacttcgagttgattaaccacgacgtggtggagcccctctacatcgagggcagagctgagaaccagctgagccatactgtgcccggtcctgtagacctgtcagatcggatcgtgaatggatattttttgagcctctaa

SEQ ID NO: 18736 - DNA, 1443 bp, Homo sapiens
  SIMILAR (211)..(432): 781254mologous to Gallus gallus ribosomal protein L22,accession number AB046394,Smith-Waterman Score=302.
atgacaaacccccacagccaatgtcataccgaagagcaaaaagctgaaaacctctcctctaagaactggaacaagacaaggatgcccacttttaccactcttactcaggtagcacccaatcccatcactggatatacatccaaaggaaagaaaatcagtacgttaaagagatatctggctttctgcctccgctgctgccatggtgcccgtgagaaagcttgtggagaaggcgggcaaaaaacaaagcaggttctgaggttcactcttggttgcacccaccccatagaagatggaatcatagatgctgccaattttgagcagtttttgcaagaaaggatcaaagtgaacggaaaagttgggaaccttggtggaggggtggtgaccatcgaaaagagcaagagcaagatcaccgtgacatccaagggtcactttcaattctatgtaaatttgaggatcagcttcctcatttgtggaaaagaaaaggctgttggaattttagaagagattgtgttgaatttgctgatcattttcagtagtattgacatcttaacagtgaaagggacctgctccagctgcgagagaggcttcttcttggaaatctgcgacgaggtggaagactcctcctatgataatcatctcaaggacgaggaccccaagagggaggaatgcaggaaacgtgatgcctatgcccctctaaaagatcaagggaacgcagagaagagacgacacaatgtcaggaaatcgtggcccctgctttctgccaagctcctcaagataaggacaaatcttacaggaacagaagaagctgaactacatgccaatcacattcaacaagttcctatcaaatgtctgagctacaagttgacagaaaggaaaaatggaacacaaaagcacttgcattatgcactcatattacatgtgaagtgtgaccggagagagaccagcaaattcacaaaattctatgggacccaccctctgacagcactgtttgttcccagagcatgggatgggcctccttctgctctccctgagtctgagcttgcggtcttcttggtggcttatgaagggaacacgctgctccacctgtttctaagtggggctgagcaaaggggaaacagttctttaaaagagagggctggccgggcgcgcttcagccatcagagaaagttgaatgaacaaacgatacccccagacaaccttaccaagtcatctgtagacttacagtcaagttttagtgcagttcaccctaattcacaaccaacagtttgggttgatatgcctgcccatccactctcacagtaccttgtacctgcccgaaagacagtcctcccaatttggtatggaaattcttgccctgatgtgatatttggctctctatcagacagcaagctcagtgaaggcaaggagtttgcccttccactcaagttcctcaattttttttaa

SEQ ID NO: 18737 - DNA, 831 bp, Homo sapiens
  SIMILAR (815)..(426): 521254mologous to Homo sapiens Epstein-Barr virus small RNA associated protein,accession number X59357,Smith-Waterman Score= 228.
tagaaagatgtcgcgttttcttttaatgaatgagagaagcccatttgtatccctgaatcattgagaaaagcaacagatacaactgacagtcacactttttaaaatcaaacagtcactaccttcagcccacacctccacacccgcatctgcctccccaatggctgtcagttcggtaaagtcaccctctccttctactctggtattaccacgagaattgaaatttttaagcagaaaaaaaaagaagtcaagttacaaataaatgagtggcgaaccaagggaagccctttgactatgatttccaattttctgttcaatccacactgcagagatacaaggataaaccaccattttggttcccaagtttaattcaagaactcatacaaaattttcccggataaatgaaatttaatcttcgtcatcctcctcttctttctgttctggttaatctggaagtaacggaaattcggtaacttctcctttggctggttaggcaaactacgcggcaaaccaggtcaccgtagattattcttcttcaaatatttttttggttgagatattttcaaatacccttttggagaaaggcacctcggatgtcacggtgatcttgcctcttgctcctttcgatggtctaccacccctccaccaaggttcccagcttttccgttcactttgatcctttcttgcaaaaactgctcaaaattgggcagcatccatgattcccatcttctacagggtgggtgcaatcaagagtgaacttcagaacttgcttctttttttttgccccccttcaccacaagctttttcacaggagccatggcggcagcggagtta

SEQ ID NO: 18738 - DNA, 303 bp, Homo sapiens; identical to SEQ ID NO: 7660
  SIMILAR (86)..(205): 951254mologous to Homo sapiens unnamed protein product,accession number AK022547,Smith-Waterman Score=195.

SEQ ID NO: 18739 - DNA, 473 bp, Homo sapiens; identical to SEQ ID NO: 7661
  SIMILAR (88)..(213): 381254mologous to Pleuronectes platessa metallothionein,accession number X56743,Smith-Waterman Score=60.

SEQ ID NO: 18740 - DNA, 649 bp, Homo sapiens; identical to SEQ ID NO: 7662
  SIMILAR (334)..(188): 291254mologous to Drosophila melanogaster CG12643 gene product,accession number AE003450,Smith-Waterman Score=52.

SEQ ID NO: 18741 - DNA, 1188 bp, Homo sapiens; identical to SEQ ID NO: 7663
  SIMILAR (859)..(1167): 921254mologous to Homo sapiens N-acetyl-alpha-glucosaminidase prepro-polypeptide,accession number M13520,Smith-Waterman Score= 516.

SEQ ID NO: 18742 - DNA, 486 bp, Homo sapiens
  SIMILAR (282)..(356): 961254mologous to Homo sapiens hypothetical protein,accession number AL122091,Smith-Waterman Score=126.
atatgtaccaaggcctggagacaggaaaatgaatgctgagggactgactcagtggttctaccatttcccactctcgaatgtgtcagtatgtagcacttcataggcaagcaggttaacctgcatccacttttcagccagttggctttccgagaataggtgcttagggttacttgaatgagaaggtagaaggagggacagagggctggataagccttgctgctgcctaataaatagccatgggagggcccaggctcatattactcatcctggggtttccctgcaagctgcatggagcagcctatggcaaaggcatctacctgagccccatctccagtatttcctttggatactcaggtaagaaatattctgtggccaccttgactctatttacattgcctccatttgtgaatacatgatttgtgctgtctgttcctccctcattatggatacttggtctgtgtcaactctcttcccgatcatggatac

SEQ ID NO: 18743 - DNA, 652 bp, Homo sapiens
  SIMILAR (289)..(624): 921254mologous to Homo sapiens hypothetical protein,accession number AL122091,Smith-Waterman Score=544.
ttgaaaaagatcctgggtatgtttacatcccaattttggaaacatctgagcaatgatttcttgaagacccagcaggagaagaggcacagttggttcaaggcaagtggtaccatcaagaagttccgagctggcctcagcatcttttcacccatccccaagtctcccagtttccctatcatacaggactccatgctgaaaggcaaactaggtgtaccagagcttcgggttgggcgcctcatgaaccgttccatctcctgtaccatgaagaaccccaaagtggaagtgtttggctaccctcccagcccccaggtcagtggtcactgcaagaacattcccactctggagtatggattcctcgttcagatcatgaagtatgcagaacagaggattccaacattgaatgagtactgtgtggtgtgtgatgagcagcatgtcttccaaaatggatctatgctgaagccagctgtctgtactcgtgaactatgcgttttctccttctacacactgggcgtcatgtctggagctgcaaaggaggtggccactggagcaaaggtggtggatctgctggtggccatgtgtagggcagctttatagtcccctagaaagagcatcatctttgagccctaatcctttgggggggaaccccactgat

SEQ ID NO: 18744 - DNA, 2625 bp, Homo sapiens
  SIMILAR (364)..(1749): 571254mologous to Homo sapiens unnamed protein product,accession number AK022547,Smith-Waterman Score=972.
  misc_feature (1)...(2625): n = a,t,c or g
atgcatgtacagcatagagttcaggctggagtggagagtctgtacaagagcaccaacgaccacacgggacagtcgacacaacacaaacaagaaaaaagtcttctcctggcaaagggaacagggatgcctgcagggcagctgaagttcatgcacacctcacaccagttcctcctgctgagcagccctcctgccaaggaggctcggttccggaccgccaagaagctctatggcagcacctttgccttnccagtgtacctgtccatcttcatgtcctgtgtgggtgagaatggtgggtcccacattgagaactggcattcgatcctgcgcaatgggctggtcaatgcatcctacaccaaactgcaggacatcaaaggccagttctggaatgatgacgactcggagggagataatgaatcagaggaatttctctatggcgttcaggggagctgtgcagctgacctgtatcgacacccacagcttgatgcagacattgaagccgtgaaggagatctacagtgagaactctgtatccatcagagaatatggaactatcgatgacgtggacattgccctccacatcaacaatcagtttcctggaatgaagaagtctctacagcctgggaaggtcctccggacagaaccttattgtgttgaggctgcgatttttttctctcccagtacctagatggaccagacccatcccattgaggttttccagccatcaaataaggaaggatttgggctgggtcttcagttgaaaaagatcctgggtatgtttacatcccaacaatggaaacatctgaggcaatgatttcttgaagacccagcaggagaagaggcacagttggttcaagggcaagtgggtaccatcaagaagttccgagctgggccttcagcattctttttcacccatccccaagtcttcccagttttccctattcataacagggactccatggctggaaagggcaaactaggtgtaaccagagcttcgggttgggcgcctcatgaaccgctccatctcctgtaccatgaagaaccccaaagtggaagtgtttggctaccctcccagcccccaggcaggtctcctgtgccctcagcacgtgggcctccctcccccagcacggacctctcctttggtcagtggtcactgcaagaacattcccactctggagtatggattcctcgttcagatcatgaagtatgcagaacagagtgattccaacattgaatgagtactgtgtggtgtgtgatgagcagcatgtcttccaaaatggatctatgctgaagccagctgtctgtactcgtgaactatgcgttttctccttctacacacttgggcgtcatgtctggagctgcagaggaggtggccactggagcagaggtggtggatctgctggtggccatgtgtagggcagctttagagtcccctagaaagagcatcatctttgagccttatccctctgtggtggaccccactgatcccaagactctggcctttaacccctaagaagaagaattatgaagcggcttcagaaagctctgggatagtgtgatgtctattccgggagatgacccagggctcataatttggaaatcaagaaacagatggacaaagtttggatccccctgggcccatcctctcctgcagtggatcatctctagcaacatggtcacacattgtcaaactacctctcagcaggcagctgaagttcatgcacacctcacaccagttcctcctgctgagcagccctcctgccaaggaggctcggttccggaccgccaagaagctctatggcagcacctttgccttccatgggtcccacattgaggaactgggcattcgatcctggcggcaatgggctggttcaatggcattcctacaccaaactgcagctgcatggagcagcctatggcaaaggcatctacctgagccccatctccagtatttcctttggatactcaggaatgggaaaaggacagcacaggatgccctccaaggatgagctggtccagagatacaacaggatgaataccatcccccagacccgatccattcagtcaccggttcctgcagagtcggaatctaaactgtataggcactttgttgaagtgattacatctaaggacctccagaaggcatggggaacatctggggtgttgccctgtgttccgacccatgtcctgcacaagattccttcctttgtaatatgaggatggtccaggtgggcgatgcccaacattatatacctcacggaccccagagagtacacgagagggaaatcagtgcgtgttgatcgggagactcacggtttacacaaagctcgagggggccccaggccctcggtacccacccctgttacccccaggatccatctgcccctcataaaagtgttcaggtaacacggctgaggctgccctgaggaatcaaggggccattaccaaggggcaaggaaaaggatatgtaagaggtggccttcatggtagagcttgacccaagaactactccacattcggatggcccagactgactccatcccctgactttcccttttgacttcaccctgtttgtaaataaaacaataaaatggaaggtgctgtggattggaaaaaaaaaaaaaaaaaa

SEQ ID NO: 18745 - DNA, 486 bp, Homo sapiens
  SIMILAR (83)..(484): 941254mologous to Homo sapiens 2,4-dienoyl-CoA reductase,accession number L26050,Smith-Waterman Score=616.
  misc_feature (1)...(486): n = a,t,c or g
ggggcggccnnnnncatctgagatattgatanctcgtgccgaaagnccatgaagctaccggccagggttttctttactctggggtcccggctgccctgtggcctcgctcctcggagggaagatggatgttttgaaagctaccgcagaacaaatttcttctcaaactggaaataaggttcatgcaattcagtgtgatgtgagggatcctgatatggttcaaaacactgtgtcagaactgatcaaagttgcaggacatcctaatattgtgataaacaatgcagcagggaattttatttctcctactgaaagactttctcctaatgcttggaaaaccataactgacatagttctaaatggcacagccttcgtgacactagaaattggaaaacaactaattaaagcacagaaaggagcagcatttctttctattactactatctatgctgagactggntcaggttttgtagtaccaagtgcttctgccaa

SEQ ID NO: 18746 - DNA, 638 bp, Homo sapiens
  SIMILAR (36)..(533): 911254mologous to Homo sapiens 2,4-dienoyl-CoA reductase,accession number L26050,Smith-Waterman Score=819.
aaaaatgcagcagggaattttatttctcctactgaagactttctcctaatgcttggaaaaccataactgacatagttctaaatggcacagctttcgtgacatttctttctattactactatctatgctgagactggttcaggttttgtagtaccaagtgcttctgccaaagcaggtgtggaagccatgagcaagtctcttgcagctgaatggggtaaatatggaatgcgattcaatgtgattcaaccagggcctataaaaaccaaaggtgcctttagccgtctggacccaactggaacatttgagaaagaaatgattggcagaattccctgtggtcgcctggggactgtagaagaactcgcaaatcttgctgctttcctttgtagtgattatgcttcttggattaatggagcagtcattaaatttgacggtggagaggaagtacttatttcaggggaattcaacgacctgagaaaggtcaccaaggagcagtgggacaccatagaagaactcatcaggaagacaaaaggttcctaagaccactttggccttcatcttggttacagaaaagggaatagaaatgaaacaaattatctctcatcttttgactatttcaagtctaataaattcttaattaac

SEQ ID NO: 18747 - DNA, 411 bp, Homo sapiens
  SIMILAR (98)..(328): 441254mologous to Homo sapiens Gry-rbp,accession number AF037448,Smith-Waterman Score=109.
tttcgtacatgaagctaccggccagggttttctttattttttggtcccggctgccctgtggcctcgctcctcggagggtaaggcggccgggggcgcggggagcgaggacagggcgtctcgacgcgcaaagagagaggacagggcgtcacgggggcttggggagcgaggacaaggcatcctggggcgcaaagagagaggacagggcgtcccgggggttcggggagcgaggacagggcatcccgaggcgcagagagagagaggacagggcgtcccggggcctcggggagcgaggacagggtgtcccggggctcaaagagagaggacagggcgttctggagcgcttagagagcacataagcaaccccgcgagcgagagagaggacaggacgtctcggggcgcaagaaaaagggg

SEQ ID NO: 18748 - DNA, 1584 bp, Homo sapiens; identical to SEQ ID NO: 6590
  SIMILAR (850)..(1575): 781254mologous to Homo sapiens putative p150,accession number U93565,Smith-Waterman Score=934.

SEQ ID NO: 18749 - DNA, 1328 bp, Homo sapiens
  SIMILAR (143)..(400): 851254mologous to Homo sapiens 2,4-dienoyl-CoA reductase,accession number L26050,Smith-Waterman Score=379.
acgccgcctgggtcccagtccccgtcccatcccccggcggcctaggcagcgtttccagccccgagaactttgttctttttgtcccgccccctgcggcccaaccgcctgcggcggcttccggcccgagttctggaggattaacatgaagctaccggccaaggttttctttactcttgggtcccggctgccctgtggcctcgctcctcggaggtttttcagttatgggacaaaaatattatatcaaaacactgaagctttgcaatctaaattcttttcacctcttcaaaaagcgatgctaccacctaatagttttcaaggaaaagtggcattcattactgggggaggtactggccttggtaaaaggaatgacaactcttctgtccagcctaggtgctcagtgcgtgatagccagccggaagaatggatgttttgaaggctaccgcagaacaaatttctttttcaaactgggaaataaaggttcatgcaattcagtgtgatgtgagggatcctgatatggttcaaaacactgtgtcagaactgatcaaagttgcaggacatcctaatattgtgataaacaatgcagcagggaattttatttctcctactgaaagactttctccctaatgctggaaaaaccaaaaacgaacatagtctaaaatggcacagccttcgtgacactagaaatgggaaaacacctaataaaagcacagaaaggagcagcatttcttttctattactacctatctatgcctgagactgggtcaggtttttgtaggtacccaagtgcttctgcccaaagcagggtgtgggaagcccatggagcaagtctcttgcagctggaatgggggtaaaatatgggattgcggattccaattgtggattccaaccaggggcctataaaaaccaaaaggtgccctttacccgtctggacccccaacgggaacatttggagaaaagaaaatgattgggcagaaattcccctgtggttcgccctggggacttgtagaagaactccgcaaatccttgcctgctttccctttgtagtgattatgccttcttgggattaatggagcagtcattaaatttgaccggtggagaggaagtacttattttcaggggatttcacacgacctgagaaaggtcacccaaggagcagtgggacaccatagaagaactcatcaggaagacgaaaaggttcctaagaccactttggccttcatcttggttacagaaaagggaatagaaatgaaacaaattattctcttcatctttttgactattttcaagtctaataacttcttaattaacaaacaaaaaaaaaaaaaaaa

SEQ ID NO: 18750 - DNA, 432 bp, Homo sapiens; identical to SEQ ID NO: 3379
  SIMILAR (17)..(430): 881254mologous to Homo sapiens herpesvirus associated ubiquitin-specific protease (HAUSP),accession number Z72499,Smith- Waterman Score=659.

SEQ ID NO: 18751 - DNA, 211 bp, Homo sapiens
  SIMILAR (1)..(180): 741254mologous to Homo sapiens herpesvirus associated ubiquitin-specific protease (HAUSP),accession number Z72499,Smith- Waterman Score=216.
gaaatccctttggaccaggtggacatagacaaagagaatgagatgcttgtcacagtggcgcatttccacaaagaggtcttcggaacgttcggaatcccgtttttgctgaggatacaccagtttaaaattgcaattgtaatgatggaccgacaccagtacataaatgaagacgagtatgaagtaaatttgaaagactttgagccacagcccg

SEQ ID NO: 18752 - DNA, 242 bp, Homo sapiens
  SIMILAR (1)..(138): 861254mologous to Homo sapiens herpesvirus associated ubiquitin-specific protease (HAUSP),accession number Z72499,Smith- Waterman Score=202.
atggtgtcctatatccagcgtaaagaagtagactatcggtctgatagaagagaagattattatgatatccagctaagtatcgaaggaaataaaaatatatttgaatcatttgtgaattatatggcagaagaacagctcatcctggttcatagtagagataatcatggtagacattatgtggtttatctaaaccccaaaggggatggcaaatggtgtaaatttgatgatgatgtggtgtcaag

SEQ ID NO: 18753 - DNA, 734 bp, Homo sapiens
  SIMILAR (84)..(731): 801254mologous to Homo sapiens herpesvirus associated ubiquitin-specific protease (HAUSP),accession number Z72499,Smith- Waterman Score=908.
tcctggttcatagtagagataatcatggtagacattatgtggtttatctaaaccccaaaggggatggcaaatggtgtaaatttgatgatgatgtggtgtcaagttggtggaacgactctaagaagagaaaaggatcaacgctcagaaggtggacagaatggcaggaagtccatctctatatgcaagcgcaggtagcctcagaggaccagttttgtggccaccagggaaatgacatgtacgatgaagaaaaagtgaaatatactgtattcaaagtattgaagaactcctcacttgctgagtttgttcagaacctctctcagatcatggaatttccacaagatcaaattcaactgtggcccatgcaagcaaggagtaatggaacaaaacggccagcaatgttagataatgaagctgatggcaataaagcaatgattgaggtcagtgataatgaaaactcttggacaatattcctggaaacagtcgatctcgagctggctgctagtggagtgaccttacccaagtttgataaagctcatgatgtaatgttttttttgaagatgtatgatcccaaaatgcggagcttgaattactgtgggcatatctacacaccaatatcctgtgaaatacgtgacttgctcccagttatgtgtaacagagcaggatttattcaagatactagccttatcctctatgaggaagttaaactgaatttaacagagagaattcaggactaa

SEQ ID NO: 18754 - DNA, 659 bp, Homo sapiens
  SIMILAR (291)..(515): 961254mologous to Homo sapiens herpesvirus associated ubiquitin-specific protease (HAUSP),accession number Z72499,Smith- Waterman Score=370.
tcgggaccatttcctgagaaggtgttctgtaaatgacaggcttcttgcatcaaggccacttttgttaacctcccgtcagtatttggttggtcctagattagggccagtgtcctcactgtgagtgaaattccacagatgaagggagttggggtgggaatgaaaagccaagaacatgggggcccagctggggacagttgagaacaatgatgcaactttctcctctcttcctttgtggtagcagaccttttatgctttcttgaaagcacttattttatcttttcattacttaggaaataacactatatccagacaagcatgggtgtgtccgggacctgttagaagaatgtaaaaaggccgtggagcttggggagaaagcatcagggaaacttaggctgctagaaattgtaagctacaaaatcattggtgttcatcaagaagatgaactattagaatgtttatctcctgcaacgagccggacgtttcgaatagaggaaatccctttggacctgttagaagaatgtaaaaaggccgtggagcttggggagaaagcatcagggaaacttaggctgctagaaattgtaagctacaaaatcattggtgttcatcaagaagatgaactattagaatgtttatctcctgcaacgagccggacgtttcga

SEQ ID NO: 18755 - DNA, 591 bp, Homo sapiens
  SIMILAR (122)..(277): 1001254mologous to Homo sapiens herpesvirus associated ubiquitin-specific protease (HAUSP),accession number Z72499,Smith- Waterman Score=286.
tcaaactgttaggttttagcagttaaatcaggatgtatagaacagtttactccatgtcgattaatgctagtgcttttggtcaatgcacaggctctgtgactgatgatgtgttttttttgcagacaccagttggcgctccgaggcaacctttcagttcactgtggagcgcttcagcagactgagtgagtcggtccttagccctccgtgttttgtgcgaaatctgccatggaagattatggtgatgccacgcttttatccagacagaccacaccaaaaaaagcgtaggattctttctccagcgcaatgctgaatctgattccacggaagacagtttaaatgatgcaactacaaacccccacatcgtggcatttcattactggaagccaaatttgaacagcctagtgtagttttatcttaagatatttgctgtctctacatagccttttgattctgaattagattaaatacgggtttctctttaaaacccacgtggatatgtataatatccaagctagaaaaggatatttttatcttgtaagtgaaaaaactaaaaatagtttgttagaatctccagcatcccccctcaaacct

SEQ ID NO: 18756 - DNA, 5546 bp, Homo sapiens
  SIMILAR (1449)..(2135): 1001254mologous to Homo sapiens herpesvirus associated ubiquitin-specific protease (HAUSP),accession number Z72499,Smith- Waterman Score=1226.
  misc_feature (1)...(5546): n = a,t,c or g
gtacgtgcgcgtctccctgccgccgccgccgcccgccgcgggccgccccggggccgccgtcgccgacgacgcgcgggaggaggaggaggaggccgccccgccgccgccgccgccgccgccgccccggctcgccgccgcccgcccgccgggctcgcagccccggcccccggccgcaggcgaggcccaggccgcggccgacatgaaccaccagcagcagcagcagcagcagaaagcgggcgagcagcagttgagcgagcccgaggacatggagatggaagcgggagatacagatgacccaccaagaattactcagaaccctgtgatcaatgggaatgtggccctgagtgatggacacaacaccgcggaggaggacatggaggatgacaccagttggcgctccgaggcaacctttcagttcactgtggagcgcttcagcagactgagtgagtcggtccttagccctccgtgttttgtgcgaaatctgccatggaagattatggtgatgccacgcttttatccagacagaccacaccaaaaaaagcgtaggattctttctccaagtgcaatgctgaatctgattccacgtcatggtcttgccatgcacaagcagtgctgaagataataaattacagagatgatgaaaagtcgttcagtcgtcgtattagtcatttgttcttccataaagaaaatgattggggattttccaattttatggcctggagtgaagtgaccgatcctgagaaaggatttatagatgatgacaaagttacctttgaagtctttgtacaggcggatgctccccatggagttgcgtgggattcaaagaagcacacaggctaccgtcggcttaaagaatcagggagcgacttgttacatgaacagcctgctacagacgttatttttcacgaatcagctacggaaaggctgtgtacatgatgccaaccgagggggatggattcgtcttaaaagcgttccctttagcattacaaagaagtgttctatgaattacagcatagtgataaacctgtaggaacaaaaaagtttaaccaaagtccatttggggtgggaaactttagatagcctcatgccacatgatgttcaggagccttgtcgagtgttgctcgataatgtggaaaataagatgaaaggcacctgtgtagagggcaccatacccaaattattccgcggcaaaatggtgtcctatatccagtgtaaagaagtagactatcggtatgatagaagagacgattattatgatatccagctaagtatcaaaggaaagaaaaatatatttgaatcatttgtggattatgtggcagtagaacagctcgatggggacaataaatacgacgctggggaacatggcttacaggaagcagagaaaggtgtgaaattcctaacattgccaccagtgttacatctacaactgatgagatttatgtatgacccctcagacggaccaaaatatcaagatcaatgataggtttgaattcccagagcagttaccacttgatgaatttttgcaaaaaacagatcctaaggaccctgcaaattatattcttcatgcagtcctggttcatagtggagataatcatggtggacattatgtggtttatctaaaccccaaaggggatggcaaatggtgtaaatttgatgacgacgtggtgtcaaggtgtactaaagaggaagcaattgagcacaattatgggggtcacgatgacgacctgtctgttcgacactgcactaatgcttacatgttagtctacatcagggaatcaaaactgagtgaagttttacaggcggtcaccgaccatgatattcctcagcagttggtggagcgattacaagaagagaaaaggatcgaggctcagaagcggaaggagcggcaggaagcccatctctatatgcaagtgcagatagtcgcagaggaccagttttgtggccaccaagggaatgacatgtacgatgaagaaaaagtgaaatacactgtgttcaaagtattgaagaactcctcgcttgctgagtttgttcagagcctctctcagaccatgggatttccacaagatcaaattcgattgtggcccatgcaagcaaggagtaatggaacaaaacgaccagcaatgttagataatgaaggccgacggcaataaaacaatgattgagctcagtgataatgaaaacccttggacaatattcctggaaacagttgatcccgagctggctgctagtggagcgaccttacccaagtttgataaagatcatgatgtaatgttattttttgaagatgtatgatcccaaaacgcggagcttgaattactgtgggcatatctacacaccaatatcctgtaaaatacgtgacttgctcccagttatgtgtgacagagcaggatttattcaagatactagcctttatcctctatggaggaagttaaaccgaatttaacagagagaattccaggactatgacgtgtctccttgataaagccccttgatgaactaatggatggtgacatcatagtatttcagaaggatgaccctgaaaatgataacagtgaattacccaccgcaaaggagtatttccgagatctctaccaccgcgttgatgtcattttctgtgataaaacaatccctaatgatcctggatttgtgggtacgttatcaaatagaatgaattattttcaggttgcaaagacagttgcacagaggctcaacacagatccaatgttgctgcagtttttcaagtctcaaggttatagggatggcccagggtaatcctcttagacataattatgaaggtactttaagagatcttctacagttcttcaagcctagacaacctaagaaactttactatcagcagcttaagatgaaaatcacagactttgagaacaggcgaagttttaaatgtatatggttaaacagccaatttagggaagaggaaataacactatatccagacaagcatgggtgtgtccgggacctgttagaagaatgtaaaaaggccgtggagcttggggagaaagcatcaaggaaaacttaggctggctagaaattgtaagctacaaaatcattggtgttcattcaaggaaggtggaactattaggaatgttttattctcctgccaacgagccggacgttttcgattagggggaatttcttttgggaccaggtgggacataggacaaagagattgagatgcttgtcacagtggcgcatttccacaaagaggtcttcggaacgttcggaatccccgtttttgctgaggatacaccaggggcgagcatttttcgagaagttgatgaaggcgaatccagagcctgctgggacatccagggagaagggatttttaggaagttttaaattttgcaattgtaaatgatggggccgacaccagtacataaaatgaagaccgagtatgaaagtaaatttgaaagacttttgagccacagccccgntaatatgtctcatcctcggccttggcttagggctcgaccacttcaacaaagccccaaagaggaagcgcgttcccttatctttgaaaaggccattaaaatccataacttgatttccaagctggtgtgttcaaggccgaggacgggtgtgtggggtgggccccttaaacagcctaggaactttgggtgcacgtgccctctaggccgaagtctttcagcaagagggatttcgctgctgggtgtttaatttttatttttatttgagggctgtttcagttttggcttctctgtaatctatttgaacttgccctttttttgaggcaaaattgaaggatgtttttaataaaagcttgggatgcccaatgaaaagttattttatgggtaacccacagtgtcaaggcaactgttcagcgcaatggggggagaagaggttagtgggatcggggggtcccctggnctcaaggtctctggggctgtcccctagtggggcacgagtggctccggctgcccttcctggggggtcccgtgcaaccagccctgcagctaagcaagtcttgtgttttaggctcctcttgacctatttcctatcagttatacttttatattgaccttttgtgcatcttgttaaggccaaaacgggggaaactccacaaccctaaataaatagcgctccttccccttccaatgtgtgccattgtcggcccttccctcggggttctccctccctcccagctgcctgggggctttttaataaacttgtcctcaccctcgtcagcccactacttgtctgcagcccctttgcaaagtggatgcactgaaatacagtccggacagaacattgtaaggggtctttttattaaatcaagaacattgttaaattcaattaaggtttactctgctgccttggcagacttacgatctcaacaggttcatacgagcaggtgaaaggattataaatagaatttcgttaaagtggaacaggacgacaagaaagcccttttagcaagagggccatgctccacgagtggttagttaagcctgtcgactttgtaaaaaagttaaaaaagaaaaaaaaaaggaaaaaggaattgtaatatttaatgaatgaacatgtaccaatttgcccactgggaggaggttcctttttgttgggtgagtctgcaagtgaatttcactgatgttgatattcattgtgtgtagttttatttcggtcccagcccccgtttccttttattttggagctaatgccagctgcgtgtctagttttgagtgcacgtaaaatagaatcagcaaatcactattatttttcatccttatccggtattttatgggatgtttctgtcagagcagtgtacaacaactcttcctgtatattgcccttcagttgaaaaatgttgaatgatgaatagaattttctataaaaattataattcagtgagttacgtggaaggggaggaagatttctactctccctggaaacaggcctgggaaaccttggcatttgtaacaaggtttcactgagatgtacttttccttctaattccggtttgcgggggcagggtctcttgtttcttttttttttttagcctctaactagtcacatttactcttaagaaatgaaaggttttccaggagagaactgtgtacaaataaggtgactggagatgtgacctgatgtgtcacgaggcccttcggggcggcaggcgctatcgtgggcgtggtccttgcaccgtcccatcggccttgccttccagctccgtggcacggtttcctggtctttgggccagtgtgtaccttggagcgacttcctttctcaacttccactgcagtgtgtgtgccttctgctctgagagctgccttgtgacccgtgtgatagaaagcagggagtgagggtccccgcggacctggcccttccctccttcctcccccagaaagaggagttagagcaggggtgcgagagccgttcgctgtgggtttgtctttgaacaaacattaaggctgctctcgtctttgttctgggctgggggctggctgtagtcttaggtacctgaaagttcctactctccctcaaggtcttaactgactcttttctcc

SEQ ID NO: 18757 - DNA, 450 bp, Homo sapiens; identical to SEQ ID NO: 18580
  SIMILAR (331)..(450): 751254mologous to Homo sapiens immunoglobulin light chain variable region,accession number M74019,Smith-Waterman Score=163.
  misc_feature (1)...(450): n = a,t,c or g

SEQ ID NO: 18758 - DNA, 1046 bp, Homo sapiens
  SIMILAR (18)..(215): 841254mologous to Homo sapiens immunoglobulin kappa light chain,accession number AJ010444,Smith-Waterman Score=288.
cccagtcaggacacagcatggacatgagggtccccgctcagctcctggggctcctgctacttcggctccgaggtgccagatgtgacatccagatgacccagtctccatcctccctgtctgcgtctgtaggagacagagtcaccatcacttgtcgggcgagtctggatattagcaggtggttagcctggtttcagctgaaaccaggggacagtccctaagctcctgatctatgctgcatccactttgcaaagtggggtcccatcaaggttcagcggcagtggatctgggacagatttcactctaaccatcagcagcctgcagtctgaagatattgcgatgtactattgtcagcaatataataattggcctcagctccgtacactttcggcccctgggaccaaggtggaaatcaaaacgaaactgtgggctgcacgcatctgttcttcatcttcccggcccatctgatgaagcagttgaaaatctgggaactgccttctgcttgtgtgccctgcttgaaaaaacttctaatccccagagtaggccaaaaagtaccagtggaagggtggattaacgcccttccaaatgggggtaaactcccccagggagagtgttcacagaagcaggactagacaaggaacagcaccctaccagccctcaagcagcacccctgacggtttagcaaagcaggacttacgagaaactaccaaagtcttacgccttgcgaagttcacccattcaggggcctgaagcttcgcccgttcacaaaagagctttcaaacagggggagagtttttaggaggggagaagttgcccccacctggttccttcagtttccagcctggacccccttcccattccttttgggccttttgaccttttttttccacagggggaccttacccctattgcgggtccttccagcttaatctttcacctcaccccccttcctcctccttggctttaaattatgctaaatgttgggaggagaattgaataaataatttgtgaatcttttgcacctgtgaaaaaaaaaaaaaaaagtcgac

SEQ ID NO: 18759 - DNA, 695 bp, Homo sapiens
  SIMILAR (3)..(692): 931254mologous to Homo sapiens dynein light chain-A,accession number AF078849,Smith-Waterman Score=1150.
atggtgcagcacttatttacacttcagtaaaagaaaacaaaaatatagacttagtatataaatacatcgttcagaaactatatggatttccctataagattcctgctgttgttgtggaaaaggatgcagtatttattccagcagggtgggataatgataagaaaataggaatattacatgaaaattttcaaacattaaaagcagaagataattttgaagacatcataactaaaccacctgttcgaaagtttgtacatgagaaggaaattatggcagaagatgatcaggtgtttcttatgaagctacaggatgcctcaccaagagtcccaggaggctccccacgaacaccaaatagatctgtatcatctaatgttgccagcgtgtcacccattcctgctgggtcaaaaaaaattgatccaaacatgaaagctggagctacaagtgaaggcgttctggcaaatttcttcaacagtttgttgagtaaaaagactggctctccaggaggccctggtgtgagtggtggtagccctgcaggtggggctggaggtggaagcagtggtttaccaccatccaccaaaaagtcaggccagaagcctgtcttagatgttcatgcagaactagacagaattacacgaaaaccagttacagtttctcccacaacacctacatctcctacggaaggagaagcttcttga

SEQ ID NO: 18760 - DNA, 2553 bp, Homo sapiens
  SIMILAR (648)..(1571): 681254mologous to Homo sapiens dynein light chain-A,accession number AF078849,Smith-Waterman Score=901.
  misc_feature (1)...(2553): n = a,t,c or g
ccgcctcagccgcctcgcacatttagtcttgccgggagtggtgtgattcccgaccaagatggcggccgtggggcgagtcggctccttcggttcttctccgccgggattatcctcgacttacactggcggccccttgggcaacgagatagcgtcgggcaacggtggcgccgcggcaggcgacgacgaggacgggcagaacctttggtcctgcatcctcagcgaggtctccacccgctcgcgcctccaagctccctgcgggatagaacgtgctactgctgggtgaagatggagctggaaaaacaagcttaataagaaaaattcagggaatagaggagtataagaaaggaagaggattggaatatttgtacttaaaatgtgcatgaatgaatgacagggaatgatcaaacaagatgtaatggtttggatcttagatggagacctatatcacaaaggcctccttaaattttcactggatgccgtatctctgaaggatactctagttatgctggttgttgacatgtcaaagccttggactgctttggattctttacagaaatgggcaagtgttgttagagaacatgttgacaaactgaaaatccctcctgaagaaatgaaacaaatggaacaaaagttgattagagagttccgaagaatatgtagagcgaggagaagacttcccggcttctccccagagaagaaatactgcgtcacaagaagacaaagatgacagtgtagttttacctctgggtgcggatacacttacacataacttgggcattccagtactagtagtttgcacaaagtgtgatgccattagtgtattggagaaagaacatgactacagagatgaacattttgatttttttcagtcacatatccggaagttttgtttacggtatggtgcagcacttatttacacttcagtaaaagaaaacaaaaatatagacttagtatataaatacatcgttcagaaactatatggatttccctataagattcctgctgttgttgtggaaaaggatgcagtatttattccagcagggtggggataatgataagaaaatagggaatattacatggaaaattttcaaacatttaaaaggcaggaggataatttttggaaggacatcataactaaaccacctgttcgaaagtttgtacatgagaaggaaattatggcagaagatgattcaggtgtttcttatgaaggttccagtcccttttaagcaaaagcaaaccacccaaactgaagctggaaggcctgtggatgccctcacccaaggagtcccagggaggctccccaccgaacaccaaaatagaatctgtatcatcttaatgttgccaagcgtgtcaccccattccctgctggggtcaaaaaaaaattgatccaaacatggaaagctgggagcttacaagtggaagggcgtttctgggcaaattttctttcaacagttttgtttgagtaaaaagactgggctctcccaggaggcccctggtggtgagtggtgggtagccctgcagggtggggctgggaggtgggaagcagtggttttaccaccaatccaccaaaaaggttcaggcccanaagcctgtctttagatgttcaatgcagaactagacagaatttacacgataaccagtttacagtttcttcccacaacacctacatcttcctacgggagggagaagcttccttgaaggttaccaattaaagcccttttattctgttttctgggataatgtaaacatgcctctgccttttccttcaaaagtgggaattagaaagctgggagtgcttcttcagatggactaaatttatgtcgtgtgtgtgtgtgtgtgtgtgstgtggttacccattttttagaaggagccgtacagaagaaaaattattctacattatgtaggattgctgtttgcattgccattttgcataagaaagtaatttttgattttgaaaatctcaaaacttttagatctgaaatacagccatgtgaktgcgtcatattctaaaggctatttaaaacatgtaaaaggatttggggaaccggcagaaaacatgccagttgggccatttgactgactgggaagtctaagcttattttagttataactattaaaatccatttttaaaaaatttgttagttttgccggacagagaaaaatccgtccagttgtccagattttggcacacccacaataaatgtacccacccacacacggaatatgcctaagaaaactatcagatagccgtttgatacacttagtcattgtctcaatcactgatcctgtaagttgtcatcaaaatatgatttagaaatattggcccaaggtgttgctttaactgaggagaaaagaaagcacactgcctaaatgtgtaaaagaaaaatgcagaggttattaaaatgtaaagaagtaacaatctttggatttgtctatacatatatatatatatatatatatgctttgccttaatatacccccttttttgtttgtgactttcaactgtaatcagttaataaagtatttattctctgcattcaggttcaaaaaaaa

SEQ ID NO: 18761 - DNA, 1078 bp, Homo sapiens
  SIMILAR (31)..(642): 421254mologous to Homo sapiens cDNA isolated for this protein using a monoclonal antibody directed against the p27k prosomal protein,accession number A16794,Smith-Waterman Score=238.
tgcttgtgtgcctggtgcgggagctactggggcccaggagattttttttaaaagtattttttctcccaacatttcccgggtgttccagcgccggttttgaccgccacattaccattttttcaccccgagggtcggctctaccaagtagaattatgcttttaaggcctatttaaccgggggggcccttaccttcattagctgtcagggggaaaggactgggcagttattgttcacacagaagaaaagtacttgaccaaattatttggattccagccacagtgacctcactttttccaagataactgaaaaacatttggtggtgtgatgaccggaatgacaagctgaccagcagattcccaggtaacagagggcacgcctatgaggcaagctaactggaaaatacaaagtatgggctatgagattcctgtggaccatgctgtgtaaaaagaattgcccgatatttctccaggtctaccacacagaaatgctgaaaatgaaggcctccttgcgttgttggtatgatttttaattgggtaatagatgaagagcaaggcccctccaggtatataaggtgtgaatcctgccaggttactactgtggggtttaaaagcccactgcaagcgggagttaaaccaaactgaggtcaaccggcttccttgaaaaaaaaaagtgtaagaagaaatttgatttggacattttgaacgagacagtgggaaactgcaattaacattgccctgtctaactgttcctattcaattggatttcaaaacctttcaagaaatagaagttggagtagtgacagttgaaaatcctaaattcaaggatccttacaagaagcagagattgatgctcaacttgttgctcctagcaagagaagagactaaacattgtcgttagtttaccgagatccgtgatgccacttacctgtgtgtttggtaacaacaaaccaacatcatggaggtcccctggattgaaaaaaggagccctctcccacctcctccataacaccgaaaggtggtttagggcttttatattaaataaaaaccaggcctttggaaaataaaaaaaaaaaaaaaaa

SEQ ID NO: 18762 - DNA, 471 bp, Homo sapiens
  SIMILAR (16)..(333): 1001254mologous to Homo sapiens ceramide glucosyltransferase,accession number D50840,Smith-Waterman Score= 559.
ccggcgggccgggggatggcgctgctggacctggccttggagggaatggccgtcttcgggttcgtcctcttcttggtgctgtggctgatgcatttcatggctatcatctacacccgattacacctcaacaagaaggcaactgacaaacagccttatagcaagctcccaggtgtctctcttctgaaaccactgaaaggggtagatcctaacttaatcaacaacctggaaacattctttgaattggattatcccaaatatgaagtgctcctttgtgtacaagatcatgatgatccagccattgatgtatgtaagaagcttcttggaaaatatccaagatactatatctctgccaatgtaactggtttcaaatgtgtgacaggaatgtcttgtttaatgagaaaagatgtgttgcatcaagcaggaggacttatagctcttgctcagtacattgccgaagattactttatggcc

SEQ ID NO: 18763 - DNA, 1527 bp, Homo sapiens
  SIMILAR (427)..(849): 911254mologous to Homo sapiens ceramide glucosyltransferase,accession number D50840,Smith-Waterman Score= 663.
atgattgataagattgatgcataccacaagactgtgttcatgagaatggaaatagttcagacctttccttctgaagtttatcaggatctagtgcttgagttatttatttattcatttcaagttatagtttacgaccatatcaagttcatttcggtgaaaagaaagcaaaccgcaaaatgtgatatattttctacagtgagagacaaaggggtgggactttcaaagacagaaattgctcctgaccctgagagcacccatatgactctgatgccaaggaaacagtttaagaaaggcagctcccaggaagccagttcatcagagtggaagaagcagaagtcagatgctttaggtttggctgcgtgtgaaaaagacatgaaagcgatgggcacagatatttggaaactgcaacaacgatgcatttccacccaagtaattccagatacgcttactgacatggtgaatcaaatgacagaaaaagtaggcttggttcacgggctgccttacgtagcagacagacagggctttgctgccaccttagagcaggtatattttggaacttcacatccaagatactatatctctgccaatgtaactggtttcaaatgtgtgacaggaatgtcttgtttaatgagaaaagatgtgttggatcaagcaggaggacttatagcttttgctcagtacattgccgaagattactttatggccaaagcgatagctgaccgaggttggaggtttgcaatgtccactcaagttgcaatgcaaaactctggctcatattcaatttctcagtttcaatccagaatgatcagaaaaacaattacaagaatggtgacccagattaattgtgaatttgaggaagttgttccaagttcaaatccagactcccaaattgaagtagaggaggtcagtttatacacccacatggactacaatgaagtctttacccctgtcagttgtttagaaaaatgttcagcacttcaaaaccagaaccaagagaaagtgaagagtgttggtgaatcctacgaattaagtggaggtttgattaagaaagcatctatttcaagtagagatgaagttcgggtgttttctgccttcattgactctactggacaaatggtacttgtcagcgtaacaggtagagatgcagggtccagggggctacaagcagggcttgctgccaacttgattttgcgcttccagcctctggcagccaaaagatataaccatgacttcccagaacaagaaagtcccaatcctcttagcttaccgatcaagacagtggagcccagagagatctacagacttattcaagagcagtgggtttccactctgatttgtaaacttcctgaccttcccatcagagaattacaatcagagaacacaggtctgcttcctagaacaaacagtacctctgtggaaataagaaaaaggtctgcaattgtcagacaatgctttagtggacgtgcttggcacctgagagatacgaacacatcatttaataatatgctttccgtgcatgatgcttga

SEQ ID NO: 18764 - DNA, 721 bp, Homo sapiens
  SIMILAR (41)..(280): 1001254mologous to Homo sapiens ceramide glucosyltransferase,accession number D50840,Smith-Waterman Score= 414.
gcggccgcagcgggccgggccggtccggcgggccggggtgatggcgctgctggacctggccttggagggaatggccgtcttcgggttcgtcctcttcttggtgctgtggctgatgcatttcatggctatcatctacacccgattacacctcaacaagaaggcaactgacaaacagccttatagcaagctcccaggtgtctctcttctgaaaccactgaaaggggtagatcctaacttaatcaacaacctggaaacattctttgaattggattatcccaaacctttatttttctcggtagcaccaatgaaaagaatagagaagacacagatgtgatagccttaatgcagcacttattaatatgaagtgctcctttgtgtacaagatcatgatgatccagccattgatgtatgtaagaagcttcttggaaaatatccaaatgttgatgctagattgtttataggtggcaaaaaagttggcattaatcctaaaattaataatttaatgccaggatatgaagttgcaaagtatgatcttatatggatttgtgatagtggaataagaggaacaatggagatgccaatgagtcttgaacagtcttatgaccctaatgtcagagaccctatctataggaacaatggggatgcagatggtcagcatctagtgctgcatgacttttaccaacaaggaagtggaccaaagtgcagcctgattaatgcttaa

SEQ ID NO: 18765 - DNA, 981 bp, Homo sapiens
  SIMILAR (200)..(367): 1001254mologous to Homo sapiens ceramide glucosyltransferase,accession number D50840,Smith-Waterman Score= 304.
cggcacgagggttattttaatgcttcattaacaattagcattttcttgaacggtataacatggcagttaaattacataaggaagcagacttgattttacatagtatacttagaaaagtgaaatccaagaatttaattttttaaccttgtctttagtttgacagtgagtgaaattaaaaaatttttttttccattcctagggtggcacactgtgtttttcaaaacttgattatgcagtcgcctggttcatccgcgaatccatgacaatatacatttttttgtctgcattatgggacccaactataagctggagaactggtcgctacagattacgctgtgggggtacagcagaggaaatcctagatgtataactacagctttgtgactgtatataaaggaaaaaaagagaggtattataattatgttttatataaatgcttttaaaaatctaccttctgtagttttatcacatgtatgttttggtatctgttctttaatttatttttgcatggcacttgcatctgtgaaaaaaaaaaaaaatacacatctgtagtcttggccaaatgatacactttattttgtggaagtagagaatcaagagaattggttctaggaacctgggttcgttcatcattgttgtttatttttttaaaataaataaataaatatatatatagatgctctgcaacaaactctgtgacagtatccttcagtagagaaagtttcttacttgtgagtacactcttttagaacatttacgggtggcagcagctttgctttagagtttagaagataatagaaggaatgactattcatgtccaaagtgaatggttttgtgcagtgaacaacacatggcgaggtactaactgagaaactttttcatgctttatgcctacctcttgtagttgttgcagagcaaatacaaattgtaataagatagctaggccttgcagaaacaaacagaaaaacttaaaaaaaaaaa

SEQ ID NO: 18766 - DNA, 1737 bp, Homo sapiens
  SIMILAR (299)..(1399): 461254mologous to Homo sapiens ceramide glucosyltransferase,accession number D50840,Smith-Waterman Score= 599.
  misc_feature (1)...(1737): n = a,t,c or g
gaggcgaaccggagcgcggggccgcggtcgccccgaccagagccgggagaccgcagcacccgcagccgcccgcgagcgcgccgaagacagcgcgcaggcgagagcgcgcgggcgggggcgcgcaggccctgcccgccccttccgtccccacccccctccgccctttcctctccccaccttcctctcgcctcccgcgcccccgcaccgggcgcccaccctgtcctcctcctgcgggagcgttgtccgtgttggcggccgcagcgggccgggccggtccggcgggccggcgagatgtgtgctgctggacctggccttggagggaatggccgtcttcgggttcgtcctcttcttggtgctcgtggctgatgcatttcatggctatcatctacacccgattacacctcaacaagagggcaacggacagacagccactatagcaagctcccaggtgtctctcttctgaaaccactggaaaggggtagatcctaacttaatcaacaacctgggaaacattctttgaattggattatcccaaaaatttaatttacatacaatgctttttgactagtatgaagtgctcctttgtgtacaagatcatgatgatccagccattgatgtatgtaagaaggcttcttgggaaaatatccaaattgttgatgctaagattgtttataggtggcaaaaaagttgggcattaatcctaaaattaataatttaatggccaggatatgaagttgcaaagtatgatcctatatgggatttgtgatagtgggattagaaatatttccagatacgcttactgacatggtgaatcaaatgacagaaaaagtaggcttgggttcacgggctgccttacgtagcagacagacagggctttgctgccaccttagagcaggtatattttggaacttcacatccaagatactatatctctgccaatgtaactggtttcaaatgtgtgacaggaatgtcttgtttaatgagaaaaagatgtgttggatcaagcaggagactttatagcctttgcttcagtacattgcgaaagattactttatggccaaagcgatagctgaccgaggttggaggtttgcaatgtccactcaagttgcaatgcaaaactctggctcatattcaatttctcagttcaaatccagggatgatcaggtggaccaaactccgaattaacatgcttcctgctacgataatttgtgagccaatttccagaatgcctttgttgcccagtttaattaattgggatgggcaggcccacccatgtgttcagatgggatattatggtattttttcanggggccattgcctgggcatggtttatatttgactacattccaactccaggggtgtcccagggtggccacactgtgtttttcaaaacttggattaatgcagtcgccctggttcatccgcgaatccatgacaatatacatttttttgtctgcattatgggacccaactataagctggagaactggtcgctacagattacgctgtgggggtacagcagaggaaatcctagatgtataactacagctttgtgactgtatataaaggaaaaaagagaagtattataaattatgtttatataaatgcttttaaaaatctaccttctgtagttttatcacatgtatgttttggtatctgttctttaatttatttttgcatggcacttgcatctgtgaaaaaaaaaagaaacacatctgtagtcgaggccaatcaggg

SEQ ID NO: 18767 - DNA, 421 bp, Homo sapiens
  SIMILAR (109)..(420): 991254mologous to Homo sapiens R-ras,accession number M14949,Smith-Waterman Score=524.
tttcgtgggacctgggcccggggaccccccgcccagcgagacacacaagctggtggtcgtgggcggcggcggcgtgggcaagagcgcgctgaccatccagttcatccagtcctggacaccgcgggccaggaagagttcggggccatgagagagcagtacatgcgtgctggccacggcttcctgctggtgttcgccattaacgaccggcagagtttcaacgaggtgggcaagctcttcacgcagattctgcgggtcaaggaccgcgacgacttccccgttgtgttggtcgggaacaaggcagatctggagtcacagcgccaggtcccccgatcagaagcctctgccttcggcgcctcccaccacgtggcctactttgaggcctcggccaaactgcgtctcaacgtggacgaggcttttgagg

SEQ ID NO: 18768 - DNA, 514 bp, Homo sapiens
  SIMILAR (101)..(235): 971254mologous to Homo sapiens R-ras,accession number M14949,Smith-Waterman Score=231.
ttcgtgtctgactacgaccccactattgaggactcctacacgaagatctgcagtgtggatggcatcccagcccggctggacatctggaacaccggggcccaaactgcttctcaacgtggacgaggcttttgagcagctggtgcgggctgtccggaaataccaggaacaagagctcccaccgagccctcccagtgcccccaggaagaagggcgggggctgcccctgcgtcctcctgtagcccaggcaagagagaagcaaccaccacaagctctcgggactagctgccttcgcaccttgctgtgtgacctgaggccctcactgagcctcaatttcctcatctgggtctcccaggacacatcacatacccacccttacttcctggcctcttctgggctactgccactgtgtgccttctgccaacgcctcctgtccccacctaagcctggtgggggtgaggggctccgggtcactgctgtatataactcccctcccccagaaaaataaatgtcactgc

SEQ ID NO: 18769 - DNA, 1078 bp, Homo sapiens
  SIMILAR (85)..(762): 691254mologous to Homo sapiens R-ras,accession number M14949,Smith-Waterman Score=684.
atgacgccccacagtgccctgcgcgcgcgcggaaagggtggcggaacaggaggcggtagcgaaggcagcagcagcggtggcgacatgagcagcggggcggcgtccgggacagggcgggggcggccccggggcgggggacctgggcccggggaccccccgcccagcgagacacacaagctggtggtcgtgggcggcggcggcgtgggcaagagcgcgctgaccatccagttcatccagtcctacttcgtgtctgactacgaccccactattgaggactcctacacgaagatctgcagtgtggatggcatcccagcccggctggacatcctggaccccgcgggcccaggaagagttcggggccatgagagagcagtacatgcgtgctggcccacgggcttcctgctggtgttcgccattaacgaccggcaagagttttcaacgaggtggggcaagctctttcacgcagatttctgcgggttcaaggaccgcgacggacttccccggtggtgttggtcgggaacaaggcagattttggagtcacagcgccaggtcccccgatcagaagcctctgccttcggcgcctccccaccacgtggcctacttttgagccctcggccaaaatgcgttttcaacgtggacgaaggcttttgaagaagctggtgcggggttgtccgggaaatacccaggaacaaagagctcccaccgagccctcccaagtgccccccaggaagaatgggcgggggctgcccctgcgtcctcctgtagcccaggcaagagagaagcaaccaccacaagctctcgggactcagctgccttcgcacctttgctgtgtgacctgaggccctcactgagcctcaatttcctcatctgggtctcccaggacacatcacatacccacccttacttcctggcctcttctgggctactgccactgtgtgccttctgccaacggctcctgtccccaccttaagcctggtgggggtgaggggcgtccgaggtcactgctgtatataactcccctcccccagaaaaataaatgtcactgccaacgtcaaaaaaaaaaaaaaaaaaaaaaatt

SEQ ID NO: 18770 - DNA, 451 bp, Homo sapiens
  SIMILAR (2)..(280): 971254mologous to Homo sapiens ribosomal protein L18,accession number L11566,Smith-Waterman Score=449.
caggtttctggccagaagaaccaactccacattcaaccaggttgtgttgaagaggttgtttatgagtcgcaccaaccggccgcctctgtccctttcccggatgatccggaagatgaagcttcctggccgggaaaacaagacggccgtggttgtggggaccataactgatgatgtgcgggttcaggaggtacccaaactgaaggtatgtgcactgcgcgtgaccagccgggcccgcagccgcatcctcagggcagggggcaagatcctcactttcgagaggtgtaccggcatttcggcaaggccccaggaaccccgcacagccacaccaaaccctacgtccgctccaagggccggaagttcgagcgtgccagaggccgacgggccagccgaggctacaaaaactaaccctggatcctactctcttattaaaaagatttttgctgacagtgaa

SEQ ID NO: 18771 - DNA, 1006 bp, Homo sapiens
  SIMILAR (529)..(296): 981254mologous to Escherichia coli No definition line found,accession number U00006,Smith-Waterman Score=399.
cccaaacttcgttaacccgaaccatcccgaaaccaagttttgttaacgcgtttccaaattgccgttcacttcccttgtcccggcttttgcaattttttccaaggccagcccgttcccgggcgtttttatcccgtaaaccaaaacccggtcccggaaaaaagccaatggccctgattgtggaatttattggtgagttacctaccggcgtacatgcgcgtccgccaagccacgttgaaacgctgtgtaatactttttcatcacaaattgagtggcataacctgcgcactgaccgcaagggcaacgccaaaagcgcccttgcgctgattggcaccgatacgctggcgggcgataactgccagttactgatttccggggccgacgaacaggaagcgcaccagcgtttaagccaatggctgcgcgatgaattcccccactgcgatgcgccgctggcggaagttaaatctgacgaactggaaccactgccggtttcactgaccaatctgaatccgcaaattatccgcgcccgcaccgtgtacagcggtagagcaggcggcattcagacgccgatctcttctttagatctcaatgcgctgggtaatcttcccgcagccaaaggcgttgacgccgagcaatccgcactggaaaacggcctgacgctggtactgaaaaacattgagtttcgtctgctggatagcgacggtgctaccagcgcgattctggaagctcaccgatccctggctggcgatacttccctgcgcgaacatttactgccagtcggacaatgcgccaacgccgccagcagcacgaatcacccgttcgttactaaaaaacggcagcaatgttttgtcttccgccagcggctggcgaacggcaggaacgactccggatggcagattacgcatgctttttggttccggttccaccagcactcgaggattatgaaatatctgtatggattcacggcccggcttaaggagcaccagcccaagctcaggcaccagaacag

SEQ ID NO: 18772 - DNA, 763 bp, Homo sapiens
  SIMILAR (65)..(304): 431254mologous to Xenopus laevis ribosomal preprotein L14a (AA 1 to 188),accession number X06222,Smith-Waterman Score=81.
gtgtgctgtgaattctgccgagcagagaggcgccatcatggtgagtggaccatccgccataacaaaggaccgaaagggttcgggcgcaagggacccaaaagagcctggatttctcctctgacgctgttgtgtcaagttatacaggttttctggcccagaagaacccaactccaacattcaacccaggttgtggttgaagaggttgtttatgagtccgcaccaaaccggccgccttctgtccccttttcccgggatgaatccggaaagatgaaagcttccctggcccggggaaaacaagaccgccccgtggttgtggggggaccattaacttgattgatgttgcgggtttcagggagggtacccaaaactgaaaggtatgtggcactgcggcgtggacccagcccgggcccgcaagccgcattccttcaggggcaagggggcaagattccttcacttttcgaccaagcttggcccttgggacttcccctaaagggcttgttggcacttgttcctggctcttccggttccctcggcaaaggggcccgagaaggtggtacccggcaattttcggcaaaggccccaaaggaaaccccgcaaaagccacaccaaaacccttacgttcggctccaagggccggaagttcgagcgtgccagaggcccgacgggcccagcccgaggctacaaaaaactaaccctgggatcctactctcttatataaaaagatttttgcctgacaaaaaaaaaaaaaaaaaaaaaaagttac

SEQ ID NO: 18773 - DNA, 168 bp, Homo sapiens
  SIMILAR (3)..(98): 871254mologous to Homo sapiens nuclear autoantigen,accession number M60618,Smith-Waterman Score=153.
agtcctgcgaacaaattgctgtccaagtgaataatggggatgctggaagggagatgccctgcccgttgccctgtgatgaagaaatcatcagcagtgaggactctgaaggatccactgacgttgatgagcccttagaagtcttcatctcagcaccgagaagtgagcctg

SEQ ID NO: 18774 - DNA, 2671 bp, Homo sapiens
  SIMILAR (32)..(2668): 1001254mologous to Homo sapiens SP100-HMG nuclear autoantigen,accession number AF056322,Smith-Waterman Score=4639.
ctgaggcccacgcagggcctagggtgggaagatggcaggtgggggcggcgacctgagcaccaggaggctgaatgaatgtatttcaccagtagcaaatgagatgaaccatcttcctgcacacagccacgatttgcaaaggatgttcacggaagaccagggtgtagatgacaggctgctctatgacattgtattcaagcacttcaaaagaaataaggtggagatttcaaatgcaataaaaaagacatttccattcctcgagggcctccgtgatcgtgatctcatcacaaataaaatgtttgaagattctcaagattcttgtagaaacctggtccctgtacagagagtggtgtacaatgttcttagtgaactggagaagacatttaacctgccagttctggaagcactgttcagcgatgtcaacatgcaggaataccccgatttaattcacatttataaaggctttgaaaatgtaatccatgacaaattgcctctccaagaaagtgaagaagaagagagggaggagaggtctggcctccaactaagtcttgaacaaggaactggtgaaaactcttttcgaagcctgacttggccaccttcgggttccccatctcatgctggtacaaccccacctgaaaatggactctcagagcacccctgtgaaacagaacagataaatgcaaagagaaaagatacaaccagtgacaaagatgattcgctaggaagccaacaaacaaatgaacaatgtgctcaaaaggctgagccaacagagtcctgcgaacaaattgctgtccaagtgaataatggggatgctggaagggagatgccctgcccgttgccctgtgatgaagaaagcccagaggcagagctacacaaccatggaatccaaattaattcctgttctgtgcgactggtggatataaaaaaggaaaagccattttctaattcaaaagttgagtgccaagcccaagcaagaactcatcataaccaggcatctgacataatagtcatcagcagtgaggactctgaaggatccactgacgttgatgagcccttagaagtcttcatctcagcaccgagaagtgagcctgtgatcaataatgacaaccctttagaatcaaatgatgaaaaggagggccaagaagccacttgctcacgaccccagattgtaccagagcccatggatttcagaaaattatctacattcagagaaagttttaagaaaagagtgataggacaagaccacgacttttcagaatccagtgaggaggaggcgcccgcagaagcctcaagcggggcactgagaagcaagcatggtgagaaggctcctatgacttctagaagtacatctacttggagaatacccagcaggaagagacgtttcagcagtagtgacttttcagacctgagtaatggagaagagcttcaggaaacctgcagctcatccctaagaagagggtcaggatcacagccacaagaacctgaaaataagaagtgctcctgtgtcatgtgttttccaaaaggtgtgccaagaagccaagaagcaaggactgaaagtagtcaagcatctgacatgatggataccatggatgttgaaaacaattctactttggaaaaacacagtgggaaaagaagaaaaaagagaaggcatagatctaaagtaaatggtctccaaagagggagaaagaaagacagacctagaaaacatttaactctgaataacaaagtccaaaagaaaagatggcaacaaagaggaagaaaagccaacactagacctttgaaaagaagaagaaaaagaggtccaagaattcccaaagatgaaaatattaattttaaacaatctgaacttcctgtgacctgtggtgaggtgaagggcactctatataaggagcgattcaaacaaggaacctcaaagaagtgtatacagagtgaggataaaaagtggttcactcccagggaatttgaaattgaaggagaccgcggagcatccaagaactggaagctaagtatacgctgcggtggatataccctgaaagtcctgatggagaacaaatttctgccagaaccaccaagcacaagaaaaaagagaatactggaatctcacaacaataccttagttgacccttgtgaggagcataagaagaagaacccagatgcttcagtcaagttctcagagtttttaaagaagtgctcagagacatggaagaccatttttgctaaagagaaaggaaaatttgaagatatggcaaaggcggacaaggcccattatgaaagagaaatgaaaacctatatccctcctaaaggggagaaaaaaaagaagttcaaggatcccaatgcacccaagaggcctcctttggcctttttcctgttctgctctgagtatcgcccaaaaatcaaaggagaacatcctggcctgtccattgatgatgttgtgaagaaactggcagggatgtggaataacaccgctgcagctgacaagcagttttatgaaaagaaggctgcaaagctgaaggaaaaatacaaaaaggatattgctgcatatcgagctaaaggaaagcctaattcagcaaaaaagagagttgtcaaggctgaaaaaagcaagaaaaagaaggaagaggaagaagatgaagaggatgaacaagaggaggaaaatgaagaagatgatgataaataa

SEQ ID NO: 18775 - DNA, 396 bp, Homo sapiens
  SIMILAR (300)..(395): 1001254mologous to Homo sapiens nuclear autoantigen,accession number M60618,Smith-Waterman Score=172.
atgaaaaatagaagcagaaacaaaggaaatgtggaatggcaagcagaagggataagaagtaaaagaagcgtgggaaagcaaaggccaagcaaggcaaagattccctctggggacaagaatggagtatcactaacccacaatgaaggttagttgaaaggcaagacaagcatggcctgtgtacaggcgaggacttgcacggattttcaaggttttccaggttttcttattagggaatttcctactgaactgattccttggtcacacactgagacctctaaagaatcccattcttttgtgcagtgatcaataatgacaaccctttagaatcaaatgatgaaaaggagggccaagaagccacttgctcacgaccccagattgtaccagagcccatggatt

SEQ ID NO: 18776 - DNA, 2066 bp, Homo sapiens
  SIMILAR (1635)..(649): 471254mologous to Homo sapiens nuclear autoantigen,accession number M60618,Smith-Waterman Score=519.
  misc_feature (1)...(2066): n = a,t,c or g
gagagtgtttgatctgaagtttttatttctgtctataatttacactagtaggaaacatgttgtctttttgaggcttttacacattcacaaatgacaattggatgtcaaccccatttatcactataaagaatctaagatctatagggttaataggcaatgagagcgaggtttaaaaaaaagaataccacaaatttgctatttatttcttctacaacaacaaaatataattacatacatttaggtcagtgaaactctttctgttaaacatgaggtttatccataatttcctgcctctttccattttctaaaatgcaaaaaggagttcccagattggactggatacaaggtagtgtaacgttgctcagaataaaaagcggtcgggaaacaggcagctttttaattccacattccctgaacattctggcaggcccaagttcttggcaatcctaatcttctttaaccgagcccccttcttaggggatgagctggcaggtttcctngaaagctctttctcccatttactcagggtctgaaaagtcacttactgctggaaacgtctccttccctgctggggtattcctcccaagtaagatgtacttcctagaagtcaataggagccttctcaccatgccttgcttcctcagtgcccccgctcgaggcttcctgcggggcgcctcctcctcactgggattctgaaaagtcgtgggtctttttcctatcactctttttctaaaactttctctgaatggtaaataattttctgaaaatcaatgagctctggtacaatctggggtcgtgagcaagtggcttcttgggccctccttttcatcatttgattcttaaagggttgtcattattgatcacaggctcacttctcggtgctgagatgaagacttctaagggctcatcaacgtcagtggatccttcagagtcctcactgctgatgactattatgtcagatgcctggttatgatgagttcttgcttgggcttggccactcaacttttgaattagaaaatggcttttccttttttatatccaccagttcgcacagaaccagggaattaaatttgggattccaatggttgtgtaagctcttgcctctggggctttccttcatcacagggcaaccgggcagggcatctcccttccagcatcccccaatattcacttggaccagcaatttgttcgcaggactctgttggctcagccttttgagcacattgttcatttgtttgttggcttcctagcgaatcatctttgtcactggttgtatcttttctctttgcatttatctgttctgtttcacaggggtgctctgagagtcccatttttcaggtggggttgtacccaggcatggaggatggggaaacccggaaggtggcccaaagtcaggctttcgaaaagagttttcaccagttcccttgttcaaagacttagttgggaggcccagacctctccttcccttctcttcttcttccactttccttggagagggcaatttgtcatgggattacatttttcaaagcctttataaatgtggaatttaaaatcggggtattcctgcatgttgacatcgctgaacagtgcttccagaactggcaggttaaatgtcttctccagttcactaagaacaattgtacaccactctctgtacagggaccaggtttctacaagaatcttgagaatcttcaaacattttatttgtgatgagatcacgatcacggaggccctcgaggaatggaaatgtcttttttattgcatttgaaatctccaccttatttcctttgaaagtgcttgaatacaatgtcatagagcagcctgtcatctacaccctggtcttccgtgaacatcctttgcaaatcgtggctgtgtgcaggaagatggttcatctcatttgctactggtgaaatacattcattcagcctcctggtgctcaggtcgccgcccccacctgccatcttcccaccctaggccctgcgtgggcctcagagcctggcctctgagcccctcagtcggcccagcctgcgtgcagtgtggctgcccaggccccaagcaggaagtcg

SEQ ID NO: 18777 - DNA, 1828 bp, Homo sapiens
  SIMILAR (115)..(924): 741254mologous to Homo sapiens Human secreted protein encoded by gene 63 clone HPMCC16,accession number W78188,Smith-Waterman Score=877.
  misc_feature (1)...(1828): n = a,t,c or g
tgatgagacggaagtcctgagagtttgaccgatttaaggtcacgtgcctaggaagtgctggaaccaagactcggagttttctctaatggatgtttccaaggattgtcttcagtcatggccttgggattaaagtgcttccgcatggtccaccctacctttcgcaattatcttgcagcctctatcagacccgtttcagaagttacactgaagacagtgcatgaaagacaacatggccataggcaatacatggcctattcagctgtaccagtccgccattttgctaccaagaaagccaaagccaaagggaaaggacagtcccaaaccagagtgaatattaatgctgccttggttgaggatataatcaacttggaagaggtgaatgaagaaatgaagtctgtgatagaagctcttcaaggataatttcaataaggactctcaatataaggacctcaccaggatcccattgacaagattgctgtggtaactgcctgacgggaagccttgctttaaaccagatttagccagatctccatgaagtcgccacagctgaattttgggtgaatatgggccagcttcccagagtgtacagctgcagctatcaaggctataagagaaagtggaatgaatctgaacccagaagtgggaagggacgctaattcgggtaccccattcccccaagtaaccagagagcacagagaaatgctgggtgaaactgggccaaacagaacaccaacaagggccaaagactcttttacgggaaggtttccgcacccaactcaatgaacaagctggaagaaatcccaaggatacagtcttcaggaggacaccattaggctaacagagaaacagatcagccaaatggccgatgacacagtggcagaactgtacaggcatctggcagtgaagaccaaagaactccttggatgaaagtccacctggggccagcaatactccagagcccagtttctgctggatccccatgggtggcacattggggactttctctccctcccccatctacacagaaagactggcaccccatgctggacaagaagcctggcccttggtaaaggccccagccttcccccagggggaacactcaagacatgtttcattcctccttccctgcttcctgcctctggggccggtgggtggctctcagaaaataccttgctgctgggcaaaaggcctgtactcagggcntttgcttttgatttgatgtttgccaagggacttaggcccattggcaggcttagtaccacctgctcctcattttaggagtctccttttcaaataattaggctctgttcccattttaaaactctgatattgggccttcacctgtgactggacactttactaggaggccccattttcactaaacaattaaaatctaaataaattggaaggaataacaaccacaaaggaaagaatagagttggtctggattgatgaatcactgaggatctgtatgtgagggcaccccataaacagtagttttgcctgtgagtcggtcttcacacatgctgttttctctgcctgggctctctcttcccctccttacctggggccagtcctgttttatcatcaggccttgtcttggatatcacgtcctctgggaagtcttcttttcccctctaacctaggaccctcattaccgggctctcataagcacaagtctactgctttggtacgaatttctaagtaattccttggttgcacttaaattaagcctggtatatcctcagaactttgtgtaatgcctggagcatagtaggcagtcatatgttgtatcgtgaataaattgcacatagtagctacccagcaa

SEQ ID NO: 18778 - DNA, 389 bp, Homo sapiens
  SIMILAR (202)..(387): 911254mologous to Homo sapiens lactate dehydrogenase- A,accession number X03077,Smith-Waterman Score=289.
cgattccggatctcattgccacgcgcccccgacgaccgcccgacgtgcattcccgattccttttggttccaagtccaatatggcaactctaaaggatcagctgatttataatcttctaaaggaagaacacaccccccagaataagattacagctgttcgcgttggtgctgatggcatggcctgtgccatcactatcttaatgaagactataatgtaactgcgaactccaagctggtcattatcacgggtggggcacgtcagcaacagggagaaagccgtcttaatttggtccagcgtaacgtgaacatctttaaattcatcattcctaatgttgcaaaatacagcccgaactgcaagttgcttattcgttcaaatccagtggatatctt

SEQ ID NO: 18779 - DNA, 512 bp, Homo sapiens
  SIMILAR (214)..(435): 951254mologous to Homo sapiens ELL complex EAP30 subunit,accession number AF156102,Smith-Waterman Score=371.
  misc_feature (1)...(512): n = a,t,c or g
cttaatggntgactcccagcttttcccccantaggtaacggaatcggctgaatccagattgcaaccgcttccaataacacggtttttgggaaaaccacttatcttccaagccacgtaggtcaagatatccactggattttgaaacaataagcaacttgcagttcgggctgtattttacaacattaggaatgagtctgttcccagctgagctcaaatatggatcacaccgtggtgctgcagctggcagagaagaatggctacgtgactgtcagtgagatcaaagccagtcttaaatgggagaccgagcgagcgcggcaagtgctggaacacctgctaaaggaagggttggcgtggctggacttacaggccccaggggaggcccactactggctgccagctctcttcactgacctctactcccaggtttatttgccacctccgcctcctccctgcctgctgctgtgtgcccttccacatgcagtcaggggagggcttctctggcctcctcagct

SEQ ID NO: 18780 - DNA, 2021 bp, Homo sapiens
  SIMILAR (272)..(1102): 441254mologous to Homo sapiens lactate dehydrogenase- A,accession number X03077,Smith-Waterman Score=315.
  misc_feature (1)...(2021): n = a,t,c or g
attgatgccttcggaccgcccgttgagcccgtcgacccacgcgtccgccggatctcattgccacgcgcccccgacgaccggcccgacggtgcatttcccgatttccttttggttccaagtccaattattggcaacctctaaaggatcagctgatttataatcttctaaaggaagaacagacccccccagaataagattacagttgttggggttggtgctgttggcatggcctgtgccatcagtatcttaatgaaggacttggcagatgaaccttgctcttgttgatgtcatcgaagacaaattgaaggggagagatgatggatctccaacatggcaagcctttttcctttaggaacaccaaagtattgtcttctggcaaaagactataaatgtaacttgcaaactccaaagctgggtcatttatcaccggctgggggcaccgtcagcaagaagggaagaaagccgtcttaattttggtccaagcggtaaacgtgaacatctttaaattcatcattccctaatgttgtaaaatacagccccgaactgcaagttgcttattgtttcaaatccagtggatatcttgacctacgtggcttggaaagataagtggttttcccaaaaaccgtgttattgggaagtggttgcaatctgggattcagccccgattccggttacctgatggggggaaaggcttgggagttcaccccattaagcttgtcatgggtggggtccttggggggaacatgggagatttccagtgttgcctgttatgggagttggattgaatgttgctggtgtctctctggaagacttctggcacccagattttaggactgataaagattaggaaccagtggaaagaaggttcacaagccaggtggttgagagatgcttatgaggtgatcaaactcaaaaggctacacatccttggggctaattggactctcctgtaagccagattttggcagagatgtataatggaagaatcctttaggcgggtgcaccccagttttcccaccatggattaaagggtctttacgggaataaaaggatgaatgtctccctaagtgttccttgcattttgggacagaatggaatctcaagaccttgtgaaaggggactctgacttctgagggaagaggccccgttggaagcaagagtgcagataacaactcttggggatccacaaagaagctgccaatcttaaagtcttcctgatgtcaatatcatctccctgttctaggccaacaaccggattctaggtggaggttgtgcatgtgtgtcctttttatcctgatctgggattaaagccagtaatattttaaggatggactggggaaaaacatccaactccctgaagttaggaaaataagaaatggtttggtaaaaatcccaccagctatatccctggatgctgggatgggtattaatcttggtgtaagtcttcaaactgggtttagtgtgaaaatagtttctgcccacccttctgacggcaccaacttgcccaatgctgtacggtactgcattttgccccccttgagcccagggtggatgtttacccgttggggttatataacttccctgggctcccttcactggaacatgcctacgtccaacacttttttcccagtgagtcacaatcctggggatccaagtgtattaaatcccaatatcgtatgtcttgtggcataattcttcccaaagggatcttattttgtggaactatatgtatcagcagtgtacattaccatattaatggtaaaaagatctacatacaaacaaatgcaaccaacctatccaaagtgtttttaccaactaaaaacccccaataaaaccttgaacagtgaaaaatnnnnnnnnnngggggcggcctttttaaagaatccttgggggggcccaagcttaccctggcttgcaaagtaatatctttttccatttggggagccaattcataactaccttgggatttttggaaaggaacctttcttttggggggggacataattgaccaacctccctct

SEQ ID NO: 18781 - DNA, 531 bp, Homo sapiens
  SIMILAR (1)..(126): 901254mologous to Homo sapiens 21-Glutamic Acid-Rich Protein,accession number X93498,Smith-Waterman Score=187.
gaagaaggtggagaaactgaggcacaaaaagagggcagtgaagatgtgggcaacctccctgaagcccaggagaagaatgaagaagaaggagagacagccacagaagagaaaatggaagctatgaagcaacatttcaaatgtctctccacaaaccaaactcaacagaatactttgcttgaagccggcacacccagggttactgaggacttatgctgcctgacctggttagatgtacatggaggtatctcccgaatcatacaaaattaaatgtgaagaccgtttatgcataccttcatgtgcctgacagtcttggcttttgaagatttttttttcttttttgctctgcatagctagaccatcttattaataatactctgaaaaaaatgatttcaaggcatggaagttctctgtgatacaacaatagtatttcttcaaatgcgccttatgctacttatctcagaaacaggttttaaaatgaagtgctttccagagaaccatcatataaataaagattaatagaaaaaaaaaaaa

SEQ ID NO: 18782 - DNA, 1160 bp, Homo sapiens
  SIMILAR (18)..(734): 1001254mologous to Homo sapiens 21-Glutamic Acid-Rich Protein,accession number X93498,Smith-Waterman Score=1250.
cgggggaggagcccaagatgcctctgctgctccttggagagacagagcctcttaagttggagcgggactgccggagcccagtggacccctgggctgctgccagccccgacctggcacttgcttgcctgtgtcactgtcaggatttgtctagcggcgcattccctaacaggggtgtgttggggggagtcctctttccaactgtcgaaatggttatcaaagtgtttgttgctacatcttctgggtccatagcgattaggaagaaacagcaagaagtagtgggttttttggaagcgaataaaatcgactttaaggaattagatattgctggagatgaagacaacaggaggtggatgagagagaatgttcctggagagaaaaaacctcaaaatgggattcctttgcctccccagatcttcaatgaggagcagtactgtggggattttgactctttcttctctgcaaaagaagagaatattatttattccttccttggtttggctcctcctccagactcaaagggatcagagaaggctgaagaaggtggagaaactgaggcacaaaaagagggcagtgaagatgtgggcaacctccctgaagcccaggagaagaatgaagaagaaggagagacagccacagaagagacggaagaaatagccatggagggtgcggaaggggaagccgaggaggaggaagaaactgcagaaggagaagagcctggagaagacgaagattcctaggccttttcatgcttcatttcttccacttctccagaaaatggaagctatgaagcaacatttcaaatgtctctccacaaaccaaactcaacagaatactttggcttgaagccggcacacccagggttactgaggacttatgctgcctgacctggttagatgtacatggaggtatctcccgaatcaataccttcatgtgcctgacagtcttggcttttgaagatttttttttcttttttgctctgcgatagctagaccatcttattaataatactctgaaaaaaatgatttcaaggcatggaagttctctgtgatacaacaatacgtattcttcaaatgcgccttatgctacttatctcagaaacaggttttaaaatgaagtgctttccagagaaccatcatataaataaagattaatagaaaaat

SEQ ID NO: 18783 - DNA, 1371 bp, Homo sapiens
  SIMILAR (174)..(806): 781254mologous to Homo sapiens 21-Glutamic Acid-Rich Protein,accession number X93498,Smith-Waterman Score=802.
gcatctctgcacaggtctccgattggtgcacagcacagcctggccttttagggactgttgtcgcgcgtttaaagtgatagggaaagggtccagtggctgcttttatcgaccaatcaaatattttcctgacagatcccaaaatattcctgggccaatggagggaggagcccaagatgcctctgctgctccttggagagacagagcctcttaagttggagcgggactgccggagcccagtggacccctgggctgctgccagccccgacctggcacttgcttgcctgtgtcactgtcaggatttgtctagcggcgcattccctaacaggggtgtgttggggggagtcctctttcctactgtcgaaatggttatcaaagtgtttgttgctacatcttctgggtccatagcgattaggaagaaacagcaagaagtagtgggttttttggaagcgaataaaatcgactttaaggaattagatattgctggagatgaagacaacaggaggtggatgagagagaatgtttcctgaagagaaaaacctcaaaaatgggattcctttgccctcccagattcttcaatgaggagccagtactgtgggggattttgactccttcttctctgcaaagaaagagaatattatttattccttcccttggttgggctcctcttccagactcaaagggatcagagaaggctgaagaaggttggagaaactgaggcacaaaaagagggcagtgaagatgttggcaacctccctgaagcccaggagaagaatgaagaagaaggagagacagccacagaagagaccggaagaaatagccatggagggtgcggaaggggaagccgaggaggaggaagaaactgcagaaggagaagaagagcctggagaagacgaggatttcctaggccttttcatgcttcatttcttccacttctcccagaaaatggaagctatgaagcaacattcaaatgttctctccacaaaccaaacggagacagaatactttggcttgaagccggcacaccccagggttactgaggacattatgctgcctgacctgattagatgatacatggacggtatctcccgaatcatacaaaaattaaatgtgaagaccgtttatgcataccttcatggggcctgacagtcttggcttttgaagattttttttttcttttttgctctgcatagctagaccatcttattaataatactctgaaaaaaatgatttcaaggcatggaagttctctgtgatacaacaatagtatttcttcaaatgcgccttatgctacttatctcagaaacaggttttaaaatgaagtgctttccagagaaccatcatataaataaagattaatagaaaaataaaaaa

SEQ ID NO: 18784 - DNA, 445 bp, Homo sapiens
  SIMILAR (118)..(444): 461254mologous to Caenorhabditis elegans weak similarity to TPR domains,accession number U64856,Smith-Waterman Score=247.
  misc_feature (1)...(445): n = a,t,c or g
actactttagtgcgngnnctttattttaggcgcaggaagttccagctctgcgccgatctatgcacgcagatgctggagaagtccccttatgaccaggcagcttggatcttaaaagcaagagcgctaacagaaatggtatacatagatgaaattgatgtagatcaggaaggaattgcagaaatgatgctggatgaaaatgctatagctcaagttccacgccctggaacgtctttgaaactccctggaactaatcagacaggagggcctagccaggccgttaggccaatcacacaagctggaagacccattacaggtttcctcaggcccagcacgcagagtggaaggccaggcactatggaacaggctatcagaacacccagaaccgcctacacagcccgccctatcaccagctcctccggaagatttgtcaggctgggaacggctt

SEQ ID NO: 18785 - DNA, 622 bp, Homo sapiens
  SIMILAR (167)..(622): 411254mologous to Caenorhabditis elegans weak similarity to TPR domains,accession number U64856,Smith-Waterman Score=330.
caggcagcttggatcttaaaagcaagagcgctaacagaaatggtatacatagatgaaattgatgtagatcaggaaggaattgcagaaatgatgctggatgaaaatgctatagctcaagttccacgccctggaacgtctttgaaactccctggaactaatcagacaggagggcctagccaggccgttaggccaatcatcacattctgaaaaacccattacagggttcctcaggcccagcacgcagagtggaaggccaggcactatggaacaggctatcagaacacccagaaccgcctacacagcccgtcctatcaccagctcctccggaagattcgtcaggctgggaacggcttccatgcttacaagtcctgatggaccattcataaattaatctaggctgaatttaacaaagtattcccagaaacctaagatggcaaaggctttgcctgagtatatctttcatcatgaaaatgatgttaagactgctttggagctggctgccctctccacagaacattctcagtacaaggactggtggtggaaagtacagattgaaaaacgttactacaggttgggaatgtatcgtgaagcagaaaaacagcttatatcagccatgaagcag

SEQ ID NO: 18786 - DNA, 2297 bp, Homo sapiens
  SIMILAR (808)..(1509): 401254mologous to Caenorhabditis elegans weak similarity to TPR domains,accession number U64856,Smith-Waterman Score=498.
atgaaggcagagatttgcaagtcaaggactgtcaaggactggcacaaccaccagaagctaggagaagggaataaaactgattctcccccacaaccctcggaaggaactaacactgccaacactttgatcttggacttctggcctctagaaatgattgcatgctgttgggaaacttttcctcagcggctgactgcagagctgtttatgaaccccacacacagatggcatggttacaagaaccagagtgtaggcgcgctgcgggcacctctcggacaaggccccagccgtcgcgggttgccgggcagagtcggacgccgccagctcttcactccacgcccacctctctcctggagcgctgggccttcgctggccgcaccggcagccatgagctcggagatggagccgctgctcctggcctggagctattttaggcgcaggaagttccagctctgcgccgatctatgcacgcagatgctggagaagtccccttatgaccaggaaccagatcctgaattgccagtgcatcaggcagcttggatcttaaaagcaagagcgctaacagaaatggtatacatagatgaaattgatgtagatcaggaaggaattgcagaaatgatgctggatgaaaatgctatagctcaagttccacgccaatcacacaagctggaagacccattacaggtttcctcaggcccagcacgcagagtggaaggccaggcactatggaacaggctatcagaacacccagaaccgcctacacagcccgccctatcaccagctcctccggaagatttgtcaggctgggaacggttgggaatgtatcgtgaagcagaaaaacagtttaaatcagccctgaagcagcaggaaatggtagatacatttctgtacttggcaaaagtttatgtctcattggatcaacctgtgactgctttaaatcttttcaaacaaggcttagataagtttccaggagaagtaaccctgctctgtggaattgcaagaatctatgaggaaatgaacaatatgtcatcagcagcagaatattacaaagaagttttgaaacaagacaatactcatgtggaagccatcgcatgcattggaagcaaccacttctattctgatcagccagaaatagctctccggttttacaggcggctgctgcagatgggcatttataacggccagctttttaacaatctggggctgtgttgcttctatgcccagcagtatgatatgactctgacctcatttgaacgtgccctttctttggctgaaaatgaagaagaggcagctgatgtctggtacaacttgggacatgtagctgtgggaataggagatacaaatttggcccatcagtgcttgaggctggctgtggtcaacagcaacaaccacgccgaggcctacaacaacctggctgtgctgggagatgcggaaggggccacgttgaacaggcaagggcactattacaaactgcatcatccattagcaccccatatgtatgaaccgcatttttaattttgcaacaatctctgataagattcggagatctgcagagaagctatgttgctgcgcagaagtctgaagcagcatttccagaccatgtggacacacaacatttaattaaacaattaaggcagcattttgctatgctctgattgttccttagaccacatatgttcttatgaagcagcattatgcaaggggaaaaaagcactatgtctgtgtacgtattacactatatacatacatacacagacatagggtaatacgtatattttaacaaacctgtccttgatattagttaagggtgaccccataagggtgaccccagaatgtgtaatgcaaatttcataggtaaataagtaacctttataaaattaatattataaaatacaggatttaaacctttctaaatagatcctgaaactgtctctcacattatatagtagatgtttgtttaataaatgtttaccaaaacattttggtgaatttcctcaatgttttataaatgtacattttttaagtccttaagctgactcttagccatcatgtagcttaaggagtctgaaatctgccattaaaactgcacctttaagccaggtgtggtagcatgtgcctatagtcccgagctacttgggaggtggaggtgggaggattataaatagagactttccttaagactttaaaaatgtatttaaaactattttttattaaatactttgtgatttcctacttaagctttaaaataaatcattgtgtaaacaccaaaaaaaaaaaaaaaaaaaaaaagggcggccgct

SEQ ID NO: 18787 - DNA, 295 bp, Homo sapiens
  SIMILAR (224)..(84): 341254mologous to Homo sapiens MAM consensus sequence (domain 1),accession number B00037,Smith-Waterman Score=71.
gtctaagctctctgcactgactgctgtggttccggacatcccaggtttccgcaagatcctcccacgctcagattatatcatcatccccaagagcagcctgcaggaggaccggagctgccctcagctagagctatgtgtggctcagaaccagatgtccccgaaaggacctcctcttgtgtccaacactgccccggagacagtgcccagccatgcaggcatggcagagcagtgcctggctgtggaggccctggctgaggaggttggggagagtttatcagtggtaacagtcatgaag

SEQ ID NO: 18788 - DNA, 5612 bp, Homo sapiens
  SIMILAR (520)..(26): 311254mologous to Mus musculus procollagen type I alpha chain,accession number M17491,Smith-Waterman Score=122.
atgctagggctggggctgttgcgcttgcgccaggggtcgcatgcagtcacgcgctgccgaccgcttccggtgcgccgcgagggccgccgggacgggtctccctggcgatccgtggtgtgccgctactgccggtgcagccgccaaaccggtgcctcggtgacgaccgtgtccctgccgtcttcctcgagctccccggggcttgacccccggggccctcggcaggcatcggtgaagaagcctgcggaagcgaaccctgtgctcaggcccctcgtcaggcatgggaccccatatcgcgactccgaggaggggaagcgagaggggctgtcgcgactccgcgccgtgtgtcgccgggcggggccgcggggccggggctccttcagcccccgggatgcgcgcgcgagccctcgcctccacttccttgttgctgctgtcacgactggagccgcctctcgccgacagcggggagcgcgagtgcgccagccatccccctcgtccagccgccgggccaagcgcctccgggaatgtgagcggcgcagcttgcacgctcctccggccatggacgcatcatatgatggtactgaggtaactgtcgtgatggaggaaattgaggaagcctattgttacacctctcctgggccacccaagaagaagaaaaagtataaaatacatggagaaaagacaaagaaacccaggtctgcttaccttctgtactattacgacatctacctgaaagtgcagcaggagctcccccacctccctcagtctgagatcaataagaagattagtgagagttggaggcttctcagcgtggccgagaggagttactacttggagaaagccaaactagagaaggaaggtttggatcctaactctaagctctctgcactgactgctgtggttccggacatcccaggtttccgcaagatcctcccacgctcagattatatcatcatccccaagagcagcctgcaggaggaccggagctgccctcagctagagctatgtgtggctcagaaccagatgtccccgaaaggacctcctcttgtgtccaacactgccccggagacagtgcccagccatgcaggcatggcagagcagtgcctggctgtggaggccctggctgaggaggtgggagcccttacccagtcaggtgctgtacaggagattgccacctcagagatcctcagccaggatgtgctcctagaggacgcttccctagaagtaggggagagccaccaaccttaccagacaagcctggtaattgaagagaccttggtgaatggctcaccagacctccccactggaagcctggctgtgccccacccccaggttggggagagtgtatcagtggtaacagtcatgagggattccagtgagagtagctcctctgcaccagccacacagttcatcatgttgcctctgcctgcctactcggttgtggagaaccccacctccatcaaactgaccactacatatacccgccggggccatgggacatgcaccagcccagggtgctcctttacatatgtcaccaggcacaagccacctaagtgccctacctgtggtaacttcctaggagggaagtggatcccaaaggaaaagccagccaaagtaaaagtggaattggcttctggcgtctcttccaaaggctctgtggtgaaaagaaatcagcaacctgtcaccactgagcaaaattcctctaaggaaaatgcctccaaactgactctggagaattcggaagctgtaagccagctcctgaacgtagctcctcccagagaagtaggtgaggagagtgagtgggaggaagtgatcatctccgatgcccatgttttggttaaggaagctcccgggaattgtggtacagcagtcactaagacgccagtcgtcaaaagtggtgtgcagcctgaggtcactctggggacaactgacaatgacagtcctggagcagacgtaccaacaccatccgaggggacaagtacctccagtccactccctgctcctaaaaaacctacaggagttgacctgcttacccctgggtccagagctccagagcttaaaggcagagcacggggcaagccctcattactggctgcagcaagacccatgagagcaattttgccagccccagttaacgtggggcgaggcagcagcatgggactgcccagggccaggcaggccttttccctgagtgataagactccctctgtgaggacttgtggtctgaagccaagcacactgaagcagctgggccagcccattcaacagccatctggccctggtgaggtgaagctaccaagtggcccatccaacaggacttctcaggtgaaagttgtggaggtcaagcccgatatgtttcctccatataagtacagctgcactgtcacattggatttgggcctggctacatcaagaggccggggaaagtgcaagaatccctcttgtagctatgtctacaccaacaggcacaaacctcgaatttgtcccagctgtggtgttaaccttgccaaagaccggactgagaaaaccaccaaggctatcgaggtgagctcaccactcccagatgtactgaatgccacagagcccctgagcacagcccagagggagatccagcgccagtccacactgcagctgctgcgcaaagtcctgcagattcctgagaatgagtcagagctggctgaggtcttcgccttgattcatgaactcaacagctctcgacttatcttgtccaacgtgagtgaggagacagtcaccatcgagcaaacctcttggtcgaattattatgagtctccgtccacgcagtgccttctctgtagcagcccattattcaaagggggacaaaactccctggctgggccccaggagtgctggctgctgacagccagccgtctgcagacagtgactgcccaggtgaagatgtgtctgaacccccattgtctggccctgcacagcttcatagacatctacacaggtctctttaatgtggggaacaagctgctggtaagcctggacttgctttttgcaatcagaaatcagatcaagctcggagaggaccccagagtgtccatcaatgttgttctgaagtcggtgcaggagcagacagagaagactctgacctcggaggagctgagccagctgcaggagctgctgtgcaatggctattgggcctttgagtgcctcactgtccgagactacaatgacatgatctgtggcatctgtggtgtggcccccaaagtggaaatggctcagaggagtgaggagaatgtgctagcactgaagagcgtggagttcacctggcctgaattcctgggctctaatgaggtaaatgtggaggacttttgggccacgatggagacagaggtgattgagcaggtggcatttcctgccagcatccctatcaccaaatttgatgcgtctgttattgcccccttcttcccaccactcatgagaggagctgtggtcgtcaacactgagaaagacaaaaacctggatgtgcagccagtacctggcagtggcagtgccttggtgaggctgctccaggagggcacctgcaagcttgatgagattggctcctacagtgaagagaagctgcagcacctgctaaggcagtgtggaatcccctttggggcagaagactccaaggaccaagctctgcttctccttgttgggcctctacgaatctgtacagaatggaagctagaagctataccgggcccccacgtcacttcacaggtggtaaaatctacaaggtgtgcccccatcaggtgggtctgcggctccaagtatcttgtgcgaggtgagagtgcccgtgaccatgtggacctgcttgcctcttcccgccactggccgcctgtctatgtggtagatatggccacgtcagtggccctgtgtggctgacctctgctacccagagctggactaaccagatgtggggggaggaaccaggggctgttttctttagccccacagagccacctgttgagtgtgtcctggcccagagctcttgggaccagcattatactgtggacatgacagaaactgaggtactctatccagcacccagttcaccaagactgccacgcggcgcattcgtccatggcaggccttacagcccaatcctggggtgaccccagttgttggggaacaattcctttgggccctgttgccctgaaattgggcaccttacggcaaccatcctgggcctccatcgtgggacagcaaaccaaacggtgttccgccagcggcccattgccttcgacaatgccactcactattacctctacaaccgcctcatggacttcctcaccaagccgcgaaatttgtcaatcggtcaagatccatggacattgtacagagctgccagcctggtgaggtggtcattcttgacaccctctaccgccttggggttgctcagatcaagacagagacagaggaggagggtgaggaagaggaggtggccgcagtggcagaataagccaggctgttgtacagggactacaccatctctcaagccatagtaaggcccttgcctgaggcagagctatccaagggacccgcagaagtggtctcctgtggggagggcctctgactgctgggactgaccaaagagcttccattccctgagcatggtgggacccagggtcctcagttctcaaccctccaggggtcaggagtggtaccaggaaacctcttctggccccgagagagcacttgggggacacggtatgtttaatggaggggaggctgagggaaaggctgatagctggtgggttccgtggggcctgcggtgtgggtcagggtggaggtcctgggtgggctaaggcgtgcccccaagcactaggtgggaaggctgctgaggtctctcccacccctgaggagccctggtttcagcccccctcaagtctgatgaattgcttagcctgttagcctttgactaagggccttggtggcctcattaactctagggggtccctttggcgtcttgattctccctgaaggagggatgcatttctctcttgctccttcctgtaaccccacatttgggggaaagctgaaggagggaggaaaagtcaagcccacagctctccttcccagcactgtccctctcccaccccaagcttttgaggaagagcatcccccttccctccctttcccctggcccactgctgctgcagcccaatatccctctctgggccctgggaaccctctcccacagaggggatgtggtcccctggtcatgacataacctagcagcagtaggaaaaactcccttctatgaaggggaagcagactgggccataaggaaacagcaggactggctcaagtgcccaaggtttgtttagggcctgggaattggccatgtgttaatttattgagtggagtaggtggcttttttttccctccctcttcccccaacaagaataaagtttattaaattatctggttttggtgtagcaggagtcaattccgtgcacatcgtatggggcacagtgtggtcaagctccacagctgtgagctcgtcacttcatgtgaaggagggaaggaaagaaagacgttccagggaatttgcaggtactcatgtggcacaaagaaccagaggctgactgcatcaatgc

SEQ ID NO: 18789 - DNA, 1057 bp, Homo sapiens
  SIMILAR (141)..(806): 381254mologous to Mus musculus ribosomal protein S5,accession number U78085,Smith-Waterman Score=172.
  misc_feature (1)...(1057): n = a,t,c or g
tgaggtgcccannnaggnnnnntttactgagaccctaggctgtgtcggcgaattcgtaccagggcggcgcgtggtctacgccgagtgacagagacgctcaggctgtgttctcaggatgaccgagtgggagacagcagccaccagcgggtggccagagaaccccagacatcaaagctctttggggaagtggagcacccgatgatgttgcaagatcaatgaacatttccttgcaggaattacattgccagttgaaggagaaagttatgcccaagttacttgccttcacagttgccaaggcggttatgccgccaaaaacctttcccgcaaagctcaagtgtcccatttgtggagcgccctcactaactccccaatgatgatgcaccggccgcaacaaccggcaaggaagctcatgactgtgcgcatcgtccaagcaatgccttcgagatcattacaccttgctcacaggcggagaaccctcttgcaggtccttggtgaaccgccatcgatcaacagtggttccccgggaggactcccacacgcatttgggcgctgccgggactgtgagacgacaggctgtggatgtgttcccccctgcgccgtgttgaaccagggccattttgggttgcttgttgcacaaggcggctcgttaaaggcttggcctttccgggaacatttaagaccattggttgagttgcctgggcagatggagctcattcaatgcttgccaaggggctccttcgaactcctattgcctttaagaagaaggacgtgtggccttcttggagcatgtggccaagtccaaccgctgattttcccagctgctgcccaataaaccctgctctgccctttggggcagtcccagccnnnnnnnnnnnnnnnnntctnnnnnnnnnnccgggcccccaattccccttatgggggggcgtataaaaattccggggccgcggtttaaaaccggggggcgggggaacaaggggccgcggcttttgtctgtctgccctcttctttcgggtggccatgcgggaggaatacccgagttggggagtttgagacccct

SEQ ID NO: 18790 - DNA, 559 bp, Homo sapiens
  SIMILAR (107)..(364): 1001254mologous to Homo sapiens BAT4,accession number AF129756,Smith-Waterman Score=467.
gacacccatttcaaagatcccaccaccgcacatccactgctcaccttcttgtcactgtcgcagggtcccagccctcccaaccttccacttggggtgcccatctcaaggaatggggctgggaccccggggtgagggccgtgccaatcccatccccactgtcctcaagagagaccaggaaggactaggctacagatcagcaccccagccccgagtgacacatttcccagcttgggatacccgagctgtggctgggagggagagaccccctcgggtggccacattgagctggagggaggagagaaggagggaggagaaagacagggcttgggagcgggatctaaggacttacatgaacctcgagttctgactttggtaaagtctgaccctagtctgctgctgaagtctgaacttgggcctctgacctgggccctttgacttccccttcctgggatctgcccagatgcagatcctgaagtttttggtccataggctctgtcttcgtgagagacgggctgagagtcaaaaataaatcacccatttgtggtttattcccaaaaaa

SEQ ID NO: 18791 - DNA, 427 bp, Homo sapiens
  SIMILAR (192)..(19): 371254mologous to Lymantria dispar nucleopolyhedrovirus DNA binding protein,accession number AF081810,Smith-Waterman Score=74.
aaaggagggagccaggctggatctctttccgcagctctcctcacgttcccctctagtcccggcgcggcgctgctgcccaggggactggcctatcctcggccaatccgctgggtccttattgcctgttgggcccctagtgcgaatcagtcccgccagagacccttgacgggcatactgtttcctccgggctcctgcctcatgaggggagaggaagaggaaactccgaaatgggatcgcggaagacttaaagggccaggctgatttttttttcctactgcaggtctctgaggctgtggttgctacagggtcaccacgagcttggcttacttgtctcatccttcccttgcctgggatcattttctcagttctcccaaaagccatgtcccggcccttgctcatcaccttcaccccagccactgaccccagc

SEQ ID NO: 18792 - DNA, 482 bp, Homo sapiens
  SIMILAR (272)..(400): 881254mologous to Homo sapiens BAT4,accession number AF129756,Smith-Waterman Score=204.
aaaatttgccctcgagcccaagaattcggcacgaagggaacaaaatcggtattgtagggtcccatgtttttacgcaaagtctctctccccttaggccctgcaaagtcctaagttgtggggttactttagtggcaggaaagtgtttttgaactactttttctcatcccagcaggtctctgaggctgtggttgctacagggtcaccacgagcttggcttacttgtctcatccttcccttgcctggtatcattttctcagttctcccaaaagccatgtcccggcccttgctcatcaccttcaccccagccactgaccccagcgacctctggaaggatgggcagcagcagccacagcccgagaagccagagtccaccctggaatgggcttgcagcgaagcttttctatgaggccctgattggggatgagagcagcgctcctgactcccagagatctcagactgaacctgccagagaaagaaagaga

SEQ ID NO: 18793 - DNA, 1947 bp, Homo sapiens
  SIMILAR (564)..(1586): 451254mologous to Homo sapiens BAT4,accession number AF129756,Smith-Waterman Score=550.
  misc_feature (1)...(1947): n = a,t,c or g
ggcccgggagtctgggcaatacagttttgtgctcactgggtgaagaggctgacttagggctgggaaaggagggagccaggctggatctctttccgcagctctcctcacgttcccctctagtcccggcgcggcgctgctgcccaggggactggcctatcctcggccaatccgctgggtccttattgcctgttgggccccctagtgcgaatcagtcccgccagagacccttgacgggcatactgtttcctccgggctcctgcctcatnagggggagagaatggcgccattttgcggtacgtgaagctacacagcaacacgtataggagactctccccgagatcttctagggagtgacccatctatttttgtttgggaagaggaaactccgaaatgggatcgcgggaagaattaaagggccaggctggatttttttttcctactgcaggtctctgaggctgtggttgcttacagggtcaccactgagcttggctttaccttgtctcatccttcccttgcctggtatcatttttctcaagttctcccaaaaagccattgtccccggccccttgctcatcaccttcaccccagccactgaccccagcgacctctggaaggagtgggcagcagcagccacaagcccgagaagccagagtccacccttggatggggctgcagcccgagctttctatgaaggccctgatttggggatgagagcagcgctcctgactcccagagatctcagacttgaacctggccagaggaaagaaagagaaagaaaagaggattattgaaggcaccagcagcagaagcattggcagaagggagcttcaggaagacctgtacaagggagatcccttgaagctgacgatccgatgacttaccggatactgacgtcagcccaagagggggacactgccatagctgatgctgactgctggaaccgcatgaggcaggaggagctggggggaatatcaacgcccgggatgccttctggtggaccccactgatgtgtgctgctcgagcgggccagggggcagctgtgagctatctcctgggccctgggggctgcctgggtgggggtctgtgagctgagtggcagggatgcggctcaggctcgctgaagaagctggcttccctgaggtagcccgcatggtcagggagagccatggagagacaaggagcccggaaaaccggtctcctactccctccctccagtactgcgagaactgtgacacccacttccaagatttccaaccaccgcaacatcaactgttcacctgctgtcactgtcgcagggtcctcagcctccccaacttccacttggggtgcccatctccacaccgcggttttaaattctgctgctaggcggggttgggagcccaggaatggggctgggaccccggggtgagggccgtgccaatccccatccccaactgatcctcaaatagggacccaggaaaggactaggcttacaagatcagcacccccagccccgaagtgacacattttcccagctttgggataccccgagctgtggctgggagggagagacctccctcgggtggccaacactgaactggaaggaaagaggagaaggagggaggagaaagacagggcttgggagcgggatctaaggacttacatgaacctcgagttctgactttggtaaagtctgaccctagtctgctgctgaagtctgaacttgggcctctgacctggggccctttgacttccccttcctgggatctgctcagatgcagatcctgaagttttttggtcaataggctcttgtcttcgtgagagacgggctgagagtcagaaataaatcaacccatttgtgggtttaaaaaagtagtattgaaattctattatatgggtttttttattagcgggccgcgtgttgattcctcttgaggggggttttttatcctggccccccgccctttt

SEQ ID NO: 18794 - DNA, 542 bp, Homo sapiens
  SIMILAR (31)..(132): 411254mologous to Homo sapiens Non-A non-B hepatitis specific antigenic protein encoded by phageclone lambda HC2410C,accession number R10754,Smith-Waterman Score=62.
  misc_feature (1)...(542): n = a,t,c or g
ggcgatgactaatgcagactatgggattgagcactatcggatcgaccacgcgtccgattatggaaaaaaaacattgcaaaatataaaataaataaaaaaaggataggaaactttgaaccttatgtaccgagcaaatgccaggtctagcaaacataatgctagtcctagattacttattgattnnnnnnnnnnnnnnnnnnnnnnnnnnnnnnnnnnnnnnnnnnnnnttaatgttttatagaccctgggaaaaagaattttcagcaaagtacaaaaatttaaagcattcctttctttaattttgtaattctttactgtggaatagctcagaatgtcagttctgttttaagtaacagaattgataactgagcaaggaaacgtaatttggattataaaattcttgctttaataaaaattccttaaacagtgnnnnnnnnnnnnnntaatnnnnnnnnnnnnnnnnnnnnnnnntatatttatnnnnnnnnnnnnnnnnnnnnnnnnnnnnnnnnnnngagggggggcttcttctttattccccc

SEQ ID NO: 18795 - DNA, 2597 bp, Homo sapiens
  SIMILAR (45)..(1187): 651254mologous to Homo sapiens testis-specific poly(A)- binding protein,accession number AF132026,Smith-Waterman Score= 1100.
  misc_feature (1)...(2597): n = a,t,c or g
cggaaaggtcgcggcctgtggccctgcgggcagccgtgccgagaatgaaccccagcacccccagctacccaacggcctcgctctacgtgggggacctccaccccgacgtgactgaggcgatgctctacgagaagttcagcccggcagggcccatcctctccatccggatctgcagggacttgatcaccagcggctcctccaactacgcgtatgtgaacttccagcatacgaaggacgcggagcatgctctggacaccatgaattttgatgttataaagggcaagccagtacgcatcatgtggtctcagcgtgatccatcacttcgaaaaagtggagtgggcaacatattcgttaaaaatctggataagtccattaataataaagcactgtatgatacagtttctgcttttggtaacaccctttcatgtaaggtggtttgtgatgaaaatggttccaagggctatggatttgtacactttgagacacaccgaagccagctgaaagagctattgaaaaaatgaatggaatgctccctaaatgatcgcaaagtatttgttggacgatttaagtctcgtaaagaacgagaagctgaacttggagctagggcaaaagaattcacccaatgtttacatcaagaattttggagaagacatggatgaatgggcgccttaagggatctctttggcaagttttgggcctgcacttaagtgtgagaagttaatgactgatgaaagtggaaaatccaaaggatttggatttgtaagcatttgaaaggcatgaagatgcacagaaagctgtggatgagatgaacggaaaggagctcaatggaaaacaaatttatgttggtcgagctcagaaaaaggtgcgaacggcagacggaacttaagcgcaaatttgaacagatgaaacaagataggatcaccagataccagggtgttaatctttaatgtgaaaaatcttgatgatggttattgatgatgaaccgtctccggaaagagttttctccatttggtacaatccagctagtgccaaaggttatggatggagggttggtcgcagcaaagggtttaggttttgtatgtttctcctccccagaaggaagccactaaagcagttacagaaatgaacttttagaattgtggccacggagncccttgtatgtagctttagcttcagcgcaaagaagagcgccaggctcacctcactaaccagtattatggcagaggaatgggcaagtgttacggaggctgttcccaaccctgttaattcaacccctaccaggccaggcacctcctttcaggtttactttcatgggcaggttttcccacagatttcggaaccgtgctggcatactatccttcctagccaaattgctcaaactaagaccaagttccttcggtggactggtcagggtgccaggacttcatccattcccaaaatatgccggggtgctatcccgcccagctggctcctagaccacccatttaaggtactatggagaccagcttcttcacaaggttcccagaggtcatgccaacacagcgtggttgctaacacatcaaacacagacaaatgggttccacgttcctgcagcctgcaagccgctgcagcgtacgtcctgctgtccggcaccgtttccacagtataaatatgctgcaggagttcgcaattcctcagcaacatctttaatgcacagccacaagttacaatgcaacagccctgctgttccatggtaccaagggtccagggaaccctttggacctgcctccccatggttgggcatctgccccctccctcaaggagcaaaagccaaatgttggggtggaacgggctgtttccctcttattccaagcccatgcacccctactccttgctggtaaaatcacttggcaatgttgttggagattgataattcagaacttccttcatatgctcggagtctccaggagtcactcccgttctaaagggttgatgaagctgtagctggtactacaagccccccccaagctaaaagagggctggcccagaaagcaggttaacaagtgcccaccggtgtccccaactgtttaaagtgagctttttccttttgattgatccagggacccatgaaaaggaaaccttggtgcctcacccgaagaaaaatattctaaacatcgagaaactatgggaaaaaaaattgcaaaatctaaaataaaaaatgcaaaatataaaataaataaaaaaaggaaaggaaactttgaacccttatgtaccgagcaaatgcaaggtctagcaaatataatgctagtcctagattacttattgatttaaaaacaaaaaaaagattacttaattttgatttaaaaacaaaaaatcgtaaaatacaaaaaccagttaatgttttatagaccctgggaaaaagaattttcagcaaagtacaaaaatttaaagcattcctttctttaattttgtaattctttactgtggaatagctcagaatgtcagttctgttttaagtaacagaattgataactgagcaaggaaaccgtaatttggattataaaattcttgctttaataaaaattccttaaacagtgaaaaaaaaaaaaaaaaagggc

SEQ ID NO: 18796 - DNA, 1529 bp, Homo sapiens
  SIMILAR (137)..(727): 421254mologous to Mus musculus TPI,accession number AC002397,Smith-Waterman Score=260.
  misc_feature (1)...(1529): n = a,t,c or g
atggcggaggacggcgaggaggcggagttccacttcgcggcgctctatataagtgggcagtggccgcgactgcgcgcagacactgaccttcagcgcctcggatccagcgccatggcgccctccaggaagttcttcgttgggggaaacctggaagatgaacgggcggaacacgacgtctgggggagctcatcggcactctgaacgcggccaaggtgccggccgacaccgaggtggtttgtgctccccctactgcctatatcgacttcngcccggcagaaagctagatcccaagattgctgtggctgcgcagaactgctacaaaattgactaattggggcttttactggggagatcagccctggcattgatcaaagactgcggccaaccgtgggtggtcctggggcactcagagagaaggcatgtcttttggggagtcagatgagctgatttgggcagaaagtggccccatgctctggcagagggactccggagtaatccgcctgcatttggggagaagctaagatgaaaggggaagcctgggcatcacttgagaaggttgttttcgagccagacaaaggtcattcgcagataaacgtgaaaggactggaagcaagggtcgtccttggcctaatgagccctgtgtggggcctttggttattggcaagacttgcaacaccccaacaggccccaggaagttcaccgaagaagctcccgaggatggcttgaagtccaacgtctctggatgcggtggcttcagagccaccggtaaccatttatggaaggctctgtgaactggggcaaccttgcaaagaagcttggccaagccaagccctgatgtggatgggcttcccttgtggggtggtgcttcccttcaagcccgaaattcgtgggacatcattcaatgccacaacaatgagcccccatcccatctttccctaccccttcgctgccaagcccagggacttaagcagacccaaaagcccaagtaactgcccttttccctggcatatgcttctgaatggtgtcatctgctcctttcctgtgggcctcatcccaaactgtatcttcctttactggtttatatccttcacccctgtaaatggttgggaccaggccaatcccttctccacctaactataatggttggaactaaactgtcaccaagggtggcttctccttggctgagagatggaacggcgtggtgggatttgctcctgggttccctaaggccctagtgagggcagaagagaaaccatcctctcccttcttacaccgtgagcccaagatcccctgcagaaggcaggagtgctgcgctctcccatgggtgcccgtgcctctgtgctgtgtatgtgaaccagccatgtgaagggaataaacctgggcactaggtcttgtggtttgtctgccttcactggacttgcccagataatcttcctttttgaggcagctatataaatgatcatttgtgcaagaaaaaaaaaaaaaacaagaacaggtttctataacaacatctctaacatattttactt

SEQ ID NO: 18797 - DNA, 468 bp, Homo sapiens
  SIMILAR (195)..(467): 1001254mologous to Homo sapiens Nascent polypeptide associated complex alpha subunit,accession number X80909,Smith- Waterman Score=438.
  misc_feature (1)...(468): n = a,t,c or g
aggctcnaacttgggtgtcctgcacanaccnccngnnntggaannaccgggccgacccacgcgtccgccgccatcttggttccgcgttccctgcacaaaatgcccggcgaagccacagaaaccgtccctgctacagagcaggagttgccgcagccccaggctgagacagggtctggaacagaatctgacagtgcaagagccctgcttcagatacttacatagtttttggggaagccaagatcgaagatttatcccagcaagcacaactagcagctgctgagaaattcaaagttcaaggtgaagctgtctcaaacattcaagaaaacacacagactccaactgtacaagaggagagtgaagaggaagaggtcgatgaaacaggtgtagaagttaaggacatagaattggtcatgtcacaagcaaatgtgtcgagagcaaaggcagtccgagccctgaagaacaacagta

SEQ ID NO: 18798 - DNA, 1491 bp, Homo sapiens
  SIMILAR (190)..(1356): 981254mologous to Homo sapiens similar to Homo sapiens Hpast (HPAST) mRNA with GenBank Accession Number AF001434.1,accession number AY007161,Smith-Waterman Score=1974.
  misc_feature (1)...(1491): n = a,t,c or g
atgcccggcgaagccacagaaaccgtccctgctacagagcatgagttgccgcagccccaggctgagacagggtctggaacagaatctgacagtgatgaatcagtaccagagcttgaagaacaggattccacccaggcaaccacacaacaagcccagctggcggcagcagctgaaatcgatgaagaaccactgcccaaccccgtcctgggcagcatcagcatcatcgacacccccgggatcctgtctggagagaagcagcggatcagcagaggctatgactttgcagccgtcctggagtggttcgcggagcgtgtggaccgcatcatcctgctcttcgacgcccacaagctggacatctcgnatgagttctcggaagtgatcaaggctctgaagaaccatgaggacaagatccgcgtggtgctgaacaaggcagaccagatcgagacgcagcagctgatgcgggtgtacggggccctcatgtggtccctgggcaagatcatcaacacccccgaggtggtcagggtctacatcggctccttctggtcccacccgctcctcatccccgacaaccgcaagctctttgaggccgaggagcaggacctcttcaaggacatccagtcactgccccgaaacgccgccctcaggaagctcaatgacctgatcaagcgggcacggctggccaaggttcacgcctacatcatcagctccctcaagaaagagatgcccaatgtctttggtaaagagagcaaaaagaaagagctggtgaacaacctgggagagatctaccagaagattgagcgcgagcaccagatctcccctggggacttcccgagcctccgcaagatgcaggaactcctgcagacccaggacttcagcaagttccaggcgctgaagcccaagctgctggacacggtggatgacatgctggccaacgacatcgcgcggctgatggtgatggtgcggcaggaggagtccctgatgccttcccaggtggtcaagggcggcgcctttgacggcaccatgaacgggccgttcgggcacggctacggcgagggggccggcgagggcatcgacgacgtggagtgggtggtgggcaaggacaagcccacctacgacgagatcttctacacgctgtcccctgtcaacggcaagaaacagggcgccaacgccaagaaggagatggtgaagtccaagctccccaacaccgtgctagggaagatctggaagctggccgacgtggacaaggacgggctgctggacgacgaggagttcgcgctggccaaccacctcatcaaggtcaagctggagggccacgagctgcccgccgacctgcccccgcacctggttccgccctctaagctggggctgaagcctcgggccttgccaacattcatggcaaagttcacccggaggtccacgtcctcagcccaggcctcctggactgggtccttgcacagcacagggaagatgccacggtacaggtgggcctga

SEQ ID NO: 18799 - DNA, 629 bp, Homo sapiens
  SIMILAR (335)..(511): 671254mologous to Drosophila melanogaster alpha NAC,accession number AF017783,Smith-Waterman Score=200.
gtccccagagtttgtggatgaagctctgtgtgcgtgctaggagtaccttagcaacttggcccacatggacatcgacaaggacctggaggccccgctgtacctcacccccgagggctggtccctcttcctccagcgctactaccaagtggtccacgaaggggcagaactcaggcacctcgacactcaggtccagcgctgtgaggacatcctgcttcagatacttacatagtttttggggaagccaagatcgaagatttatcccagcaagcacaactagcagctgctgagaaattcaaagttcaaggtgaagctgtctcaaacattcaagatatacacacagactccaactgtacaagaggagagtgaagaggaagaggtcgatgaaacaggtgtagaagttaaggacatagaattggtcatgtcacaagcaaatgtgtcgagagcaaaggcagtccgagccctgaagaacaacagtaatgatattgtaaatgcgattatggaattaacaatgtaaccatatggaagcaactttttttggtgtctcaaaggagtaactgcagcttgggttgaaatttggactggttctatcataaataaagttatggcttcttgttggaaaaaaaaaaaaa

SEQ ID NO: 18800 - DNA, 767 bp, Homo sapiens
  SIMILAR (1)..(396): 841254mologous to Homo sapiens Nascent polypeptide associated complex alpha subunit,accession number X80909,Smith-Waterman Score =521.
agaagcctatgccaaactggtcttcggcaggtacaggagtaccaaagtcactatcggaaatctagaaaatctctttgtcatccaaaaccagatgtctacaagagccctgcttcagatacttacatagtttttggggaagccaagatcgaagatttatcccagcaagcacaactagcagctgctgagaaattcaaagttcaaggtgaagctgtctcaaacattcaagaaaacacacagactccaactgtacaagaggagagtgaagaggaagaggtcgatgaaacaggtgtagaagttaaggacatagaattggtcatgtcacaagcaaatgtgtcgagagcaaaggcagtccgagccctgaagaacaacagtaatgatattgtaaatgcgattatggtaagtgttcaagcctttgttccttgaactccctctgccctgaccaattatgagtgactttaatttgtccttgcctaaatatcagcccaattaaggaacctcattccagagcctcttttgagttgccgtataggttttagtggcctaaattctcctgatttgcctgtaagagttttagtgacctgaattctcctgatttgcctataagaaccgctaattatcttttctctgttacaggaattaacaatgtaaccatatggaagcaactttttttggtgtctcaaaggagtaactgcagcttggtttgaaatttgtactgtttctatcataaataaagttatggcttcttgttggatgaaaaaaaaaaaaaa

SEQ ID NO: 18801 - DNA, 1331 bp, Homo sapiens
  SIMILAR (345)..(740): 421254mologous to Homo sapiens Nascent polypeptide associated complex alpha subunit,accession number X80909,Smith-Waterman Score =125.
  misc_feature (1)...(1331): n = a,t,c or g
ggcacagtaagtactttctgtgccgctactgtctatccycagccatccyccttttctttcgggctaagccgccccggggactgagagttaaggagagttggaggctttactgggccacagggttcctacacyccccttgggccttccggacaaaatggggtctgcggttggtgtcctggcaaaagcagggtagaagggctgcggggcgggcccagaatccgagcctgcagagatgggagcagttgcagtgttgagggcggaagaggagtgcgtcttgttttgggaactgcttcacaggatccagaaaaggaaatgcccggcgaagccacagtttctcgttctctgctacagagcaggagttgccgcagccccagggctgagacagttgtttctcatcttagggtctggaacagaatctgaccagtgatgaatcagtaccagagccttgaagaacaggattcccacccagggcaaccacacaacaaagcccaagctggccggcagcagtctgaaatcgatgaagaaccacgtcagtaaagcaaaacagagtcggagttgaaaagaaggccccggaagggctattgtcccaaacttgggtctttcggcaggttacaggagttaccaaggaattcactatcccggaaatctagagaatatcctcctttgtcatccaccaaaaccagatgtctaccaaggagcccctgctttcaggatacttacccatagtttttggggaagccccaaggatccgaagattttatcccccagccaagccacaacctagccagcctgcctgagaaaattcaaaagttccaaggtgaagcctgtcctcaaacatttcaagaaaacacaccagactcccaactgtaccaagaggagagttgaagaggaagaggtccgatgaaaccaggtgtaggaagttaaggaccatagaatttggtcatgtcacaagcaaatgtgtccgagaggcaaaggcagtcccgagccctgaagaacgaacgagtaatgatattggttaaattgccgattatgggaatttaacaatgttaaccatatgggaaggcaactttttttgggtgttctccaaagggagttaacttgcagcttgggtttgaaaatttgtatctgtttctattcattaaattaaagtttatggcttcttgttggaaaaaaaataaaaaatnnnnnnnnnnnnntggggggggccgttttaaagaatccttgggggggccaaattttacgggggtttggaaggttttatttttttccttataggggggcgtattaaaaccaaccttgggaattttggaaaagaaccttaatttttgggg

SEQ ID NO: 18802 - DNA, 272 bp, Homo sapiens
  SIMILAR (125)..(39): 501254mologous to synthetic construct fagment of human interferon,accession number A12551,Smith-Waterman Score=62.
tctttggcattcaggggcccccattgctgggccccacacgggagaccacatctggaagcactattcctacagctccctctgctggagacggaaagtgacagtttgttgcaaagacctgtagaaacattacttacacgttcatttctgtacacatttagttaatttagaacctgggacttttacaatcgattccccaaacccctttatggcagcaacactgagaatcttagaaagatgtcgcgttttcttttaatgaatgagagaagcccatt

SEQ ID NO: 18803 - DNA, 443 bp, Homo sapiens
tttttttttttccaggggttagccactttaatagaaaatatgatcaaaactcgattacaagagttcaaaaagacatagaaaaccagtgagtttcaattttattacaagttttcaaatctgggactagtttctttttttcttttaactgaaatgccaacttcagcccagggttttttcacaaccaaactaaaaatgacttacacgttcatttctgtacacatttagttaatttagaacctgggacttttacaatcgattccccaaacccctttatggcagcaacactgaaggagcacagtttctctctctaggaagaagaggattagcagacataattgtgtgcgtcaagagaaatttgtaatcaaaaaatgaaagtaagacgaatggcccagaaacccgcattttattgacagtcattttccccacagagaatcttagaaaga

SEQ ID NO: 18804 - DNA, 2361 bp, Homo sapiens
  SIMILAR (161)..(574): 401254mologous to Gallus gallus ribosomal protein L22,accession number AB046394,Smith-Waterman Score=171.
acctttcctccctgaggcccacctggggaaccagaaatgccagaactgtaactccacctctgggatctgcagggtgagtgtgaaggtctgcccaggcccctgggtgcatgccaagctgtgtgctcccaccttgatgtccagagatgtaaccctcccagacgctcctgtgaaaaagccttgtggtgaagggggggcaaaaaaaaagaagcaagttctgaagttcactctatgattgcacccacccttgtagaagatgggaatcatggatgctgcccaattttgagccagtttttgcaaagaaaggatcaaagtgtaacggaaaagctgggaaccttgagtggaggggtggtagacccatcgaaaggagcaagaggcaagatcaccgtgacathccgaggtgcctttctccaaaagggtattttgaaaatatctcaaccaaaaaaatatttgaagaagaataatctacggtgacctggtttgccgcgtagtttgcctaaccagccaaaggagaagttaccgaatttccgttacttccagattaaccagggacgaaggaaggagggaggaagacgagggtttaaatttcctttatctgggaaaattttgttatgagttctttggaattaaaactttggggaaccaaaaagggtggtttatcccttgtatctctgccagtgtggattgaacagaaaaattggaaatccatagtccaaaggggcttcccttggtttcgccactccatttatttgtaacttgacttcttttttttttctgcttaaaaatttcaattctcgtgggtaaaacccagagtagaaggagagggtgacctttacccgaactgacagcccattggggaggcagatgcgggtgtggaggtgtgggctgaacggtaagtgactgtttgattttaaaaagtgtgactgtcagttgtatctgttgcttttctcaatgattcagggatacaaatgggcttctctcattcattaaaagaaaacgcgacatcttttctaagattctctgtgggaaaatgactgtcaataaaatgccgggtttctgggccattccgtcttactttcattttttgattacaaatttctcttgaccgcacacaattatgtctgctaatcctcttcttcctagagagagaaactcgtgctccttcagtgttgctgcccattaaagggggtttggggaaatcgattgtaaaagtccccgggttctaaatttaacctaaaatgtggtacaggaaatggaacgtgtaagtaatgttttctacaggtcttttgcaacaaactgtgcacttttcgtctccagcaggagggagctgtagggaatagtgcttccaggatgtgggtctcccgtgttggggcccagcaatggggggcccctgaatgccaagaagctctggaggttcttgaaagaaggggacacgaaggaggagtgactgggaagccctcccaatgccaaggaggtgggaggtgccctggaaataagctggcctcatgccacttaggccatgacttggatttaatgtcagtggtgtgccacagtgcaagaaggctaagacaactgaaaggggctaccaaggctgggaaaaaaatgcaattgttgctgtgagtgactttgaaagactctggtgccttgtggtgcccttctgaaattcaaacagtaatgcaaaagtgtcttgcattagaatttacggtgtctaaaattcatgtttttaaaagagcttgcctacagatgggtttccacaccttgaaaattgtgcccctgcggagttgccatagccgggaagttccaatgctccagcccctaccttgggctccccattaaaacatttgggtgcccctgtggattgcagttgaaccgtgttgaaggctttggcaatttccacttgtgttaaaaggctctggccatttttcccatttcctatgcaaatttcctttgaaagccagaattgccttgccaaaattccttcctcctgcccgtcacagaaaggcaggagtttcttttcaaactttcactggagggcatcagtttgctctttggcaatgtccccttaacccatgattattaacgtaagtttgtggcttgagtttacaaattcctacttgttgcattgatgttcccatgtagtaagtcatttttagtttggttgtgaaaaaaaccctggggcttgaagttggcgatttcagttaaaaggaaaaavggaaactagtcccaagatttggaaaacttggtaataaaattgaaaactaactggttttctatgtctttttgaactcttgtaaatcgagtttttgatccatattttctattaaagtgggctaacacctggctactcttactgtaaaaaaaaaa

SEQ ID NO: 18805 - DNA, 762 bp, Homo sapiens
  SIMILAR (155)..(454): 461254mologous to Homo sapiens ribosomal protein L36,accession number BC003052,Smith-Waterman Score=156.
atttcggaacaggcccgggtcctctgtgcaggttggaggatggttggttgtggcgagcgaggctgaaggagccgggacgcggcggctctgggcctcgggaacttgagccggtactcaccttccgccctttctccccgtcgctgtccgccagcccatggccctacgcttacccttattgccgtgggcctcaaacaagggcccacaaaagtgacccaagaaccgtgagcaagcccaaggcaccatgtccgccgcgggcgtcttgaccaaacacaccaagttcgtgcgggacatgattcgggaggtgtgtggcttttcccccgtacgaagcggcgcgccatggagttactgaaggtctccaaggacaaaccgggccctcaaatttatcaagaaaaagggtggggacgcacatccgcgccaagaggaagcgggaggagcttgagcaacagtactggcccgccattgaggaaaagcttgcttgccaagaaagacttgagcccctccccttgccctctcccttgaaataaagaacagcttgacagaagccctggctctcctgctgtccgtgggtgggtgtgggtgtgtcgggggcccgcagtcccctgtctggtgcccgctttgagccacaccctctccgggtgctgcctggtcgtgaatcaaaagccgtggcccgcccacccttcccggggcagcaggtgaggaagccgccgtactgcaaatgactttaatcattaaatagcttctatgccacacaaaaaaaaaaaa

SEQ ID NO: 18806 - DNA, 465 bp, Homo sapiens
  SIMILAR (120)..(464): 821254mologous to Homo sapiens similar to dbpB protein,accession number L28809,Smith-Waterman Score=495.
  misc_feature (1)...(465): n = a,t,c or g
ccgccccccatcgattcagatccctaggccangnggnggaattcggcccgggcggcctcacatcggcggcgcctgccggcggggacaagaaggtcatcgcaacgaaggttttgggaacagtaaaatggttcaatgtaaggaacggatatggtttcatcaacaggaatgacaccaaggaagatgtatttgtacaccagggtgcggaggcagcaaatgttacaggtcctggtggtgttccagttcaaggcagtaaatatgcagcagaccgtaaccattatagacgctatccacgtcgtaggggtcctccacgcaattaccagcaaaattaccagaatagtgagagtggggaaaagaacgagggatcggagagtgctcccgaaggccaggcccaacaacgccggccctaccgcaggcgaaggttcccaccttactacatgcggagaccctatgggcgtcgaccacagt

SEQ ID NO: 18807 - DNA, 2102 bp, Homo sapiens
  SIMILAR (596)..(1558): 421254mologous to Homo sapiens DNA-binding protein B,accession number M24070,Smith-Waterman Score=490.
  misc_feature (1)...(2102): n = a,t,c or g
agtagaaaaagatgtgaatacttggaaaggaagacacatttttttaaatatatgcctggtaaaacggatcagaaggcaggtccccatggagcacaccctcgccctaaacatgctgaacccgggctgccatagcctgcgtggtccctccaaggtgactgctccgacaaaagggtacgctcttcaaacgcactacgtttaaggcaattccagaaaccctcgtctgtgccgcgactacacggccattaaagaaaagccgactctacgcccgccgtaatgttctcagatcacagggaccgtatttggagctgggagggagggaagccttttcttcacggggggttaaggcgtcttcgagcccccttccaatcccgggtccggccgggtaatccctgcccagcgttcgggcgtgcctttttctcagccgagactcaaccctgaacgtggggcccgccagcccgacggctgcctagtggaagtcacgttccttctgcccgtcctctcggttaccatcacacccccgggaggagccgcagctgccgcagccggccccagtcaccatcaccgcaaccatgagcagcgaggccgagacccagcagccgcccgccgcccccccccggcgcccccgccctcagcgccgccgacaccaagcccggcactacgggcagcggcgcagggagcggtggcccgggcggcctcacatcggcggcgcctgccggcgggcgacaagaaggtcatcgcaacgaaggttttgggaacacgtaaaatggttcaatgtaaggaacggatatggtttcatcaacaggaatgacacccaaggaagatgtatttgtacaccagactgccataaagaagaataacccccagaagtaccttcgcagtgtaggagatggagagactgtggaattttgatgttgttgaaggagaaaagggtgcggagggcagcaaatgttacagggtcctggtggtgttccagttcaaggcaagtaaatatgcagcagaccgtaaccattatagacgctatccacgtcgtaggggtcctccacgccattacccgcaaaaattaccagaatagttgagagtggggaaaagaaccgagggatcgggagagtgctccccgaaggccaggcccaacaacgccggccctacccgcaggcgaaggttcccaccttactacatgcggagaccctatggggcgtcgaccacagtatttccaaccctcctgtgcagggagaagtgatggagggtgctgacaaccagggtgcaaggagaacaaggtagaccagtgaggcagaatatgtatcggggatatagaccacgattcccgcaggggcccctcctcgccaaaagacagcttaggagagggcggcaatggaagaagataaaagaaaatcaaggggtgtgggacccaaggttcggcagcccacctcaaacgtcgttaccgccgcaactttcaattaccgagcgcagacggccccagaaaacccctaaacccccaagatgggcaaaagagaccaaaagcagccggatcccacccagcttgagaattcgttccgctccccgaggctgagccagggcggggctgagtaaatgccggcttaccattctctaccatcatccgggtttagtcatccaacaagaaggaaatatgaaattccagctaataagaaattgaacaaaagattggagcttggagacctaaagtgccttgctttttgccccgttgcaaccagataaataagaacttatctgcatttatctattgcagcatgggggtttttaattattttttaccctaaaagacgtctctttttttgggtaattaacaaacgtgttttttttaaaaaaagcctggttttttctccaatacgccttttaaaggtttttaaattggttttcatatctgggtcaagttggggggggggcccgggggggaaaaaggggggcaaaaaaaaattttttttttgtttttttngttgaagaaggagagagccttccactttttaatttgtaataaaagtttacaacttgattttttcaaaaaagtcaacaaactgcaagcacctgttaataaaggtcttaaataataaaaaaaaaaaaaaaaa

SEQ ID NO: 18808 - DNA, 654 bp, Homo sapiens; identical to SEQ ID NO: 1042
  SIMILAR (208)..(489): 841254mologous to Homo sapiens glyceraldehyde 3-phosphate dehydrogenase (EC 1.2.1.12),accession number J02642,Smith-Waterman Score=394.

SEQ ID NO: 18809 - DNA, 5266 bp, Homo sapiens
  SIMILAR (2)..(5263): 1001254mologous to Homo sapiens complement component C4A,accession number K02403,Smith-Waterman Score=9075.
gaccagatcagcccccagagcagcctcatggctggaggatccaagagaggttagatccgtctgtctgtctgctaccttcttcaccttatctctgcagaagcccaggttgctcttgttctctccttctgtggttcatctgggggtccccctatcggtgggggtgcagctccaggatgtgccccgaggacaggtagtgaaaggatcagtgttcctgagaaacccatctcgtaataatgtcccctgctccccaaaggtggacttcacccttagctcagaaagagacttcgcactcctcagtctccaggtgcccttgaaagatgcgaagagctgtggcctccatcaactcctcagaggccctgaggtccagctggtggcccattcgccatggctaaaggactctctgtccagaacgacaaacatccagggtatcaacctgctcttctcctctcgccgggggcacctctttttgcagacggaccagcccatttacaaccctggccagcgggttcggtaccgggtctttgctctggatcagaagatgcgcccgagcactgacaccatcacagtcatggtggagaactctcacggcctccgcgtgcggaagaaggaggtgtacatgccctcgtccatcttccaggatgactttgtgatcccagacatctcagagccagggacctggaagatctcagcccgattctcagatggcctggaatccaacagcagcacccagtttgaggtgaagaaatatgtccttcccaactttgaggtgaagatcacccctggaaagccctacatcctgacggtgccaggccatcttgatgaaatgcagttagacatccaggccaggtacatctatgggaagccagtgcagggggtggcatatgtgcgctttgggctcctagatgaggatggtaagaagactttctttcgggggctggagagtcagaccaagctggtgaatggacagagccacatttccctctcaaaggcagagttccaggacgccctggagaagctgaatatgggcattactgacctccaggggctgcgcctctacgttgctgcagccatcattgagtctccaggtggggagatggaggaggcagagctcacatcctggtattttgtgtcatctcccttctccttggatcttagcaagaccaagcgacaccttgtgcctggggcccccttcctgctgcaggccttggtccgtgagatgtcaggctccccagcttctggcattcctgtcaaagtttctgccacggtgtcttctcctgggtctgttcctgaagcccaggacattcagcaaaacacagacgggagcggccaagtcagcattccaataattatccctcagaccatctcagagctgcagctctcagtatctgcaggctccccacatccagcgatagccaggctcactgtggcagccccaccttcaggaggccccgggtttctgtctattgagcggccggattctcgacctcctcgtgttggggacactctgaacctgaacttgcgagccgtgggcagtggggccaccttttctcattactactacatgatcctatcccgagggcagatcgtgttcatgaatcgagagcccaagaggaccctgacctcggtctcggtgtttgtggaccatcacctggcaccctccttctactttgtggccttctactaccatggagaccacccagtggccaactccctgcgagtggatgtccaggctggggcctgcgagggcaagctggagctcagcgtggacggtgccaagcagtaccggaacggggagtccgtgaagctccacttagaaaccgactccctagccctggtggcgctgggagccttggacacagctctgtatgctgcaggcagcaagtcccacaagcccctcaacatgggcaaggtctttgaagctatgaacagctatgacctcggctgtggtcctgggggtggggacagtgcccttcaggtgttccaggcagcgggcctggccttttctgatggagaccagtggaccttatccagaaagagactaagctgtcccaaggagaagacaacccggaaaaagagaaacgtgaacttccaaaaggcgattaatgagaaattgggtcagtatgcttccccgacagccaagcgctgctgccaggatggggtgacacgtctgcccatgatgcgttcctgcgagcagcgggcagcccgcgtgcagcagccggactgccgggagcccttcctgtcctgctgccaatttgctgagagtctgcgcaagaagagcagggacaagggccaggcgggcctccaacgagccctggagatcctgcaggaggaggacctgattgatgaggatgacattcccgtgcgcagcttcttcccagagaactggctctggagagtggaaacagtggaccgctttcaaatattgacactgtggctccccgactctctgaccacgtgggagatccatggcctgagcctgtccaaaaccaaaggcctatgtgtggccaccccagtccagctccgggtgttccgcgagttccacctgcacctccgcctgcccatgtctgtccgccgctttgagcagctggagctgcggcctgtcctctataactacctggataaaaacctgactgtgagcgtccacgtgtccccagtggaggggctgtgcctggctgggggcggagggctggcccagcaggtgctggtgcctgcgggctctgcccggcctgttgccttctctgtggtgcccacggcagccgccgctgtgtctctgaaggtggtggctcgagggtccttcgaattccctgtgggagatgcggtgtccaaggttctgcagattgagaaggaaggggccatccatagagaggagctggtctatgaactcaaccccttggaccaccgaggccggaccttggaaatacctggcaactctgatcccaatatgatccctgatggggactttaacagctacgtcagggttacagcctcagatccattggacactttaggctctgagggggccttgtcaccaggaggcgtggcctccctcttgaggcttcctcgaggctgtggggagcaaaccatgatctacttggctccgacactggctgcttcccgctacctggacaagacagagcagtggagcacactgcctcccgagaccaaggaccacgccgtggatctgatccagaaaggctacatgcggatccagcagtttcggaaggcggatggttcctatgcggcttggttgtcacgggacagcagcacctggctcacagcctttgtgttgaaggtcctgagtttggcccaggagcaggtaggaggctcgcctgagaaactgcaggagacatctaactggcttctgtcccagcagcaggctgacggctcgttccaggacccctgtccagtgttagacaggagcatgcaggggggtttggtgggcaatgatgagactgtggcactcacagcctttgtgaccatcgcccttcatcatgggctggccgtcttccaggatgagggtgcagagccattgaagcagagagtggaagcctccatctcaaaggcaaactcatttttgggggagaaagcaagtgctgggctcctgggtgcccacgcagctgccatcacggcctatgccctgtcactgaccaaggcgcctgtggacctgctcggtgttgcccacaacaacctcatggcaatggcccaggagactggagataacctgtactggggctcagtcactggttctcagagcaatgccgtgtcgcccaccccggctcctcgcaacccatccgaccccatgccccaggccccagccctgtggattgaaaccacagcctacgccctgctgcacctcctgcttcacgagggcaaagcagagatggcagaccaggcttcggcctggctcacccgtcagggcagcttccaagggggattccgcagtacccaagacacggtgattgccctggatgccctgtctgcctactggattgcctcccacaccactgaggagaggggtctcaatgtgactctcagctccacaggccggaatgggttcaagtcccacgcgctgcagctgaacaaccgccagattcgcggcctggaggaggagctgcagttttccttgggcagcaagatcaatgtgaaggtgggaggaaacagcaaaggaaccctgaaggtccttcgtacctacaatgtcctggacatgaagaacacgacctgccaggacctacagatagaagtgacagtcaaaggccacgtcgagtacacgatggaagcaaacgaggactatgagtacgatgagcttccagccaaggatgacccagatgcccctctgcagcccgtgacacccctgcagctgtttgagggtcggaggaaccgccgcaggagggaggcgcccaaggtggtggaggagcaggagtccagggtgcactacaccgtgtgcatctggcggaacggcaaggtggggctgtctggcatggccatcgcggacgtcaccctcctgagtggattccacgccctgcgtgctgacctggagaagctgacctccctctctgaccgttacgtgagtcactttgagaccgaggggccccacgtcctgctgtattttgactcggtccccacctcccgggagtgcgtgggctttgaggctgtgcaggaagtgccggtggggctggtgcagccggccagcgcaaccctgtacgactactacaaccccgagcgcagatgttctgtgttttacggggcaccaagtaagagcagactcttggccaccttgtgttctgctgaagtctgccagtgtgctgaggggaagtgccctcgccagcgtcgcgccctggagcggggtctgcaggacgaggatggctacaggatgaagtttgcctgctactacccccgtgtggagtacggcttccaggttaaggttctccgagaagacagcagagctgctttccgcctctttgagaccaagatcacccaagtcctgcacttcaccaaggatgtcaaggccgctgctaatcagatgcgcaacttcctggttcgagcctcctgccgccttcgcttggaacctgggaaagaatatttgatcatgggtctggatggggccacctatgacctcgagggacacccccagtacctgctggactcgaatagctggatcgaggagatgccctctgaacgcctgtgccggagcacccgccagcgggcagcctgtgcccagctcaacgacttcctccaggagtatggcactcaggggtgccaggtgtga

SEQ ID NO: 18810 - DNA, 1466 bp, Homo sapiens
  SIMILAR (144)..(749): 551254mologous to Homo sapiens uracil DNA glycosylase,accession number X53778,Smith-Waterman Score=413.
tgcccagatcagcccccagagcagcctcatggctggaggatccaagagaggttagatccgtctgtctgtctgctcctcctgttcgacagtcagccgcaatcttcttttgcgtcgccagccgagccacatcgctcagaacacctatggggaaggtgaaggtcggagtcaacggatttggtcgtattgggcacctggtcaccagggctgcttttaactctggtaaagtggatattgttgccatcaatgaccccttcattgacctcaactacatggtttacatgttccaatatgattccacccatggcaaattccatggcacccgtcaaggctgagaacgggaagcttgtcatcaatggaaatcccatcaccatcttccaggaagcgagatccctccaaaatcaagtggggcgaatgctggcgctgagtaccgtcgtggaagtccactggcgtcttcaaccaaccatggagaaaggctggggctcatttgcaaggggggagccaaaagggtcatcaatctctgccccctctggctgaatgccccccatgttcgtcatggggtgtgaaccatgaagaagtatgacaaacagccttcaagatcatcagcaatggcctcctgcaccaaccaactggcttagcaacccctggccaaaggttaattccatgacaactttgggtaatcgtgggaaggactcatgaccacagttccatggccatcactgggcaacccaagaaagactgtggattggcccctcccggggaaaactgtgggccgtggatgggccgcgggggcttttccagaaacatattcctttgcctctactgggcgctgccaagggctgtgggcaagggtcatccctgagcttgaacgggaaagctcactggcaatggcctttccggtgtccccaactgccaacgttgtcagtgggtggaccctgacctgccgttttagaaaaaacctgcccaaatatcgatgacatcaaggaagggtggtgaaagcaggcgttcggaggggccccctcaaagggcatccctgggttacaactgagccaccaggtggtcctcctctgacttcaacagcgacaccccactccttccacccttttgacgctggggcttggcattgcccctcaacgaccactttgtcaagcttcatttcctggtatgacaacgaatttggctacagcaacagggtggtggacctcattggcccacatggcctccaaggaagtaagaccccttggaccaccgagccccaagcaagaagcaaaaaaggaaaagagagaccctcactgctggggagtccctgccacactcagacccccaccacactgaatctcccctcctcacagttgccatgtagaccccttgaagaggggaggggcctatgggagccgcaccttgtcatgtatccatctaataaagtatccctgtgctcaaccaaaaaaaaaaaaaaaaaaaaaaaaccc

SEQ ID NO: 18811 - DNA, 364 bp, Homo sapiens
  SIMILAR (3)..(314): 1001254mologous to Homo sapiens interferon-inducible protein,accession number X84958,Smith-Waterman Score=541.
ggtccaccgtgatcaacatccacagcgagacctccgtgcccgaccatgtcgtctggtccctgttcaacaccctcttcttgaactggtgctgtctgggcttcatagcattcgcctactccgtgaagtctagggacaggaagatggttggcgacgtgaccggggcccaggcctatgcctccaccgccaagtgcctgaacatctgggccctgattctgggcatcctcatgaccattggattcatcctgttactggtattcggctctgtgacagtctaccatattatgttacagataatacaggaaaaacggggttactagtagccgcccatagcctgcaacctttgcactccactgtgcaatgctgg

SEQ ID NO: 18812 - DNA, 696 bp, Homo sapiens
  SIMILAR (94)..(504): 471254mologous to Homo sapiens 1-8U,accession number X57352,Smith-Waterman Score=188.
gggggggaaagggagggctcactgagaaccatcccagtaacccgaccgccgctggtcttcgctcggacaccatgaatcacactgtccaaaccattcttctctcctgtcaacagtggccagcccccccaactatgaggatgctcaaggtaggtagtcacgtaggtggctgtgctgggggcgccccacaaccctggctcccccgacgtccaccgtgaatccacatccgtcagtcgagacctccgtggcccgaccatgtcgtctggtcccgtgttcaacaccctcttcaatgaacccctgcatgccgtgggcttcatagcattcgcctactccgtgaagtctaggggacagggaagatggttgggcgacgttgaccggggcccaaggcctaatgcctccacccgccaaagtgcctgaaacaatctggggccctgatttctggggcatcctcaatgaccatttttgttcatcgtcatccccagtggctgatctttccaggcctatggaatagatcaaggaaggcatcactggaggccaggagctctgcccattgaacctgtatcccacggttacttccaactttccattcctcggcctgccccccggagcccgaagtcctgtatcagcccttatatcctcacacgcttttctacaatggcattcaataaaagtgcacgtgtttctggtaaaaaaaaaaaa

SEQ ID NO: 18813 - DNA, 1016 bp, Homo sapiens
  SIMILAR (340)..(522): 551254mologous to Homo sapiens longest open reading frame,accession number X02490,Smith-Waterman Score=138.
gagactcccaacacaggggaagtctccaggacctccacaccattaacaagatgagccttgtgctcccttgggctctagagaggaagcccctctgagccctcagcccctctttcctccctctcctaaagtaatttgatcctcaggaatttgttctgccctcatctggccctggccagctctgcatttgacaaatgccaggaagaggaaactgttgagaaaacggaactactggcggaaaggcgagggctcactgagaaccatcccggtaacccgatcaccgctggtcaccatgaaccacattgtgcaaaccttctctcctgtcaacagcggcccaggcttcccaactacgagatgctcaaggaggagcaggaagtggctatgctgggggcgccccaaaaaccgtgcttacccgaatgtccacctgtgatccactatccgcaggcgagacctccgtggcctgaccatgttcgtctgggtccctgtttcaacaaccctcttcaatgaacaacctgctgccctgggctttcattaggcatttcggcttacttccgtggaagttttagggggacagggaagatggtttggcgacgttgaaccggggccccaaggcctaatgcctcccaccgcccaagtggccccctgaacatctggggcccctgattttttgggcagtcttcatgaaccaattcttgctcatcaatcatccccccccaagtgttgggtcgtcccaggcccagcgatagatcaggaaggcatcattgaggcccaggagcttctgcccgtgacctgtaatcccacgtactctaatcttccattccttcgcccttgcccccagaggccagggagctcttgccctttgacctgtattccacttactccaccttccattcctcgccctgtccccacagccgagtcctgcatcagccctttatcctcacacgcttttctacaatggcattcaataaagtgtatatgtttctggtaaaaaaaaaaaaaaaaaaaaaaaaaaaagtttt

SEQ ID NO: 18814 - DNA, 1462 bp, Homo sapiens
  SIMILAR (243)..(596): 541254mologous to Bos taurus glyceraldehyde 3-phosphate dehydrogenase,accession number AJ000039,Smith-Waterman Score=235.
  misc_feature (1)...(1462): n = a,t,c or g
cccatcgaccgcctgcaggaattcggcacgaggcctgttcgacagtcagccgcatgcttcgttttgcgtcgccagccgagcgcacatcgctcagacattcatggggaaggttaagtgtcggagtcaacggatttggtcagtattgggcgcctggtcaccagggcatgcttttaactctggtaaagtggatattgttgccatcaatgaccccttcattgacctcaactacatggtttacatgtttccaatatgattccacccatggcaaattccatggcaccgtcaaggctgagaacgggaagcttgtcatcaatggaaatcccatcaccatcttccaggagccgagatccctccaaaatcaagtggggcgatgctgggcgctgaagtacgtcgtggagtcccactgggcgtcttcaccaccatggagaaaggctgggggctcattttgcagggggggagccaaaagggtcattcatctcttgccccctcttgcttgatgccccccatgtttcgtcatgggtgtgaacccatgaaaaagatgacaacagccctcaagatcatcagcaatggcctcctgcaccaccaacttgcttagcacccctggcttctactggcgctgccaagggctgtgggcaaggtcatcctgaagcttgaaccgggaaagcttcactgggcatggcccttccggtgtcccccactgnccaacgtggtcagtgggtggaccctggccctgcccgtcttagaaaaaccctgccaaaatatgatgaccatcaagaaaggtggtgaagccaggcgttcggagggcccccttcaagggcattcctggggctaccacttgagccaccagggtggtcttccttcttgactttcaaccagcggacaccccaactccttccaccttttgacggcttgggggcatggcaatttgcccttcaaacgacccacttttttcaagcttcattttccttggtatgaccaacggaatttgggctacagcaaacaagggtggtggaccttcatgggcccacattgggctttccaagggagttaaggacccttgggaccaccaggccccagcaagaagcacaagagggaaggagagagaccctcacttgctgggggagttcctgccacactcagtcccccaccacactgaaatctcccctcctcacagtttgccatgtagacccctgaaagaggggaaggggctagggaaacagcaccttgtcaatgtaccaatcaataaatgtaccctgtgctcacccaccaagagaaaaaacctagacaaaaatgaaagccaaaaggggggggcccttttaaaagaacccttggggggcccaaacttaacccggccttccaacggaaaagttttttccttatagggggccgaataaaaacctacctgggaatttttggaaaggacccttactttgggggggggacaaaatgggccaaccaacct

SEQ ID NO: 18815 - DNA, 399 bp, Homo sapiens; identical to SEQ ID NO: 55
  SIMILAR (351)..(103): 441254mologous to Mycobacterium avium Gsa protein,accession number AJ251811,Smith-Waterman Score=118.

SEQ ID NO: 18816 - DNA, 304 bp, Homo sapiens
  SIMILAR (68)..(3): 811254mologous to Homo sapiens Human secreted protein, SEQ ID NO: 7678,accession number G03597,Smith-Waterman Score=83.
atgaagccgcggaccctcgcggtgagtgttacagctcttaaggtggcgcgtctggagttgtttgttccatcccggtgggctcgtggtcttgctgggctcaggagtgaagctgcagatcttcgcgcccttgggtggtcgatgggactgggcgccgtggagcagggggtggtgctcgtcggggaggctcgggccgcacaggagcccatggagtgggtgggaggctcaggcatggcgggctgcaggtccccagccctgccccgcgggaaggcagctaaggcccggcgagaaatcgagctcagcgccg

SEQ ID NO: 18817 - DNA, 369 bp, Homo sapiens
  SIMILAR (240)..(335): 531254mologous to Volvox carteri f. nagariensis hydroxyproline-rich glycoprotein DZ-HRGP,accession number AJ242540,Smith-Waterman Score=90.
ctcctggtgagaggtgacagcgtgctggcagtcctcacagcccccgctccctctcggagcctcttctgcctgggctcccactttggcggcacttgaggagcccttcagtccaccactgcactgtgggagcccctttctgggctggccaaggccggagcccactccctcagcggcgctgcgctctatttctcgccgggccttagctgccttcccgcggggcagggcttgggatctgcaggccgccatgcctgagcctcccaccccctccgtgggctcctttgctgcccgagcctcctcgacgagcgccaccccctgctccacggcgcccagtcccatcgaccacccaagggctgaggagtgcaggcgcat

SEQ ID NO: 18818 - DNA, 375 bp, Homo sapiens
  SIMILAR (71)..(289): 361254mologous to Mycobacterium avium subsp. paratuberculosis fibronectin-attachment protein FAP-P,accession number AY007557,Smith-Waterman Score=102.
tgcaagctccgcctcctggtgaggggtgacagcgtgctggcagtcctcacagccctggctcgctctcggcgcctcctctgcctgggctcccactttggcggcacttgaggagcccttcagcccaccgctgcactgtgggagcccctttctgggctggccaaggccggagcccactccctcagccgctccatgggctcctgtgcggcctgagcctccccgacgagtgccaccccctgctccagggcacccagtcccatctaccacccaagggctgaggagtgcgagcacacggcgggggactgggggactagcaggcagctccacctgcagccccggtgcgggatccactgggtgaagccagctgggctcctgagt

SEQ ID NO: 18819 - DNA, 373 bp, Homo sapiens
  SIMILAR (49)..(210): 401254mologous to Homo sapiens dynamin,accession number L07809,Smith-Waterman Score=92.
cggctgctccgagtgcggggcccgccaagcccacgcccacccggaactccagctggccggcaagcgcggcacacagccccggttcccgctcgcgcctctccctccacacctccccgcaagctgaaggagagggctccggccttggccagcccagaaaggggctcccacagtgcagcggagggctgaagggctcctcaagtgccgccaaagtaggagcccaggcagaggaggcggggagagcaagcgagggctgtgaggactgccagcacgctgtcacctctcggttttactttattttaggataaaatatctattgtgaattttaaaaacatgtaaaataaaattttaattaaaaagcctaaaaaaaaaaaaa

SEQ ID NO: 18820 - DNA, 1387 bp, Homo sapiens
  SIMILAR (14)..(661): 891254mologous to Homo sapiens p40,accession number U93570,Smith-Waterman Score=974.
gatcacaactccctcaccagcaacagaacaaaactggatggagaatgagtttgacgagctgacagaagtaggcttcagaagatgggtaataaactctgagctacaggaggacattcaaaccaaaggcaaagaagttgaaaactttgaaaaaaatttagaagaatgtataactagaataaccaatacagagaagtgcttaaaggagctgatggagctgaaaaccaaggctcgagaactacgtgaagaatgcagaagcctcaggagccgatgcgatcaactggaagaaagggtatcagtgatggaagatgaaatgaatgaaatgaagcatgaagagaagtttagagaaaaaagaataaaaagaaatgaacaaagcctccaagaaatatgggactatgtgaaaagacaaaatctacgtctaattggtgtacctgaaagtgacggggagaatggaaccaagttggaaaacactctgcaggatattatccaggagaacttccccaatctagcaaggcaggccaacattcaaattcaggaaatacagagaacaccacaaagataccccttgagaagagcaactccaagacacataattgtcagattcaccaaaattgaaatgaagaaaaaaatgttaagggcagccagagagaaagcctccccgacgagcgccaccccctgctccacggcgcccagtcccatcgaccgggaaggaacaaacaacccaagggctgaggagtgcgggcgcacggcaccgggactggcaggcagctccatctatctgcagccccggtgcgggacccactaggtgaagccagctgggctcctgagtctggtggggacgtggagagtctttatatctaagctcagggattgtaaatataccaatcagcaccctgtgtttagctcaaggtttctcaaggtttgtgagtgcaccagtcaacactctgtatctagctgctctggtgagggcgtggagagtctttatgtctagctcaaggattgtaaatacaccaatcagcactctgtgtctagctcaaggattgtaaatacaccaatcggcactctgtatctagctcaaggtttgtaaacacaccaatcagcaccctgtgtttagctcaaggtttgtgagtgcaccagtcgacactctgtatctagctgccctgatggggacgtggagaacctttgtatctagctcagggattgtaaacgcaccaatcagcgccctgacgaaacaggccactcggctctaccaatcagcaggatgtaggtggggccagataagagaataaaagcgggctgcccgagccagcattggcaacccgctcgggtccccttccacactgtggaagctttgttctttcgctctttgcaataaatcttgctactgctc

SEQ ID NO: 18821 - DNA, 2439 bp, Homo sapiens
  SIMILAR (2255)..(2380): 711254mologous to Homo sapiens Human secreted protein, SEQ ID NO: 7678,accession number G03597,Smith-Waterman Score=147.
gcagagtcggccgtgtggaagaccggagttttattattattcaaatcagtctctctgaaaactcagggattgaggtttttaaggataacttggtgagtagagggccagtaagtcgggagtgctgattgttcgggtccaagataaaatcttagggagctgaagctgtcctcttgagctgagtccattcctgggtgggggccacaagaccagatgggccaatttatctatttgggtggtgccagctgatccactgaatacagggtctgtaaaagatgttaagcactcatcttaggttatcacaggagcaatttaaggaggttcagaatcccgccacctccagctgcattactcctacaccataatttctaatctcatggcaaatttgttagtcctacaaaggcagtctgatcctcaggcaggcagggactttgttttggaaaagagttgttattgtctttgtttcaaagttaaaccattgtgaaccccaaatatctgagacaggtctcagtcgatttaggaagtttattttgccaaagttaaggatgtgtgcccgtgacacagcctcaggaagtcctgacgacatgtgcccaaggtggtcgggcacagcttggttttatacattttagggagacatgggacatcaatcagtatatgtaaggtatacattggttccatccagaaaggtgggacaactcgaagcagggaggggacttctgggtcataggtagataagaggcaaacggttgcattcttttgagtttctgattggcctttccaaaggaggcaggcagagacgcatctatctcagtgagcagaggtggctttgagttctgtcatttgtccacaaggaatttccttgtgagggaggtatgtagctttttaatcgtagtagctatcttttttaggaatagaatgggaggcaggtttgccctaagcagttcccagcttgactttctgctttggcttagtgattttggggccccaagatttattttcctttcacactgtaaactaagttcctcccaaagtaggttgagcctacgcccggggatgaacaaggacagcttggagattagaagcaagatggagtcggttaggttagttgtcctttcacggtcataattttctgttataatttttgcagaggcggtttcagcaccacggcggtcatggccagagcaaaaagtatgtttttgatgttgaaaggaaaggctggacctgactttggtatcagatttactgccagttccgggtggtttacatgatttgaggatcgttatgcattacataatgttaacatgaatgctgagtctgtgggtgctgatgtgaaggcagctgaagagttttggaagcttgattatggaggagatttacttgcccacgcaattcttcaatatggaggaaccctcgctattctggaaacagatgcctgaaagaacttttgtaatctgccccaaggggtttttccctgaccactgcaacaaagaaagaccatggcatttttgtaagagaaagagtttaacagacacaagggtggccacgccatgtgggagactgagttgagaggtgacagcgtgcttgctggcagtcctcacagccctcgctcgctctcagtgcctcctctgcctgggctcccactttggtggcatttgaggagcccttcagcctcccccctgcactgtgggagcccctttctgggctggccaaggctggagcccactcccttagcttgcagggaggtgtggagggagagacgcgagcgggaaccggggctgtgtgccgtgcttgtgagccagctggagttccgggtgggcgtgggcttggtgggccccacactcggagcacgccagccagccctgctggccccaggcaatgggggacttagcacccgggccagtggctgcggagggtgtactgagtcccccagcagtgctggcccaccggcgctgcgctcgatttcttgccagggccttagctgccttcccacggggcagggctcgggacctgcagcccgccatgcctgagcctcccacccactccaagggctcctgtgcggcccgagcctcctcgacgagcaccaccccctgctccacggcgcccagtcccattcgaccacccaagggctgaggaatgcaagcgcatggcacaagactggcaggcagctccacctgcagccccagtgcaggatccactaggtgaagccagctgggctcctgagttctttgggtccacgctgcttttatgagctgtaatactcactgcgaagatctgcagcttcactcctgagcccagcaagaccacgagcccaccgggaggaacaaacaactccagacgtgctaccttaagagctgtaacactcaccgtgaaggtctgcagcttcactccgtgagggtctgcggcttcattcttgaagtcagtgagaccaagaacccaccaatt

SEQ ID NO: 18822 - DNA, 425 bp, Homo sapiens
  SIMILAR (160)..(354): 981254mologous to Homo sapiens Human gene 71-encoded protein fragment, SEQ ID NO:434,accession number Y86519,Smith-Waterman Score=356.
gagaacgcagcaagcccaggcggcggtggtaaggctggaggacacacctaaacatgtggaatcccaatgccgtgatagtagacaagaagatgcagaagaaaatgaagaaagctcataaaaagatgcacaagcaccaaaagcaccacaagtaccacaagcatggcaagcattcctcctcttcctcctcctcttccagcagtgattctgactgaatacaggccctggacccttccctcaagtctcaccagttctgctctcccatcaagcttcagatgccatgttgtactgggggaatgtagcccttgtgctccccaccccctacctccacctgagcctcaccctgctgttgagccctgagtggctaggggaaatgggaagaggattgccatggcctggccatcttgttgctgcttggttagatcatt

SEQ ID NO: 18823 - DNA, 627 bp, Homo sapiens
  SIMILAR (316)..(624): 991254mologous to Homo sapiens uncharacterized bone marrow protein BM041,accession number AF217517,Smith-Waterman Score=589.
atggatattaatatcattgagacagatgcagaaaaatcatttgataaagttaaacatctatttatgattaaacaattaaaagtagaaggaaacttctttaatacaataatgtatactttcaaaaatgctacggtccccacaggagttagcaagacttcctggaggacagaggcaactgaccaggtggtaacaaaggtggccactctggaccattgctttggtgttggtgctttggagagtcaagtctggaccctagtcctgaagagttccatcaccatcaccactgtggagccttgggtcaccctcaatatggcaggagctccccatggcaatccagctttccccccaggtgggccccctcatcctgtgccacagccagggtatccaggatgccaaccgttgggtccctaccctcctccatacccaccgcctgcccctggaatccctcctgtgaatcccttggctcctggcatggttggaccagcagtgatagtggacaagaagatgcagaagaaaatgaagaaagctcataaaaagatgcacaagcaccaaaagcaccacaagtaccacaagcatgacaagcattcctcctcttcctcctcctcttccagcagtgattctgactga

SEQ ID NO: 18824 - DNA, 966 bp, Homo sapiens
  SIMILAR (104)..(526): 551254mologous to Homo sapiens uncharacterized bone marrow protein BM041,accession number AF217517,Smith-Waterman Score=400.
ctgcgaaccgctccgaatttcgggtcgacccacgcgtccgggagaacgcagcaagcccaggcggcggctggaaaggtgatggggctggaggacacacctaaacatgtggaatcccaatgccgggcagccagggccaaatccatatccccccaatattgggtgccctggaggttccaatcctgcccacccaccacctattaatccaccctttcccccaggcccctgtcctcctcccccaggagcatccgcatggcaatccagctttccccaccaggagggccccctcatcctgtgccacagccaagggtatccagggatgccaaccgttgggtccctaccctcctccatacccaccgcctgcccctgggaatccctcctgtgaatcccttggctcctggcaatggttgggaccaagcagttgataagtagacaagaagattgcagaagaaaattgaagaaagcttcataaaaaagatgccacaaagcacccaaaagcaccacaagttaccacaagcatggcaagcatttcctcctctttcctcctccttctttccaggcagtgatttctggactggaatacagggccctggacccttccctcaagtctcaccagttctgctctcccatcaagcttcagatgccatgttgtactgggggaatgtagcccttgtgctccccaccccctacctccacctgagcctcaccctgctgttgagccctgaagtggctaaggggaaatggggaagaggattgccatggcctgggcatcttgtttgctgcttggttagatcatatagcttaatgaatttagggcaggggagctattttttgaagatgatgaactaaatgtttgaaggacaagttttgagatctggtaaaatgtgattttttacttccacttataatacttggtgattggggaggtttgtggaaattccattatgatggaaaacctatcctttttgt

SEQ ID NO: 18825 - DNA, 409 bp, Homo sapiens
  SIMILAR (32)..(409): 711254mologous to Homo sapiens Rch1,accession number U09559,Smith-Waterman Score=414.
aacagactcaggttgtgattgatgcaggacactcgccgtctttcccagcctgctcaccaaccccaaaactaacattcagaaggaagctacgtggacaatgtcaaacatcacagccagccgccagaccagatacagcaagttgtgaatcatggattagtcccattccttgtcagcgatctctctaagattttgagacacaaaaggaagctgtatgggccgtggaacagttgaacagattgtgtaccttgttcactgtggcataatagaaccgttgatgaacctcttacctgcaaaagataccaagattattctggttatcctggatgccatttcaaatatctttcaggctgctgagaaactaggtgaaactgagaaacttagtataatgattgaagaatgtggaggcgta

SEQ ID NO: 18826 - DNA, 640 bp, Homo sapiens
  SIMILAR (330)..(100): 871254mologous to Homo sapiens PRO2281,accession number AF119874,Smith-Waterman Score=329.
  misc_feature (1)...(640): n = a,t,c or g
gaatgtggagccgtagccaaaattgagcctctccaaacccatgaaaatgagtctgtatataagcctccataagcttanctgagaagtatttctctgtagagagatgaagtgtgncagctgcttcaggtatgagtccttggaccacatggcttgggtgaccatctgggccaattccatagctgccagagcagagctgagccacccattgctggagaggacatccacgcaggcctggacgagccggactgccttactaaggatttcctccgtatctgactgcaactcagcactcagctgcatgcgggacaggaagaggaagatcaaaacgttgtgccagaaactacctctgaaggctacactttccaagttcaggatggggctcctgggacctttaacttttagatcatgtagctgaggcataaatttgttgtgtactatgtttggtattttgtcttattgtttctctactaagaactctttcttaaatgtggtttgttattgtagcactttttacactgaaactatacttgaacagttccaactgtacatactgtatgaagcttgtcctctgactaggtttctaatttctatgtggaatttcctatcttgcagcatcctgtaaataaacattcaagtccaa

SEQ ID NO: 18827 - DNA, 865 bp, Homo sapiens
  SIMILAR (464)..(769): 781254mologous to Homo sapiens Rch1,accession number U09559,Smith-Waterman Score=374.
aaagttcttaccatatctactctgagactgactatcacccaattagaaaacaacatcccttcatcctttcttcatcccaaccgggcatcacatagggcaaactggatcaaggcagttcagatgtgtagcaaactcagagaatttgcattggctttagccattttggagtgtgcagttaaaccagttgtgatgctaccaatatggcgagaatctttaggacataccagctttctccctttgtctcataaccatgtccaccaatgagaatgctaatacacaagctgcccatcttcacagatctaagaacaagggaaaggacagtacagaaacgaggcgtcacagaatagaggtcaatgtggagctgaggaaagctaagaaggatgaccagatgctgaagaggagaaatgtaagctcatttcctgatgatgctacttctccgctgcaggaaaactgcaacaaccagacttctgccctaagagccatagggaatatcgtcactggtacagatgaacagactcaggttgtgattgatgcaggagcactcgccgtctttcccagcctgctcaccaaccccaaaactaacattcagaaggaagctacgtggacaatgtcaaacatcacagccagccgccaggaccagatacagcaagttgtgaatcatggattagtcccattccttgtcagcgatctctctaaggctgctgagaaactaggtgaaactgagaaacttagtataatgattgaagaatgtggaggcgtagacaaaattgaagctctacaaaaccatgaaaatgagtctgtatataaggcttcattaagcttaactgagaagtatttctctgtagaggtgagtaatggatggtaa

SEQ ID NO: 18828 - DNA, 2161 bp, Homo sapiens
  SIMILAR (318)..(1592): 521254mologous to Homo sapiens Rch1,accession number U09559,Smith-Waterman Score=822.
gggtacggctgcgagaagacgacagaagggggggaaatttaaatcgcgccggccggctgcacgagccacacggtctttgagctgagtcgaggtggacccgtttgaacgcagtcggccctacagccgctgattccccccgcatcgccctccccgtggaaggcccaggcccgctttggagctttctccctttgtctcataaccatgtccaccaacgagaatgctaatacaccagcatgcccagtcgttcacagattcaagaacaagggaaaagacagtacagaaatgaggccgtcgcagaatagaggtcaatgtggagcttgaggaaagctaagaaggatgaccagatgctgaagagggagagattgtaagctcatttcctsgatgatgctacttctccgctgcaggaaaacccgcaacaaccaagggcactgttaaattggtctgttgatgacattgtcaaaaggcataaatagcagcaaatgtggaaaatcagctccaagctactcaagctgccagggaaactactttccagagaaaaacagccccccatagacaacataatccgggctggtttgattccgaaatttgtgtccttcttgggcagaactcgattgtagtccccattcagtttgaatctgcttgggcactcactaacattgcttctggggacatcaggacaaaccaaggctgtggtagatggaggtgccatcccagcattcattttctctggttgggcatcttcccatgctcacatcagtgaacaagctgtctgggctctaggaaacattgcaggtgatggctcagtgttccgagacttggttattaagtacggtgcagttgacccacatgttggctctccttgcaagttcctgataatgtcaatctttagcatgtggctacttacggtaatcttaccctggacactttctaatctttgcccgcaacaagaatcctgcaccccccgatagatgctgttgagcagattcttcctacctttagttcggctcctgcatcatgatgatccaggaagtgttaggcaggataccctgctggggctattttcctaccttacttgatgggtccaaatggaacggaattgggcatgggtgggttgaaaacagggagttgtgccccaacttgtgaagcttctaggagcttctgaaattgccaattgtgactcctgcccctaaagagcccataggggaataattggcacctgggtacagatgaacagactcaggttgtggatttgatgcaggagcactcgccgttctttcccagcctgctcaccaaccccaaaactaacattcagaaaggaagctacgtggacaatgtcaaacatcacagccggccgccagggaccagatacagcaagtttgtgaaatcatggattagtcccctttcctttgtcagtgtttctctctaaggcagattttaagacacaaaaggaagcctgtgtgggccgtgaccaactataccagtggtggaaccagttgaacagaattggtgtaccttgttccactgtggccataatagaaccgttgatgaacctcttttactgcaaaaggttacccaggattatcctgctaatcctggatgccaatttcaaaatatctttccagcctgctgagaacctagttgcaccttgagaaacctagtatcaatcttgaagtaatgtggaggccttaggccaaaattgaaggctctaccaaaacccatgaaaatggagtctgtgtataaggcctccgttaaagcttaattcgagaagtatttcccctgtagagggaaagagggaaggatcaaaacggtggtacccagaaactaccctctgaaggctacactttcccaagttccaggatggggccccctgggaccttttaactttttagatcaagtagcttaagacataaatttgttgtgttactacggtttggtattttgtcttattgtttctctactaagaactcttttcttaaatgtggtttgttactgtagcactttttacactggaactatacttgaacagttccaactggacatacatactgtatgaacgcttgtcctctgactagggtttctaatttctatgtggaatttcctatcttgcagcatcctgtaaataaacatctcaagtccacccttttcttgacttcaaaaaaaa

SEQ ID NO: 18829 - DNA, 427 bp, Homo sapiens
  SIMILAR (119)..(250): 771254mologous to Homo sapiens argininosuccinate synthase (citrulline-aspartate ligase); 84Similarity to P09034 (NID:g114291),accession number AC003989,Smith-Waterman Score=171.
gaaggtgaccaacgtcaaggatggcaccacccaccgagacctccttggagctcttcatgtacctgaacgaagtcgcgggcaagcatggcgtgggccgtattgacatcgtggagaaccgcttcattggaatgaagtcccgagcatgaacgtgcagggtgattatgagccaactgatgccaccgggttcatcaacatcaattccctcaggctgaaggaatatcatcgtttccagagcaaggtcactgtcaaatagacccgtgtacaatgaggagctggagcctcctcaagttgcagatccctcattaactggcgctgatatgagtggatgttaggagtgatcgttgggttattaagggtatacttgcgatttgatataaattttgagtaattgatttattggcgtctgtttactaaaagttgttgaatg

SEQ ID NO: 18830 - DNA, 891 bp, Homo sapiens
  SIMILAR (142)..(468): 501254mologous to Deinococcus radiodurans arginosuccinate synthase,accession number AE001924,Smith-Waterman Score=279.
atgcccagtgaaaaacgtgttcttgcagcagctcttgtggaagttgtccttgaaaaaactttggcccaagtggttcactgcactgttaagacagattccagatgccgggaactcgtgcctccaattccagatgctatgtccagcaaaggctctgtggttctggcctacagtggcggcctggacacctcctgcatcctcgtgttactgaaggaacaaggctatgacatcattgcctacgtggccaacactggccagaaggaagactttgaggaagccaggaagaaggcactgaagcttgggggcaaaaaggtgttcattgaggaagtcagcaaggagtttgtgaaggagttcatctggctggccatccagtccagcgcactgtatgaggaccactacctcctgggcacctctctcaccaggccctgcatcgcccgaaaacaagtggaaatcgcccagcaggagagggccaagatgcccaagttctacaacaggttcaaggtccgaaatgaccttatggaacacacaaagcaacacgggattcccatcccagtcactcccaagaacctgtggaacatggacgagaacctcatgcagatcagcaatgaggctggaatcttggagaaccctaagaaccaagcatttccaggagtccccatgaaagtgaccaacgtcaaggatggcaccacccaccagacctccttggagctcttcctgtacctgaacgaagacgtgggcaagtacagcttgggccgtattgacatcaaggagaaccacttcactggaatgaagtccccaggtatctatgagaccccagcagacaccatcgtttaccatgctcatttagacatcagggccttcaccatggaccgggaagtatgcaaaatcaaataa

SEQ ID NO: 18831 - DNA, 1158 bp, Homo sapiens
  SIMILAR (355)..(720): 841254mologous to Mus musculus argininosuccinate synthetase (EC 6.3.4.5),accession number M31690,Smith-Waterman Score=571.
atgtccagcaaaggctccatggttctggcctacagtggtggcctgaacacctcctgcatcctcgtgtggctgaaggaacaaggctatgatgtcactgcctacctggccaatactggccagaaggaagacttcgaggaagccaggaagaaggcactgaagcttggagccaaaaaggtgttcattgaggatgtcagcagggagtttgtggaggagttcatctgggcggccatccagtccagcgcactgtatgaggaccactacctcctgggtacttctctcaccaggccctgcatcgcccacaaaaaagtggaaaccgtccagcgggtgggggccaagtatgaaggtccctggagggctccctggaggatgcccgagttctacaactggttcaagggccgcagtgacctgatggaatatgcaaagcaacacgggattcccatcctggtcactcccaagaacctgtggagcatcgacaagaacctcatgcacatcagctacaaggctggaatcctggagaaccccaagaaccaagtgcctccaggtctctacacaaagatccaggacccagccaaagcccccaacacccctgacattctcaagatccaattcaaaaaaggggtccccgtgagggtgaccagcgtcaaggatggcaccacccaccagacctccttggagctcttcatgtacctgaacgaagttgcaggcaagcacggtgtgggcttattgccatcgtggagaacatcttcaccagacaaaggcccaagccctgagtgtgaatttgtccgcccctgcatcgccaagtcccaggagccggcagaagggaaagtgcaggtgccggtcctcaagggccaggtgtacatccttggctgggagtccccactgtctctctacaatgaggagctgatgagcgtgaacgtgcagggtgattatgagccgattgatgacaccgggttcatcaacatcaactccctcagactgaaggaataccattgtctccagagtctgctggagtttgctggatgtcgactccagacactgtttgcctgggtatcaccagcaggggctgcagaacagcaaagattgctgcctgttccttcctctggaaacttcatcccagaggggcacctgccagatgccagctggagctctcctgtatga

SEQ ID NO: 18832 - DNA, 996 bp, Homo sapiens
  SIMILAR (607)..(741): 1001254mologous to Homo sapiens argininosuccinate synthetase (aa 1-412),accession number X01630,Smith-Waterman Score=233.
atgtccagcaaaggctccgtggttctggcctacagtggcggcctggacacctcgtgcatcctcgtgtggctgaaggaacaaggctatgacgtcattgcctatctgggccaggcggtgaagggcaatcagctgttgcccgtctcactggtgaaaagaaaaaccacccctggcgcccaatacgcaaaccgcctctccccgcgcgttggccgattcattaatgcagctggcacgacaggtttcccgactggaaagcgggcagggaacgatcaggtccggtttgagctcagctgctactcactggccccccagataaaggaaatgggctctctgaaggtacgcaatgagcccaagaagttagcactgtgccaatgccagcaagcacccaactcccagcagatacccagtgcaagcttgctgaaccagtgctccggtgaagaaatgaacacttggactttcaaagacatgacagacccaagtcatgagctctcagtcagcggacagtatgccaagagcctggtacaggaattgactgtttaccaaccccacagtcagaaggctcggaaactccccagtgacggggagctcactacctcgcctgcccgggctggtatctacgagaccccagcaggcaccatcctttaccatgctcatttagacatcgaggccttcaccatggaccgggaagtgcgcaaaatcaaacaaggcctgggcttgaaatttgctgagctggtgtataccggtgcggaatgcaagctcctagtggcttcagtgcctgagccctggaggggccgtggaggtgtagaggagggaggaagggacatcaaggaggtacaggagcatgggagtgactctgcagagagttccacgcacccaccggcttcaaggcctggtgaaggttgcctcgcctgcatcttctgtggcaaatggagacacctcaacaccccactgagctgtgaacgttacccccgacatagccgggaccaccgtccacactga

SEQ ID NO: 18833 - DNA, 1087 bp, Homo sapiens
  SIMILAR (678)..(1043): 891254mologous to Homo sapiens argininosuccinate synthetase (aa 1-412),accession number X01630,Smith-Waterman Score=596.
cccagtgtaagttatcaggctaattcttgcatatagcagtaaacacatggagtttacagtgtaatgaaaaaggcaagcattaaacaggtgaattaaacagtgatgagtgctatgaaaaaaaggtgaatgtgttataggaatatggagtggaagatctaggttcatcaggcagaggagaaatcagggaaggcttccttgaggaagtgacaaccaagctgagacctgctctgtcgcctgccaccgctgctcgggcccgagtggttcactgcaccgtgaagacagattcctgacaccgggaactcacgcctccaatcccagacgctatgtccagcaaaggctccttggttctggcctacagtggtggcctgaacacctcctgcatcctcgtgtggctgaaggaacaaggctatgatgtcactgcctacctggccaatactggccagaaggaagacttcgaggaagccaggaagaaggcactgaagcttggagccaaaaaggtgttcattgaggatgtcagcagggagtttgtggaggagttcatctgggcggccatccagtccagcgcactgtatgaggaccactacctcctgggtacttctctcaccaggccctgcatcgcccacaaaaaagtggaaaccgtccagcgggtgggggccaagtatgaaggtccctggagggctccctggaggatgcccgagttctacaactggttcaagggccgcagtgacctgatggaatatgcaaagcaacacgggattcccatcctggtcactcccaagaacctgtggagcatcgacaagaacctcatgcacatcagctacaaggctggaatcctggagaaccccaagaaccaagtgcctccaggtctctacacaaagatccaggacccagccaaagcccccaacacccctgacattctcaagatccaattcaaaaaaggggtccccgtgagggtgaccagcgtcaaggatggcaccacccaccagacctccttggagctcttcatgtacctgaacgaagttgcaggcaagcacggtgtgggcttattgccatcgtggagaacatcttcaccagacaaaggcccaag

SEQ ID NO: 18834 - DNA, 2775 bp, Homo sapiens
  SIMILAR (114)..(920): 501254mologous to Homo sapiens argininosuccinate synthetase (aa 1-412),accession number X01630,Smith-Waterman Score=495.
  misc_feature (1)...(2775): n = a,t,c or g
cgagcccgagtggttcactgcactgtgaaaacagattccagacgccgggaactcacgcctccaatcccagacgctattgtccagcaaaggctccgtggttctggcctacatgtggcggcctggacacctcgtgcatcctcgtgtggctgaaggaacaaggctatgacgtcattgcctatctggccaacattggccagaaggaagacttcgaggaagccaggaagaaggcactgaagcttggggccaaaaaggtgttcattgaggatgtcagcagggagtttgtggagggagttcatctgggccggccatccaagtccaagcgcacttgtattgaggaccgctacctccctgggcacctctctttgccagggccctgcattcgcccgcaaacaagtgggaaattcgcccagcggaaggggggccaagtatgttgttcccacgggcgccacagggaaaggggaacgaacaagtcctggtttgagctcagcttgctactcacttggccccccagataaaggtcattgctcccttggaggaatgcctgaattctacaaccgggttcaagggccgcaatgacctgattggagtacggcaaagcaacattgggattcccaatcccggtcactcccaagaaccccgtggagcatggatgagaacctcatgcacattcagctacgaggctggaatcctggagaaccccaagaaccaagcgcctccaggtctctacacgaagaacccagggacccagccaaaagcccccaacaccccttgacattctcggagattcgagtttcaaaaaaggggtccctgtggaaggtggaccaacgttcaaggatgggcaccacccaccagacctttcttggagctctttcatgtacctgaacgaagtcgcggggcaagcatgggcgtagggccgtatttgacatcgtgggagaaccgctttcattgggaattgaagtcccagaggtatcttacggaggaccccaggcagggcaccattccttttaccatgctcatttagacatccgaggcctttcaccatgggaccggggaagttgcggcaaaatcaaacaagggcctggggcttggaaatttgctgagctcggtgtataccggttttcctgcacaagcccctgagtggtgaattttgtccgcccactggaatcgccaaagtccccaggaagccgagtggaaagggaaaagtgcaggttgtccgttccttcaaagggccccaggtgtacatccctcgggccgggaaatcccccactgtcttcttcttacaatgagggagctggtgaagcatggaacgtgcaagggtgattattggaggccaattgatggccaccggggttcatccaaacatcaaattcccttcaaggctgaagggaattatcatcgtcttcccagagcaaaggtcacctgccaaatagaccccgtgtacaatgaggagctggggcctcctcaattttcaggatccccccaagtaacaggcgctaattgttgtgataatttgtaattgttgacttgttctccccgggctgggcagcgtagtggcggctgcccaggcccaagcgtttgttccctgggtccccctgaagccttgcaaacgttggtcatcgaagggaaagggttggggggcagctgcaggtggggagctataaaaatgacaattaaaaggagacactagtcttttatttctannnnnnnnnnnnnnnnnnnnnnnnnnnnnnnnnnnnnnttaattatgggtttcttaggccaacctttgtgttttcggacctaagtgctgccgaaggccgccatttgccagacagcctgttaatccggctgtcgacccctctccagcaaaaactaggaatccagatgtgccgcctgggtccgatcctatccagcatcctgggaatctgtcaccaactgtggtcctgtggcaaatgtcaagaaaccaaataaaattcagggaatgccctttgggggcatcaacgcacagccctttctctggacatcacttttactcacagcccacagggagcttctatagagggtggccatgagtgaccctaggacacttaccacagctgcatggcctaaagccagcctaaatcatgaaggaggagggagaggcctgagcagagaggagaaaagagcaagcccggaacttggcagcatttctcattgtccacaaaccaggccctaaagcagccatgtttgtagtgtggccctggcccccccttggtcatatctgattggaccggggatggacacctgactcgagctggccaatcaaaacccgcaggaattgggcctcggcacgtggccgaagtgaggacatgtaacacaggcactcaccgctgggatgctgtggacctggggcacagagcaggtgtagaaggaaaggagagggaagagatgggaagagagggtcatggtattggcgtccatatttctgtactggtgcttcatgaaagctggtggcatctcttggcctggtttccctgacacctgaatatcataacgaattcaggactccagctcagtgagagagtttctgctccttgcaaccaaaagcatcttcactgggaagacttgagtgccgcttgctctgtgctttgccctggttctgaactcagaacctgacctcatgggatccgttcgccactccgctgcatgtgtacatgagggtttctcgcaaaagaagttttacctttaaaacttattttcctatgattattaatgtaagtggtaataataaatgactcaatattaaaaaaaaaaaaa

SEQ ID NO: 18835 - DNA, 1354 bp, Homo sapiens
  SIMILAR (25)..(546): 581254mologous to Homo sapiens dJ702J19.1 (glycine cleavage system protein H (aminomethyl carrier)),accession number AL033531,Smith-Waterman Score=450.
gggcgggcccgcacccctgcgaacatggcgctgcgagtggtgcggagcgtgcgggccctgctctgcagcctgcgcgcgctctgggcacccgccgtgccctgcctgccaaggccctggcagctgggggcgggcgccatctggacgctgctcacaggacccgttctgctctgggtgtgtaaattcacagagaagcatgaatggataacaacagaaaatggtattggaacagtgggaatcaataattttgcaaacgaagctttgggagatgttgtttactgtagtctgtctgaagttgggaccaaaatttgaaccaaaccaagctggagtttggtgcttttggaaaggtgtgaaagctgctagtgaactccttttctcctttatcgggggaggtacctgattttaatgaagctcttgccgaaaaatccagggccttgtaaccaaatctcgttatgaagatggtttggctgatcaagatggacactgagtaaccccttcagaacctagatgcaccttatgagtgaagaagcatatgagaaatacataaaaatctattgaggagtgaaaatggaactcctaaataaactagtatgaaataacgccagcccagcagagttgtcttaaattagtggtgggataggaagacttaggaataggaaacttttagtattacccgatggggggaaaaaaaaactaactgttaacactggctaatgaaagaaaaatgccctttaactttgctaatgaattatagataaatataaataggcgtctttttcacaaataatcctatgatttttagactaaggctctagtattcatgaaattatccatgaaattatccatgggtaaaaacctaagttataaaaattacataatttcaaaggataatgttggttattccttaagcccttatataaatattggtaacttggcatggtatccatacctgggatttggggatgaaatacttaaggatcttttccattggaaataactgggagtgaagaagtttttgttgcttgagcagtgtcagatgaggaacccactgtcttagttttgcggtacactggcattggctggtgctattgttagtacagggaagcaacagctttgcagcaaaataataaaatacttcttcgttaatcatgtttgttttgatgttaatatttcatttagtaactctgctagtatttgtgaaagtgctaactttaacttacggaaagttactttttaaaaggaaatttaagccagaacaatgcaaagctccaagaaaatgttttctttagtcacaaatctggtttttcttaagccaagatctgtcaccttttaacataataaaaaataaatcaccaac

SEQ ID NO: 18836 - DNA, 352 bp, Homo sapiens
  SIMILAR (9)..(80): 1001254mologous to Homo sapiens Human secreted protein, SEQ ID NO: 5257,accession number G01176,Smith-Waterman Score=123.
ggcacgagagagataaggcgcttcaggactaccgcaagaagttgcttgaacacaaggagatcgacggccgtcttaaggagtgtgagtgcacctttctttccatttaatcaagtgcctcgactcgcttctgcctctgacaaagcagaagcctttcgccgagcccggcaaccgagccttagagatgaccaggcctagggccagggacaaggcgctttgtcatccggccctgagcttgtggagcaacactccttcgggtgtagaaatggcccagtccagcccgggtgacagaacatcggcggccttgaggtgaaaatgaaaaagaagtagaggaggagtggggaagtgggccgag

SEQ ID NO: 18837 - DNA, 847 bp, Homo sapiens
  SIMILAR (296)..(574): 981254mologous to Homo sapiens proteasome subunit p42,accession number D78275,Smith-Waterman Score=478.
atggccattcccggcatcccctatgagagacggcttctcatcatggcggaccctagagataaggcgcttcaggactaccgcaagaagttgcttgaacacaaggagatcgacggccgtcttaaggagttaagggaacaattaaaagaacttaccaagcagtatgaaaagtctgaaaatgatctgaaggccctacagagtgttgggcagatcgtgggtgaagtgcttaaacagttaactgaagaaaaattcattgttaaagctaccaatgggaccaagatatgttgtgggttgtcgtcgacaggtgatagaattacctcttacaaacccagagttatttcagcgtgtaggaataatacctccaaaaggctgtttgttatatggaccaccaggtacgggaaaaacactcttggcacgagccgttgctagccagctggactgcaatttcttaaaggttgtatctagttctattgtagacaagtacattggtgaaagtgctcgtttgatcagagaaatgtttaattatgctagagatcatcaaccatgcatcatttttatggatgaaatagatgctattgatattgatttgccaaatgaacaagcaagattagacatactgaaaatccatgcaggtcccattacaaagcatggtgaaatagattatgaagcaattgtgaagctttcggatggctttaatggagcagatctgagaaatgtttgtactgaagcaggtatgttcgcaattcgtgctgatcatgattttgtagtacaggaagacttcatgaaagcagtcagaaaagtggctgattctaagaagctggagtctaaattggactacaaacctgtgtaa

SEQ ID NO: 18838 - DNA, 1723 bp, Homo sapiens
  SIMILAR (21)..(734): 571254mologous to Manduca sexta 26S proteasome regulatory ATPase subunit 10b (S10b),accession number AJ223384,Smith-Waterman Score=568.
ggcttctcatcatggcggaccctagagataaggcgcttcaggactaccgcaagaagttgctagaacacaaggagatcgacggccgtattaaggagttaagggaacaattaaaagaacttaccaagcagtatgaaaagtctgaaaatgatctgaaggccctacagagtgttcgggcagatcagtgggtgaagtgcttaaacagttaacctgaagaaaaattcattgttaaagctaccaatggaccaagatatgttgtgggttgtccgtcgacagctttgacaaaaagtaagcctgaagccagggaacaagagttgctttgggatatgactacactaactattcatggaggatattttgccgaggagaggtggatccactggtttataacatgtcttcatgaggaccctggggaatgtttcttattctgagattggagggctatccagaacagatccggggaatttaaggagaggtgataggattacctctttacaaaccccagagttattttcagcgtgtaggaataatacctcccaaaaggctgtttgttatatgggaccaccaggtaccgggaaaaacactccttggcacgagccgttgctagccagctggactgcaatttcttaaaggttgtatctagttctattgtagacaagtacattggtgaaagtgctcgtttgatcagagaaatgtttaattatgctagagatcatcaaccatgcatcatttttatgggatgaaatagatgctattggtggttcgtcggttttctgagggtacttcagctgacagagagattcagagaacgttaatggagttactgaatcaaatggatggatttgatactctgcatagagttaaaatgatcatggctacaaacagaccagatacactgggtccctgctttgctgcgtccaggaagattagatagaaaaatacatattgatttgccaaatgaacaagcaagattagacatactcgaaaatccatgcaggtcccattacaaaggcatggtgaaatagattttgaaagcaattgttgaagctttcggatgggctttaatggagcagatctgaagaaatgtttgtacttgaagccaggcatgctcgccaattcgtgctgatccatgattttgttagtacagggaagacttcattgaaagccagtcagaaaagtggcctgattcctaagaaagcctggagtcctaaaattgggactaccaaaccctgtgtgaatttacctgttaagatttttgaatggcctgccatgaccagatgttggccttattggtaaaaataaagtttaaagaaaataatggtatgtaattggtaatgatggtcattaaaaagtatatgaataaaaaatatgagtaacatccataaaaattagtaattccaacttttaaggataccagaagaaatttgtatgtttgttaaagttgccatttattgccagccaagttacaaaggggaaagtggttggagccttttccataattgcctgccgtgaccattttttggtaaaaataattggaaagtggtttgagatagtggtataagaaagcatttcttatgacttattttgtatccatttgttttcctccatctaaaaagttgaataaaatctgtttgattcagttctcctacatatatattcttgtcttttctgagtatatttactgtggtcctttaggttctttagcaagtaaactatttgataaccc

SEQ ID NO: 18839 - DNA, 425 bp, Homo sapiens
  SIMILAR (1)..(102): 971254mologous to Homo sapiens leucine carboxyl methyltransferase,accession number AF037601,Smith-Waterman Score= 167.
gtgaacatgcgtgatcggtttgggcagatcatgattgaaaacctgcggagacgccagtgtgaactggcgggagtggagacctgcaagtcattagagtcacaggatagaatcacttgaattcctggatgaaatgtgactctggagcagctcatgcgcattactgcctttgctgggcaaccaaaggaggaaatgagcttgggctgaaggagataacttattaatctgtcgaatgcttatgccgagccagaagccgaagccacttgccctcctggaggagacctgcaagctccctgagcggtgggcgggcctcgtccgcaggtctcatcccacactcttgagaagccttggtcactacagtggtcgcacatgttcctcttcctgttcctgttgacatgtcgttgtttaaataaatctcacttgccacc

SEQ ID NO: 18840 - DNA, 648 bp, Homo sapiens; identical to SEQ ID NO: 14272
  SIMILAR (542)..(646): 571254mologous to Homo sapiens Fragment of human secreted protein encoded by gene 14,accession number Y14479,Smith-Waterman Score=90.

SEQ ID NO: 18841 - DNA, 1456 bp, Homo sapiens
  SIMILAR (177)..(1208): 431254mologous to Homo sapiens CGI-68 protein,accession number AF151826,Smith-Waterman Score=467.
  misc_feature (1)...(1456): n = a,t,c or g
cgtcactgagccgcgccagctgagccaggtagggccctaccctcttctgttgctttctccctgtggctcgcgccgtcccccgccgcccgtcgaccccgcttccatgtccctggcggagcacagctcccaggaaccgtccacgcccggtggccagctaggcagaggggaatcctctattatcctcctgctgttccacctcgagctgcgacgcagacgacgagggcgtgcgcggcacctgcgaagatgcttccctgtgcaagaggtttgcagtaagcattggctaactgggcatgacccttacatacaggaccttggtgagactgtctaaacagagagaaagcccctgaaatcaacagaggatattttgctcgagtccatgggtgttcagttcagcttattaaaggcatttttacgggaagacagaatgtcattgttcaaattgttccaaccttggggggcagggcatgggatnaccacctttctgggagattaaaggatgaagatctttcttcccaagtaaatatttttgaggttgactttccaatgattgtcacggagaaagctgcacagtatcaaatggctagccttccccttatccagccccattctagaactgcattcagaggacacacttcagatggcctctgattgcatttgcagatggacacatactggattcaaagagatatgccgttattggagcagatctccgagacctgtctgaactggaagagaagctaaagaaatgtaacatgaatacacaattggccaacaccttgaatagctgaatgtgtgctggtttacatgactccagaggcagtccgcaaacctcctgaagtgggcagcccaacagttttgagagagccatgttcatattactaccaacaggtgaacatgggtgatctgtttgggcagatcatgattgaaaacctgcgtggacgcccagttttgacctggcgggagtggagaccctgcaagtcattagagtcacagaaagaacggctcctgtcggaatgggtgggaaaacaagcatcggcccgtccgaacatgattggagtttgtaccaccagggttaccctcgaagctgaagtgaagcaggatagaatcacttgaaatccctggatgaaaattgggagctgctggagcagctcattcctgcattactgccttttgctgggcaacccaaaggaggaaatgaagccttgggctgaaggagataacttattaatctgtcggaaggcttatgccgagccagaagccgaagccacttgaccctcctggaggagacctgcaagctccctgagcggtgggcgggccctcgtccgcaggtctcatcccacactcttgaagaagccttggtcactacagtggtccgcacatgttcctcttcctgttcctgttgacatgtcgttgtttaaataaatctcacttgccaccagtcaaaaaaaaaaaaaaa

SEQ ID NO: 18842 - DNA, 502 bp, Homo sapiens
  SIMILAR (119)..(337): 861254mologous to Cricetulus griseus Hsp70/Hsp90 organizing protein; hop,accession number AF039202,Smith-Waterman Score=315.
  misc_feature (1)...(502): n = a,t,c or g
aaaccgaggcaaataccctcaactgaagagggttacagaatatggaggcaggttggcagagagaaattcatgaacccttcaacatgcntaatctgtatcagaagttggagagtgatccaggacaaggacactactcagtgatcctacctaccgggagctgatagagcagctacgaaacaagccttctgacctgggcacgaaactacaagatccccggatcatgaccactctcagcgtcctccttggggtcgatctgggcagtatggatgaggaggaagagattgcaacacctccaccaccgctgccctcgagttccatgtctctttcccctgcccctagttgctgtctcggctgctctcccatagttggttttttttttatttggggcagtgggcatgttatggggaggggagggggttcttccagcctcaggtcccagctgtctcacgttgtttattctgcgtccccttctccaataaaacaagccagttgggcgtggtta

SEQ ID NO: 18843 - DNA, 1071 bp, Homo sapiens
  SIMILAR (256)..(618): 821254mologous to Homo sapiens transformation-sensitive protein,accession number M86752,Smith-Waterman Score=486.
atggggtttcgctatgttggccaggctgctctcgaactcctgacctcaggagagggtgcaggccttgctggtggtcctggaatgctgggggccgtgggctcttccttcctggcctctggctcccctttgccctcactcccagtactgatgactgcctaccctgctgctggcaagtctatgctgatcctctcttgggcagatttaatgtctggagtccaagggactgtgaggaatgtatccagctggagccgaccttcagtgaagaggtgcaaggagcagccttgggcgctgcggttggataacgcgccacctttcctgtttgtagtcaagggttatacacggaaagccgctgcactggaagcgatgaaggactacaccaaagccatggatgtgtaccagaaggcgctagacctggactccagctgtaaggaggcggcagacggctaccagcgctgtatgatggcgcagtacaaccggcacgacagccccgaagatgtgaagcgacgagccatggccgaccctgaggtgcagcagatcatgagtgacccagccatgcgccttatcctggaacagatgcagaaggacccccaggcactcagcgagactctgccgcccccaggcttgcccaccctgcatgctccaaccccagtgtgttcactggaaaggccgctgtcctgcgcagagctggtggcggacgtgccttgctctactgaagtccacatcctagggcagggcatcacagagctcttctgcccaaacccggaggcctaccagggcctgcccaccttgcctccttccacactctctgtagcagcagccgcagccatggcggggatgaagacagcctccggggactacatcgactcgtcatgggagctgcgggtgtttgtgggagaggaggacccagaggccgagtcggtcaccctgcgggtcactggggagtcgcacatcggcggggtgctcctgaagattgtggagcagatcagcagcgggacagctgtcctcctccaggagctgcaggaccaagtggacctggcacctgtccccaacatcccccccggcagcggctga

SEQ ID NO: 18844 - DNA, 1026 bp, Homo sapiens
  SIMILAR (1)..(1005): 951254mologous to Homo sapiens transformation-sensitive protein,accession number M86752,Smith-Waterman Score=1722.
gtcaatgagctgaaggagaaaggcaacaaggccctgagcgtgggtaacatcgatgatgccttacagtgctactccgaagctattaagctggatccccacaaccacgtgctgtacagcaaccgttctgctgcctatgccaagaaaggagactaccagaaggcttatgaggatggctgcaagactgtcgacctaaagcctgactggggcaagggctattcacgaaaagcagcagctctagagttcttaaaccgctttgaagaagccaagcgaacctatgaggagggcttaaaacacgaggcaaataaccctcaactgaaagaggagagaaaattcatgaaccctttcaacatgcctaatctgtatcagaagttggagagtgatcccaggacaaggacactactcagtgatcctacctaccgggagctgatagagcagctacgaaacaagccttctgacctgggcacgaaactacaagatccccggatcatgaccactctcagcgtcctccttggggtcgatctgggcagtatggatgaggaggaagagattgcaacacctccaccaccaccccctcccaaaaaggagaccaagccagagccaatggaagaagatcttccagagaataagaagcaggcactgaaagaaaaagagctggggaacgatgcctacaagaagaaagactttgacacagccttgaagcattacgacaaagccaaggagctggaccccactaacatgacttacattaccaatcaagcagcggtatactttgaaaagggcgactacaataagtgccgggagctttgtgagaaggccattgaagtggggagagaaaaccgagaagactatcgacagattgccaaagcatatgctcgaattggcaactcctacttcaaagaagaaaagtacaaggatgccatccatttctataacaagtctctggcagagcaccgaaccccagatgtgctcaagaaatgccagcaggatctaaaagtgacggcagaaagcaccgactttagcccgtga

SEQ ID NO: 18845 - DNA, 2237 bp, Homo sapiens
  SIMILAR (98)..(1690): 591254mologous to Homo sapiens transformation-sensitive protein,accession number M86752,Smith-Waterman Score=1398.
  misc_feature (1)...(2237): n = a,t,c or g
cccggtagcttctagtatgttccagaaggcggcgcgtgcggttgggaacgcggagcggacggattcgattcaacggtgttccggaccgcgctgcgctatggagcaggtcaatgagctgaaggagaaaggcatcaaggccctgagcgtgggtaacatcgatgatgccttacagttgctactccgaagctatttaagcttggatccccacaaccacgtgctgtacagcaaccgcttctgctgcctatgccaagaaaggagactaccagaaggcttatgaggatggctgcaagactgtcgaccttaaagccttgactggggcaagggctattcacgaaaagcagcagctctagagttcttataccgctttgaagaagccaagcgaacctatgaggagggcttaaaacacgaggcaaataaccctccaactgaaagagggtttacagaatattggaggccaggttggccaaaaagaaaattcatgaaccctttcaacatgcctaatctgtatcagaagttggagagtgatcccaggacaaggacactactcagtgatcctacctaccgggagctgatagagcagctacgaaacaagccttctgacctgggcacgaaactacaagatccccggatcatgaccactctcagcgatctccttggggtcgatctgggcagtatggatgaggaggaagagattgctacacctgcaccaccaccccctgccaaaaaggagaccaagccagagccaatggaagaagatcttccagagaataagaagcaggcactgaaagaaaaagagctggggaacgatgcctacaagaagaaagactttgacacagccttgaagcattacgacaaagccaaggagctggaccccactaacatgacttacattaccaatcaagcagcggtatagntttgaaaagggcgactacaataagtgccgggagctttgtgagaaggccattgaagtggggagagaaagcgcgagaagactatcgacagattgccaaagcatattgctcgaattggcaactcctacttcaaagaagaaaagtacaaggattcccatccatttcttataacaagtctctggcagagcaccgaaccccagatgtgctcaagaaatgccagcaggcagagaaaatcctgaaggagcaagagcggctggcctacataaaccccgacctggctttggaggagaagaacaaaggcaacgagtgtttttcagaaaggggactatccccagggccatgaagcattatacagaagccattcaaaaggaacccgaaagatgccaaattattacagcattcgagctgcctgctacaccaaactcctggagttccagctggcactcaaggactgggaggaatggtatcagctggagccgaccttcatcaagggttatacacggaaagcccgctgcgctggaagcgattgaaggactacaccaaagccatggatgtgtaccaaaaggcgctagacctggacttcagctgtaaggaggcggcagacggctaccagcgctgtattatggcgcagtacaaccggcacgacagccccgaagatgtgaagcgacggggccatggccgaccctgaggtgcagcagttcatgagctgacccagcccatgcgctttatcctgaaacagatgcagaaggaccccccaggcactcagcgaaccctttaaagaaacccgttactgccacgagagatccagaagctgatggatgtggggtctgattgcaaattcggtgatgacttgttcatccccgctttcctttgcccctcatgtggaaagaggagctgggaccgcggcgagcaagcagcacggagcggaagggagagcagcacggagcggaagggagagcagggggagagaaggccttcatccccttatatttatacataacccccgggaagacacagagactcgtacctgcgctgtttgtgccgccgctgcctctgggccctcccagcacacgcatggtctcttcccccctggccctcgaagttccatgtctctttccccttgcccctagttgctgtctcggctgctctcccatagttggttttttttttttatttgggggcagtggggcatgttatgggggagggggagggggttctttccagccttcaggtcccagcttgttttcacgttgtttatttctggcgtcccctttttccaattaaaacaagccagttgggggtggttatatgttaaaaaaaaaaaaa

SEQ ID NO: 18846 - DNA, 328 bp, Homo sapiens; identical to SEQ ID NO: 12619
  SIMILAR (23)..(289): 961254mologous to Homo sapiens nucleophosmin,accession number M23613,Smith-Waterman Score=446.

SEQ ID NO: 18847 - DNA, 247 bp, Homo sapiens; identical to SEQ ID NO: 17086
  SIMILAR (69)..(245): 861254mologous to Homo sapiens nucleophosmin,accession number M23613,Smith-Waterman Score=281.
  misc_feature (1)...(247): n = a,t,c or g

SEQ ID NO: 18848 - DNA, 456 bp, Homo sapiens
  SIMILAR (2)..(226): 981254mologous to Homo sapiens retinoic acid receptor (AA 1 - 432),accession number X06538,Smith-Waterman Score=382.
gccggaggtgggggagctcattgagaaggtgcgcaaagcgcaccaggaaaccttccctgccctatgccagctgggcaaatacactacgaacaacagctcagaacaacgtgtctctctggacattgacctctgggacaagttcagtgaactctccaccaagtgcatcattaagactgtggagttcgccaagcagctgcccggcttcaccaccctcaccatcgccaacctgtcccacccccgtgccccctccttaccccgcaggacgggcctacaggggggtctcccctcacccctgcacccccagctgggggagctggctctgccccgacctccttcaccaggggttggggccccttcccctggagcccgtgggtgcacctgttactgttgggctttccactgagatctactggataaagaataaagttctatttattctaaaaaaaaaaaaaaaaa

SEQ ID NO: 18849 - DNA, 1944 bp, Homo sapiens
  SIMILAR (396)..(1643): 961254mologous to Homo sapiens nucleophosmin-retinoic acid receptor alpha fusion protein NPM-RAR long form,accession number U41742,Smith-Waterman Score=2132.
ccgtcctgcgcggttgttctctggagcagcgttcttttatctccgtccgccttctctcctacctaagtgcgtgccgccacccgatggaagattcgatggacatggacatgagccccctgaggccccagaactatcttttcggttgtgaactaaaggccgacaaagattatcactttaaggtggataatgatgaaaatgagcaccagttatctttaagaacggtcagtttaggggctggtgcaaaggatgagttgcacattgttgaagcagaggcaatgaattacgaaggcagtccaattaaagtaacactggcaactttgaaaatgtctgtacagccaacggtttcccttgggggctttgaaataacaccaccagtggtcttaaggttgaagtgtggttcagggccagtgcatattagtggacagcacttagtagccattgagacccagagcagcagttctgaagagatagtgcccagccctccctcgccaccccctctaccccgcatctacaagccttgctttgtctgtcaggacaagtcctcaggctaccactatggggtcagcgcctgtgagggctgcaagggcttcttccgccgcagcatccagaagaacatggtgtacacgtgtcaccgggacaagaactgcatcatcaacaaggtgacccggaaccgctgccagtactgccgactgcagaagtgctttgaagtgggcatgtccaaggagtctgtgagaaacgaccgaaacaagaagaagaaggaggtgcccaagcccgagtgctctgagagctacacgctgacgccggaggtgggggagctcattgagaaggtgcgtaaagcgcaccaggaaaccttccctgccctctgccagctgggcaaatacactacgaacaacagctcagaacaacgtgtctctctggacattgacctctgggacaagttcagtgaactctccaccaagtgcatcattaagactgtggagttcgccaagcagctgcccggcttcaccaccctcaccatcgccgaccagatcaccctcctcaaggctgcctgcctggacatcctgatcctgcggatctgcacgcggtacacgcccgagcaggacaccatgaccttctcggacgggctgaccctgaaccggacccagatgcacaacgctggcttcggccccctcaccgacctggtctttgccttcgccaaccagctgctgcccctggagatggatgatgcggagacggggctgctcagcgccatctgcctcatctgcggagaccgccaggacctggagcagccggaccgggtggacatgctgcaggagccgctgctggaggcgctaaaggtctacgtgcggaagcggaggcccagccgcccccacatgttccccaagatgctaatgaagattactgacctgcgaagcatcagcgccaagggggctgagcgggtgatcacgctgaagatggagatcccgggctccatgccgcctctcatccaggaaatgttggagaactcagagggcctggacactctgagcggacagccggggggtggggggcgggacgggggtggcctggcccccccgccaggcagctgtagccccagcctcagccccagctccaacagaagcagcccggccacccactccccgtgaccgcccacgccacatggacacagccctcgccctccgccccggcttttctctgcctttctaccgaccatgtgaccccgcaccagccctgcccccacctgccctgcccgggagtactggggaccttccctgggggacggggagggaggaggcagcgactccttggacagaggcctgggccctcagtggactgcctgctcccacagcctgggctgacgtcagaggccgaggccaggaactgagtgaggcccctggtcctgggtctcaggatgggtcctgggggcctcgtgttcatcaagac

SEQ ID NO: 18850 - DNA, 844 bp, Homo sapiens
  SIMILAR (419)..(844): 991254mologous to Homo sapiens nucleophosmin,accession number M23613,Smith-Waterman Score=741.
tccagaactatcttttcggttgtgaactaaaggccgacaaagattatcactttaaggtggataatgatgaaaatgagcaccagttatctttaagaacggtcagtttaggggctggtgcaaaggatgagttgcacattgttgaagcagaggcaatgaattacgaaggcagtccaattaaagtaacactggcaactttgaaaatgtctgtacagccaacggtttcccttgggggctttgaaataacaccaccagtggtcttaaggttgaagtgtggttcagggccagtgcatattagtggacagcacttagtagctgtggaggaagatgcagagtcagaagatgaagaggaggaggatgtgaaactctttaagtatatctggaaagcggtctgcccctggaggtggtagcaaggttccacagaaaaaaagtaaaacttgctgctgatgaagatgatgacgatgatgatgaagaggatgatgatgaagatgatgatgatgatgattttgatgatgaggaagctgaagaaaaagcgccagtgaagaaatctatacgagatactccagccaaaaatgcacaaaagtcaaatcagaatggaaaagactcaaaaccatcatcaacaccaagatcaaaaggacaagaatccttcaagaaacaggaaaaaactcctaaaacaccaaaaggacctagttctgtagaagacattaaagcaaaaatgcaagcaagtatagaaaaaggtggttctcttcccaaagtggaagccaaattcatcaactatgtgaagaattgcttccggatgactgaccaagaggctattcaagatctctggcagtggaggaagtctctt

SEQ ID NO: 18851 - DNA, 3052 bp, Homo sapiens
  SIMILAR (67)..(2457): 1001254mologous to Homo sapiens PML-RAR protein,accession number M73779,Smith-Waterman Score=4223.
ctccccttcagcttctcttcacgcactccaagatctaaaccgagaatcgaaactaagctggggtccatggagcctgcacccgcccgatctccgaggccccagcaggaccccgcccggccccaggagcccaccatgcctccccccgagaccccctctgaaggccgccagcccagccccagccccagccctacagagcgagcccccgcttcggaggaggagttccagtttctgcgctgccagcaatgccaggcggaagccaagtgcccgaagctgctgccttgtctgcacacgctgtgctcaggatgcctggaggcgtcgggcatgcagtgccccatctgccaggcgccctggcccctaggtgcagacacacccgccctggataacgtctttttcgagagtctgcagcggcgcctgtcggtgtaccggcagattgtggatgcgcaggctgtgtgcacccgctgcaaagagtcggccgacttctggtgctttgagtgcgagcagctcctctgcgccaagtgcttcgaggcacaccagtggttcctcaagcacgaggcccggcccctagcagagctgcgcaaccagtcggtgcgtgagttcctggacggcacccgcaagaccaacaacatcttctgctccaaccccaaccaccgcacccctacgctgaccagcatctactgccgaggatgttccaagccgctgtgctgctcgtgcgcgctccttgacagcagccacagtgagctcaagtgcgacatcagcgcagagatccagcagcgacaggaggagctggacgccatgacgcaggcgctgcaggagcaggatagtgcctttggcgcggttcacgcgcagatgcacgcggccgtcggccagctgggccgcgcgcgtgccgagaccgaggagctgatccgcgagcgcgtgcgccaggtggtagctcacgtgcgggctcaggagcgcgagctgctggaggctgtggacgcgcggtaccagcgcgactacgaggagatggccagtcggctgggccgcctggatgctgtgctgcagcgcatccgcacgggcagcgcgctggtgcagaggatgaagtgctacgcctcggaccaggaggtgctggacatgcacggtttcctgcgccaggcgctctgccgcctgcgccaggaggagccccagagcctgcaagctgccgtgcgcaccgatggcttcgacgagttcaaggtgcgcctgcaggacctcagctcttgcatcacccaggggaaagccattgagacccagagcagcagttctgaagagatagtgcccagccctccctcgccaccccctctaccccgcatctacaagccttgctttgtctgtcaggacaagtcctcaggctaccactatggggtcagcgcctgtgagggctgcaagggcttcttccgccgcagcatccagaagaacatggtgtacacgtgtcaccgggacaagaactgcatcatcaacaaggtgacccggaaccgctgccagtactgccgactgcagaagtgctttgaagtgggcatgtccaaggagtctgtgagaaacgaccgaaacaagaagaagaaggaggtgcccaagcccgagtgctctgagagctacacgctgacgccggaggtgggggagctcattgagaaggtgcgcaaagcgcaccaggaaaccttccctgccctctgccagctgggcaaatacactacgaacaacagctcagaacaacgtgtctctctggacattgacctctgggacaagttcagtgaactctccaccaagtgcatcattaagactgtggagttcgccaagcagctgcccggcttcaccaccctcaccatcgccgaccagatcaccctcctcaaggctgcctgcctggacatcctgatcctgcggatctgcacgcggtacacgcccgagcaggacaccatgaccttctcggacgggctgaccctgaaccggacccagatgcacaacgctggcttcggccccctcaccgacctggtctttgccttcgccaaccagctgctgcccctggagatggatgatgcggagacggggctgctcagcgccatctgcctcatctgcggagaccgccaggacctggagcagccggaccgggtggacatgctgcaggagccgctgctggaggcgctaaaggtctacgtgcggaagcggaggcccagccgcccccacatgttccccaagatgctaatgaagattactgacctgcgaagcatcagcgccaagggggctgagcgggtgatcacgctgaagatggagatcccgggctccatgccgcctctcatccaggaaatgttggagaactcagagggcctggacactctgagcggacagccggggggtggggggcgggacgggggtggcctggcccccccgccaggcagctgtagccccagcctcagccccagctccaacagaagcagcccggccacccactccccgtgaccgcccacgccacatggacacagccctcgccctccgccccggctttttctctgcctttctaccgaccatgtgaccccggccacagccctgcccccaacttggccctccggggcagtactggggaccttccctgggggacggggagggaggaggcagcgactccttggacagaggcctgggccctcagtggactgcctgctcccacagcctgggctgacgtcagaggccgaggcccaggaactgagtgaggcccctggtccctgggtctcaggatgggtccctgggggcctcgtgttcatcaagacacccctctgcccagctcaccacatcttcatcaccagcaaacgccaggacttggctcccccatcctcagaactcacaagccattggctccccagctggggaacctcaacctcccccctgcctcggttggtgacagagggggtgggacaggggcggggggttccccctgtacataccctgccataccaaccccaggtattaattctcgctggttttgtttttattttaatttttttgttttgatttttttaataagaattttcattttaagcacaaaaaaaaaaaaaaa

SEQ ID NO: 18852 - DNA, 2930 bp, Homo sapiens
  SIMILAR (103)..(759): 931254mologous to Homo sapiens RAR-alpha,accession number R68023,Smith-Waterman Score=1098.
gccatctgggcccaggccccatgccccgaggaggggtggtctgaagcccaccagagccccctgccagactgtctgcctcccttctgactgtggccgcttggcatggccagcaacagcagctcctgcccgacacctgggggcgggcacctcaatgggtacccggtgcctccctacgccttcttcttcccccctatgctgggtggactctccccgccaggcgctctgaccactctccagcaccagcttccagttagtggatatagcacaccatccccagccaccattgagacccagagcagcagttctgaagagatagtgcccagccctccctcgccaccccctctaccccgcatctacaagccttgctttgtctgtcaggacaagtcctcaggctaccactatggggtcagcgcctgtgagggctgcaagggcttcttccgccgcagcatccagaagaacatggtgtacacgtgtcaccgggacaagaactgcatcatcaacaaggtgacccggaaccgctgccagtactgccgactgcagaagtgctttgaagtgggcatgtccaaggagtctgtgagaaacgaccgaaacaagaagaagaaggaggtgcccaagcccgagtgctctgagagctacacgctgacgccggaggtgggggagctcattgagaaggtgcgcaaagcgcaccagggaaaccttccctgccctctgccagctgggcaaatacactacggaacaacagcttcagaacaacgtgttctctctggacattgacctctgggacaagttcagtgaactctccaccaagtgcattattaaaaatggggaaggtcgccaaggcaggctgcccggcttcaccaccctcaccatcggccgaccagatcaccctcctcaagggctgcctgcctgggacatcctgatcctgcggatctgcacgcggtacacgcccgaggcagggacaccatgaccttcttgggacgggctgaccctgaaccgggacccagatgcacaacgctgggcttcggcccccttcaccgacctggtctttgcctttcgccaaccagctgctgcccctgggagatggatgatggcgggagacggggctgctcagcgccatctgcctcatctgcggagaccgccaggacctggagcagccggaccgggtggacatgctgcaggagccgctgctggaggcgctaaaggtctacgtgcggaagcggaggcccagccgcccccacatgttccccaagatgctaatgaagattactgacctgcgaagcatcagcgccaagggggctgagcgggtgatcacgctgaagatggagatcccgggctccatgccgcctctcatccaggaaatgttggagaactcagagggcctggacactctgagcggacagccggggggtggggggcgggacgggggtggcctggcccccccgccagggcagctgtagccccagcctcagccccagctccaacagaagcagcccggccacccactccccgtgaccgcccacgccacatggacacagccctcgccctccgccccggcttttctctgcctttctaccgaccatgtgaccccgcaccagccctgcccccacctgccctgcccgggcagtactggggaccttccctgggggacggggagggaggaggcagcgactccttggacagaggcctgggccctcagtggactgcctgctcccacagcctgggctgacgtcagaggccgaggccaggaactgagtgaggcccctggtcctgggtctcaggatgggtcctgggggcctcgtgttcatcaagacacccctctgcccagctcaccacatcttcatcaccagcaaacgccaggacttggctcccccatcctcaagaactcacaagccattgctccccagctggggaacctcaacctcccccctgcctcggttggtgacagagggggtgggacaggggcggggggttccccctgtacataccctgccataccaaccccaggtattaattctcgctggttttgtttttattttaatttttttgttttgatttttttaataagaattttcattttaagcacatttatactgaaggaatttgtgctgtgtattggggggagctggatccagagctggagggggtgggtccgggggagggagtggctcggaaggggcccccactctcctttcatgtccctgtgccccccagttctcctcctcagccttttcctcctcagttttctctttaaaactgtgaagtactaactttccaaggcctgccttcccctccctcccactggagaagccgccagcccctttctccctctgcctgaccactgggtgtggacggtgtggggcagccctgaaaggacaggctcctggccttggcacttgcctgcacccaccatgaggcatggagcagggcagagcaagggccccgggacagagttttcccagacctggctcctcggcagagctgcctcccgtcagggcccacatcatctaggctccccagcccccactgtgaaggggctggccaggggcccgagctgcccccacccccggcctcagccaccagcacccccatagggcccccagacaccacacacatgcgcgtgcgcacacacacaaacacacacacactggacagtagatgggccgacacacacttggcccgagttcctccatttccctggcctgccccccacccccaacctgtcccacccccgtgccccctccttaccccgcaggacgggcctacaggggggtctcccctcacccctgcacccccagctgggggagctggctctgccccgacctccttcaccaggggttggggccccttcccctggagcccgtgggtgcacctgttactgttgggctttccactgagatctactggataaagaataaagttctatttattct

SEQ ID NO: 18853 - DNA, 2457 bp, Homo sapiens
  SIMILAR (492)..(2156): 861254mologous to Homo sapiens nucleophosmin-retinoic acid receptor alpha fusion protein NPM-RAR long form,accession number U41742,Smith-Waterman Score=2370.
tctcaatatcactaataactgggaaaatacaaatcaaaatcatagtaaaatattacctgttttcatggtgctaatattacctgttctcccactgctaatgacatacccgagactgagtaatttataaataaaagagatttaattgactcatagttccacatggctggggaggtcttgcaatcatgacagaaggcaaatgggaagcaaagtcatgtcttatgtggtggcaggcagggggacttgtgcacaggaaactcctatttatacaaccatcagatatcttgaggacaaggaacagtatgggggctccctgggtgttgattccgtcctggcgcggctgttctctggagccagcgttctttttatctccggtccgccgttctcttcctacctaagtggcgtgccccccggtcacccgatggaagattcgatgggacatgggacatgagccccctggaggccccagaactatcttttcggttgtgaactaaaggtccgacaaagattatcactttaaggtggataaatgatgaaaatgagtcaccagttatctttaaggaacggtcaatttagggggcctggttgcaaagggatgagttgcacatttgttgaaggcagaggcaattgaatttacggaggccagtcccaatttaaaagtaaccacctgggcaacttttgaaaatggtctgtaccagcccaacgggttttccccttggggggccttttgaaaataacaccaaccaggtgggtccttaaagggttgaaagtgtgggttcaggggccagtgcatattagtgggacagcactttagtagctgtgggagggaagatgccagagtccagaagatgaagaaggaggaggatgtgaacagggttttatttatgaaaccgaaaggcaggggcctcaagcatatgttcggggatttggtgtgcagttggaaattggcagccattgagacccagagcagcagttctgaagagatagtgcccagccctccctcgccaccccctctaccccgcatctacaagccttgctttgtctgtcaggacaagtcctcaggctaccactatggggtcagcgcctgtgagggctgcaagggcttcttccgccgcagcatccagaagaacatggtgtacacgtgtcaccgggacaagaactgcatcatcaacaaggtgacccggaaccgctgccagtactgccgactgcagaagtgctttgaagtgggcatgtccaaggagtctgtgagaaacgaccgaaacaagaagaagaaggaggtgcccaagcccgagtgctctgagagctacacgctgacgccggaggtgggggagctcattgagaaggtgcgtaaagcgcaccaggaaaccttccctgccctctgccagctgggcaaatacactacgaacaacagctcagaacaacgtgtctctctggacattgacctctgggacaagttcagtgaactctccaccaagtgcatcattaagactgtggagttcgccaagcagctgcccggcttcaccaccctcaccatcgccgaccagatcaccctcctcaaggctgcctgcctggacatcctgatcctgcggatctgcacgcggtacacgcccgagcaggacaccatgaccttctcggacgggctgaccctgaaccggacccagatgcacaacgctggcttcggccccctcaccgacctggtctttgccttcgccaaccagctgctgcccctggagatggatgatgcggagacggggctgctcagcgccatctgcctcatctgcggagaccgccaggacctggagcagccggaccgggtggacatgctgcaggagccgctgctggaggcgctaaaggtctacgtgcggaagcggaggcccagccgcccccacatgttccccaagatgctaatgaagattactgacctgcgaagcatcagcgccaagggggctgagcgggtgatcacgctgaagatggagatcccgggctccatgccgcctctcatccaggaaatgttggagaactcagagggcctggacactctgagcggacagccggggggtggggggcgggacgggggtggcctggcccccccgccaggcagctgtagccccagcctcagccccagctccaacagaagcagcccggccacccactccccgtgaccgcccacgccacatggacacagccctcgccctccgccccggcttttctctgcctttctaccgaccatgtgaccccgcaccagccctgcccccacctgccctgcccgggagtactggggaccttccctgggggacggggagggaggaggcagcgactccttggacagaggcctgggccctcagtggactgcctgctcccacagcctgggctgacgtcagaggccgaggccaggaactgagtgaggcccctggtcctgggtctcaggatgggtcctgggggcctcgtgttcatcaagac

SEQ ID NO: 18854 - DNA, 1113 bp, Homo sapiens
  SIMILAR (884)..(994): 701254mologous to Homo sapiens PRO2550,accession number AF130089,Smith-Waterman Score=127.
ctcatttctgaaaaattctaagtcatgagaagataagccctatcctttcttacaaggattggatttcctggggtgaccactgtggtgtggtggaagccagcggcttctttccaggttcataaaggccatcataacaacttccaggcttcatggtgtggacagggatccaggagagctgagtggatgtgtgaagtttctgatagattctgtcatcattcccaaaggaatgtagtttcctccagctcaatcatttgaagcaatacacattgccaaatctgactgtaacctgacattttagacctattggagaaataggaagaaagcccctccagtggaaggactggacttggaagaagttctgcaggaaggcgcatgcaattggatagctgttcatgagtgaaacgtggggaacattgctatgaaattgtaaggtttgcacttcatttttcgtagcttaaaaattgctctgttctggctgttgaaaacacttggtgtgaggtttgaatgaggattatataatcattctagtattcataggaaaatgattactgctctcctatttgtaaaacaaaagaaataactttcggaaacagtattttagacatgaggaaattgtttgtattaggcattttgatctaacagaatcagctaaggataagtggatcctggctttacacatttctttgaccaaacccagctggcaacttgaagttgttactgtgtggcttccagattgcctagaggtgaatcctaccaacatcactgttttttttgttttgttttgttttttttgtatgtttttgagacagagtcttgctgctatccccagggctggagtgcagtggcacgttcttggctttactgcaacctcagcctccggggtttcaagggattctcctgcctcagcctcctaagtaactgggattataggtgcactccactacgttcagctaattttgtatttttagtagagacagggtttcaccatgttggcccacgtcggtctcaaactcctgacctcaaggtgatccaccctccttggcctcccaaagtgctggggattacaagggtgtgagccaccatgcctgggcccagacctcttgatatatatca

SEQ ID NO: 18855 - DNA, 1257 bp, Homo sapiens
  SIMILAR (78)..(653): 471254mologous to Homo sapiens HSPC037 protein,accession number AF125098,Smith-Waterman Score=284.
  misc_feature (1)...(1257): n = a,t,c or g
gcggccggcggcgtctcctccgggacgctgaggggcccgaggagaccgtgaggctctggcctgcagctcgcgccgccatggacgctgccgaggtcgaattcctcgccgagaaggagctggttaccattatccccaacttcagtctggacaagatctacctcatcgggggggacctggggccttttaaccctgggtttacccgtggaagtgcccctgtggctgggcgattaaacctgaaacaaagacagaaaatgtcgcctgctccctccagagtggatggatgtagaaaagttggagaagatgagggatcatgaaccgaaaggaagaaactttttaccccaatgcccaagccctttactacatgggaacttacggaagctcctgtttaaatcatgctttcagacaacatcccgaagggcaggacggaattccgggaccctgggtcaagggtattttggggacattcgtattaggccaaattccgagtgtttggttgacagctttggtgagacagcaggaggcacatgccaagctggattaacttggaccttggatgggagatcaacaaccagcggtgactttcctcacacaagcgcctcaacccacatgtaacaaactcccgcacgaaccctcccagccctctggagagtacctcagtcctcaggacttcctagagaaaggcctggtgcaggcggccttgctgggggatgtgagcgcctcaggacgtgatgaggtactcgtggttctggagctctagaaacacttctgatgcatgaaaaatgtgtgatggtgcaaggaatggattcaggatgtttgttggagaagacaagttttgttgattagtccctaaaaactttagctccctggggacattctttcatttcccacatctgttttctaggaaaccagcgcctttttccccccacttttgagaaataaaaaagcctttaggtaaataagtcattctccctagcagagccacttgggttctcctgcatggaacgccatcacacttgggcaggtgttcagtgactggtaggtgtagatacagcagagaangtggccatgtggtccacggcttttttcacccccttcttgatccctgattttcttggggctgattttagactcttctcacagagggtggctcacagaagaaggatggcagatggtgcagccatcaatgctggccggtgcttatcctttaagccctgatccacaataaaaatggacccaactcaaaaaaaaaaaaaaaaa

SEQ ID NO: 18856 - DNA, 1523 bp, Homo sapiens
  SIMILAR (168)..(707): 701254mologous to Homo sapiens putative oncogene protein hlc14-06-p,accession number AF026816,Smith-Waterman Score=548.
  misc_feature (1)...(1523): n = a,t,c or g
cgactccgccgactacgcgccttggggtccgggtcgctttccccgggacctggccggaaactgagccgttcacttccgccaccagccggaagttttctgtcactggacgccaaggagttttcggtggctcaagctgggtacacgagggatcaccatggcgacctcaaatggtgaggaagaagatcgtgtttgtaacggggaacgccaagaagctggaggaggtcgttcagattctaggagataagtttacatgcacttaggtggcacagaaaattgacatgccggagtaccaaggggagccggatgagatttccatacagaaatgtcaggaggcagttcgccaggtacagggacccgtgctggttgaggacacttgtctgagcttcaatgcccttggaggcctccccggcccctacataaaagtgggtttctggagaagttaaagcctcgaaggtctacaccagctcctggcccggnttccgaggacaagtcagccctatgcgctctgcacgttttgcactcaagcacccggggacccaagcccagcccgttgcgccttgtttcagggggccgggaccttcggggccggattcggtggcacccagagggctgccagggactttggctgggactccctgcctttcagcctgatgggatatgagcagacgtacgcagagatgccttaaggcgggagaaggaacgctgttctcccatccgcttccgggccccctgctgggagcctgccagggagtacttttggcaagtttggccaagcttgacttctgcaagctggaaggaaggcccctccaggcccggggatctggggaagggcctagccccaaaaccctccccgcatcggggcagggcacccccctgaaagtacttcccttccagggtttccccatttgtgagggtgtcgaagttaccttaaccgggcctgtcttggaaggaacaactgtctcttgctctgagaaactctgggcaagtggaacgccattctcttgccccttaggagttcacttgctctctcctacagccgccaaggcctggggtcctgaaagcttttggggtgggtaaagctgtacttgggtggggagtgaggggcgtngggggagggaaccatgcaaatcgccttccatggttttttaaatgcagtaaataacatttctggatgagacttgtttccaaaattaaaccagctatatctgttttgnnnnnnnnnnnnnnggggggcccgttttaaaggacccttgggggggccaaattttacccgggctggcgaggtaatagctctctccttatagggggccgtttaaaaacctccctggggatttttgaaaaggacccttactttgggggggggacttaatgggccaacctccctccgaaattttagggctctagggaaaatataaatttttaaagggtatagggggtaaaactacctgcatatcctggctgctgaaaagttttgcttcctgggtttgttttataaaaattttttccccgggacctggggttta

SEQ ID NO: 18857 - DNA, 307 bp, Homo sapiens
  SIMILAR (14)..(280): 941254mologous to Homo sapiens CGI-31 protein,accession number AF132965,Smith-Waterman Score=428.
  misc_feature (1)...(307): n = a,t,c or g
tacggccgaaaagatggcggtcttggcacctctaattgctctcgtgtattcggtgccgcgactttcacgatggctcgcccaaccttactaccttctgtcggccctgctctctgctgccttcctactcgtgaggaaactnccgccgctctgccacggtctgcccacccaacgcgaagacggtaacccgtgtgactttgactggagagaagtggagatcctgatgtttctcagtgccattntgatgatgaagaaccgcagatccagtacaaagtgagcacatcanccctgaccaagcaacttcctaccc

SEQ ID NO: 18858 - DNA, 5800 bp, Homo sapiens
  SIMILAR (324)..(2927): 1001254mologous to Homo sapiens p120 catenin isoform 1A,accession number AF062324,Smith-Waterman Score=4554.
ctgccagatcagtttgtcaccacccaggctcccttgcctttggctgggtgcaacttccattttaggtgttggatctgagggggaaaaaaaagagagagggagagagagagaaagaagagcaggaaagatcccgaaaggaggaagaggtggcgaaaaatcaactgccctgctggatttgtctttctcagcaccttggcgaagccttgggtttctttcttaaaggactgatttttagaactccacatttgaggtgtgtggcttttgaagaaaatgtatgtactgacgggaaaaggaagataagcaagtcgaatttttgtcttacgaacggccggtttgtgggcgatgctgaccttgaaagacagaaattttcagatttgaaactcaacggaccccaggatcacagtcaccttctatatagcaccatccccaggatgcaggagccggggcagattgtggagacctacacggaggaggatcctgagggagccatgtctgtagtctctgtggagacctcagatgatgggaccactcggcgcacagagaccacggtcaagaaagtagtgaagactgtgacaacacggacagtacagccagtcgctatgggaccagacgggttgcctgtggatgcttcatcagtttctaacaactatatccagactttgggtcgtgatttccgcaagaatggcaatgggggacctggtccctatgtggggcaagctggcactgctacccttcctaggaacttccactaccctcctgatggttatagtcgccactatgaagatggttatccaggtggcagtgataactatggcagtctgtcccgggtgacccgcattgaggagcggtataggcccagcatggaaggctaccgggcacctagtagacaggatgtgtatgggccccaaccccaggttcgggtaggtgggagcagcgtggatctgcatcgctttcatccagagccttatgggctagaggatgaccagcgtagtatgggctatgatgacctggattatggtatgatgtctgattatggcactgcccgtcggactgggacaccctctgaccctcgtcggcgcctcaggagctatgaagacatgattggtgaggaggtgccatcggatcaatactactgggctcctttggcccagcatgagcgaggaagtttagcaagcttggatagcctgcgcaaaggagggcctccacctcctaattggagacagccagagctgccagaggtgatcgccatgcttggattccgcttggatgctgtcaagtccaatgcagctgcatacctgcaacacttatgctaccgcaatgacaaggtgaagactgacgtgcggaagctcaagggcatcccagtactggtgggattgttagaccatcccaaaaaggaagtgcaccttggagcctgtggagctctcaagaatatctcttttggacgtgaccaggataacaagattgccataaaaaactgtgatggtgtgcctgcccttgtgcgattgcttcgaaaggctcgtgatatggaccttactgaagttattaccggaaccctgtggaatctttcatcccatgactcaatcaaaatggagattgtggaccatgcactgcatgccttgacagatgaagtgatcattcctcattctggttgggagcgggaacctaatgaagactgtaagccacgccatattgagtgggaatcggtgctcaccaacacagctggctgccttaggaatgtaagctcagagaggagtgaagctcgccggaaacttcgggaatgtgatggtttagttgatgccctcattttcattgttcaggctgagattgggcagaaggattcagacagcaagcttgtagagaactgtgtttgccttcttcggaacttatcatatcaagttcaccgggagatcccacaggcagagcgttaccaagaggcagctcccaatgttgccaacaatactgggccacatgctgccagttgctttggggccaagaagggcaaagggaaaaaacctatagaggatccagcaaacgatacagtggatttccctaaaagaacgagtccagctcgaggctatgagctcttatttcagccagaggtggttcggatatacatctcacttcttaaggagagcaagactcctgccatcctagaagcctcagctggagctatccagaacttgtgtgctgggcgctggacgtatggtcgatacatccgctctgctctgcgtcaagagaaggctctttctgccatagctgacctcctgactaatgaacatgaacgggtggtgaaagctgcatctggagcactgagaaacctggctgtggatgctcgcaacaaagaattaattggtaaacatgctattcctaacttggtaaagaatctgccaggaggacagcagaactcctcttggaatttctctgaggacactgtcatctctattttgaacactatcaacgaggttatcgctgagaacttggaggctgccaaaaagcttcgagagacacagggtattgagaagctggtgttgatcaacaaatcagggaaccgctcagaaaaagaagttcgagcagcagcacttgtattacagacaatctggggatataaggaactgcggaagccactggaaaaagaaggatggaagaaatcagactttcaggtgaatctaaacaatgcttcccgaagccagagcagtcattcatatgatgatagtactctccctctcattgaccggaaccaaaaatcagataagaaacctgatcgggaagaaattcagatgagcaatatgggatcaaacacaaaatcactagataacaactattccacaccaaatgagagaggagaccacaatagaacactggatcgatcgggggatctaggcgacatggagccattgaagggaacaacacccttgatgcagaagatttagcaccactatctccgttccatctgggcttatatgtacttttattttttggtggtgaaattgactgatgattttcctttttcttcgctggactattgtgccaactgccaggctgcctcctgcccttacagccctaagtggctgccttctttccatcaactcccaacttcttcctgtgaagtttaattgtctcaacgcctccccctcccccattccctccatttttctcccaagaaacctgactcaattatttgcatattttgagaaactgctgcagattagttctttttgccagttttccctggaactcctggccttttgtggaggggagggatggagagaataggaatcttcactagaagccgtgggaagaattggaagttacatgctgtatatgcaatgtccagcagtctgataaactgacgattcttaatcaagatttttttcctgatggggaagggacttttattttcttttagagaggggaaagtgtgagctcttcccttattcctaatggctatttttgaagcaaagaaggccagcaacattggcacatgccacctggcaaaggacccttgagtaagtgaaggtctcctaaaactgggattaagaaaccttgctctcctcatctccaaggcagggaccatcaagaacctacagactccatctcttctgcaagcctcatgccaaccctgggctattgctgctgccccttaaacacaggctgtccttaacccacctctcctgccctgtgatatgtctgctgagttggcctggccatttccaagaggctgtagaaaggggagaatgtcaaggaagacttttggtagagaaggagcagaaagatgtgtttttgggaagaagaagacctctaggaggagctagtaggaatgtacatgaagcaattagtctgaaactggcttccccactcccccgtttctccttttcctatccttataggcctgtcccttgcctctgccctggattggttggcaaactataggacttgatgtacataactcctgtcccttttcccttacaaggtggggattgcccctggctttgcctcttctttgtgcctttggcctggggtgcatctcctcccgcccttccatgtgcctttctttgcctctgcagtctcatttctcataattttgcaaattatattttgttgctttcttacctactattggccctaaatagcagaaagaagagaagtgaccgagagaacctcagattcttcattgaggattggtatagccatgatttcagtcatagcaagcttttgctcaacagcatatgggtgggatttggcaaaaatcctattctgatgaatctcaaagtaaggctggtaagagaagtgagtggtgtgactcttactccttaggtgcccagaatttaccatcatctctgaaggagttacagggaagtggtctccccaattctcccctccctccagtattgccccctctcactttagcatatattaattagcaggttgggctagagaaatcagctgctatgcgggttgattattattattatttctaatccttttccttatttgccttctactccccttaatctaatctaaaagctctgttccatgcaactggagttccttatccctctcttccccttcccttatatattgaggctatggggtaggagaaaagtgcacaacccaccaccccctctactcgtgcattaaaatttcttatttacccttttcccccttcccatttcttcccactttcatctaccttttctggcaaaaaggagccttttgctctctgtgaccctaagagcacactgcacagggaaaattgccccatccagacctggctccactcttgatctctcttgtcctcttctgctcttttcctggtgctcttttttctcggtggggtgtgggtaatagaacagccgtgggcttttggggacctttaacttttttttctctcttttgtttataaaaaacactaaacattcaattccagagaacccaaaatcccaccttcccaccgaacactactaaggggcttgtgttctgctccataccttttctcttttctttctgtcttgttaatgcttttaaaaacaaatgagttttttatataaataaagtttttaaagtgtgtatgtggggggtctgtgtcatttcttcacttcaagctgttatttcttccctgctttgcatctttgttacttccttatgtatcagtgtcctttccagagcaaccagaaggaggttataccaggatttattttgagctcagccccaactctttatcaagcaacattcttgttaactatatgtgaaacattttttcttctgaagattcttaaaaattgaatgtggctgaagttgaacatgggagcttattgctaatttagagataggaaactgaagcataaagaattaatgacttactttaattactggaattcttctgcaacatttgacaaaactaaccttgaataaggcccactgtaatacgtagctctcttaaatataacacttaggactagaagattagaaactaccaatcccaactacgtaataggaaaatgtaggatcaaaaggcccatgtatataagtactgaccactgggccataatgttgcttctcaggctatatgcagtcctttagtcagaagtcaataggcctatttattaatattttacagaccatattacctggattaccagggactatctttgctgcagagatcaagggttaagatctatgggaagatacttatttttctgaggtccttatgtcctgtcatataattaaagactcaagagaatttatgtgaaatgctttctgtatgccccaatctttagattaaaattatatacctgctcct

SEQ ID NO: 18859 - DNA, 5655 bp, Homo sapiens
  SIMILAR (248)..(2782): 991254mologous to Homo sapiens p120 catenin isoform 1A,accession number AF062324,Smith-Waterman Score=4430.
ctgccagatcagtttgtcaccacccaggctcccttgcctttggctgggtgcaacttccattttaggtgttggatctgagggggaaaaaaaagagagagggagagagagagaaagaagagcaggaaagatcccgaaaggaggaagaggtggcgaaaaatcaactgccctgctggatttgtctttctcagcaccttggcgaagccttgggtttctttcttaaaggactgatttttagaactccacatttgaggatcacagtcaccttctatatagcaccatccccaggatgcaggagccggggcagattgtggagacctacacggaggaggatcctgagggagccatgtctgtagtctctgtggagacctcagatgatgggaccactcggcgcacagagaccacggtcaagaaagtagtgaagactgtgacaacacggacagtacagccagtcgctatgggaccagacgggttgcctgtggatgcttcatcagtttctaacaactatatccagactttgggtcgtgatttccgcaagaatggcaatgggggacctggtccctatgtggggcaagctggcactgctacccttcctaggaacttccactaccctcctgatggttatagtcgccactatgaagatggttatccaggtggcagtgataactatggcagtctgtcccgggtgacccgcattgaggagcggtataggcccagcatggaaggctaccgggcacctagtagacaggatgtgtatgggccccaaccccaggttcgggtaggtgggagcagcgtggatctgcatcgctttcatccagagccttatgggctagaggatgaccagcgtagtatgggctatgatgacctggattatggtatgatgtctgattatggcactgcccgtcggactgggacaccctctgaccctcgtcggcgcctcaggagctatgaagacatgattggtgaggaggtgccatcggatcaatactactgggctcctttggcccagcatgagcgaggaagtttagcaagcttggatagcctgcgcaaaggagggcctccacctcctaattggagacagccagagctgccagaggtgatcgccatgcttggattccgcttggatgctgtcaagtccaatgcagctgcatacctgcaacacttatgctaccgcaatgacaaggtgaagactgacgtgcggaagctcaagggcatcccagtactggtgggattgttagaccatcccaaaaaggaagtgcaccttggagcctgtggagctctcaagaatatctcttttggacgtgaccaggataacaagattgccataaaaaactgtgatggtgtgcctgcccttgtgcgattgcttcgaaaggctcgtgatatggaccttactgaagttattaccggaaccctgtggaatctttcatcccatgactcaatcaaaatggagattgtggaccatgcactgcatgccttgacagatgaagtgatcattcctcattctggttgggagcgggaacctaatgaagactgtaagccacgccatattgagtgggaatcggtgctcaccaacacagctggctgccttaggaatgtaagctcagagaggagtgaagctcgccggaaacttcgggaatgtgatggtttagttgatgccctcattttcattgttcaggctgagattgggcagaaggattcagacagcaagcttgtagagaactgtgtttgccttcttcggaacttatcatatcaagttcaccgggagatcccacaggcagagcgttaccaagaggcagctcccaatgttgccaacaatactgggccacatgctgccagttgctttggggccaagaagggcaaagggaaaaaacctatagaggatccagcaaacgatacagtggatttccctaaaagaacgagtccagctcgaggctatgagctcttatttcagccagaggtggttcggatatacatctcacttcttaaggagagcaagactcctgccatcctagaagcctcagctggagctatccagaacttgtgtgctgggcgctggacgtatggtcgatacatccgctctgctctgcgtcaagagaaggctctttctgccatagctgacctcctgactaatgaacatgaacgggtggtgaaagctgcatctggagcactgagaaacctggctgtggatgctcgcaacaaagaattaattggtaaacatgctattcctaacttggtaaagaatctgccaggaggacagcagaactcctcttggaatttctctgaggacactgtcatctctattttgaacactatcaacgaggttatcgctgagaacttggaggctgccaaaaagcttcgagagacacagggtattgagaagctggtgttgatcaacaaatcagggaaccgctcagaaaaagaagttcgagcagcagcacttgtattacagacaatctggggatataaggaactgcggaagccactggaaaaagaaggatggaagaaatcagactttcaggtgaatctaaacaatgcttcccgaagccagagcagtcattcatatgatgatagtactctccctctcattgaccggaaccaaaaatcagataagaaacctgatcgggaagaaattcagatgagcaatatgggatcaaacacaaaatcactagataacaactattccacaccaaatgagagaggagaccacaatagaacactggatcgatcgggggatctaggcgacatggagccattgaagggaacaacacccttgatgcagaagatttagcaccactatctccgttccatctgggcttatatgtacttttattttttggtggtgaaattgactgatgattttcctttttcttcgctggactattgtgccaactgccaggctgcctcctgcccttacagccctaagtggctgccttctttccatcaactcccaacttcttcctgtgaagtttaattgtctcaacgcctccccctcccccattccctccatttttctcccaagaaacctgactcaattatttgcatattttgagaaactgctgcagattagttctttttgccagttttccctggaactcctggccttttgtggaggggagggatggagagaataggaatcttcactagaagccgtgggaagaattggaagttacatgctgtatatgcaatgtccagcagtctgataaactgacgattcttaatcaagatttttttcctgatggggaagggacttttattttcttttagagaggggaaagtgtgagctcttcccttattcctaatggctatttttgaagcaaagaaggccagcaacattggcacatgccacctggcaaaggacccttgagtaagtgaaggtctcctaaaactgggattaagaaaccttgctctcctcatctccaaggcagggaccatcaagaacctacagactccatctcttctgcaagcctcatgccaaccctgggctattgctgctgccccttaaacacaggctgtccttaacccacctctcctgccctgtgatatgtctgctgagttggcctggccatttccaagaggctgtagaaaggggagaatgtcaaggaagacttttggtagagaaggagcagaaagatgtgtttttgggaagaagaagacctctaggaggagctagtaggaatgtacatgaagcaattagtctgaaactggcttccccactcccccgtttctccttttcctatccttataggcctgtcccttgcctctgccctggattggttggcaaactataggacttgatgtacataactcctgtcccttttcccttacaaggtggggattgcccctggctttgcctcttctttgtgcctttggcctggggtgcatctcctcccgcccttccatgtgcctttctttgcctctgcagtctcatttctcataattttgcaaattatattttgttgctttcttacctactattggccctaaatagcagaaagaagagaagtgaccgagagaacctcagattcttcattgaggattggtatagccatgatttcagtcatagcaagcttttgctcaacagcatatgggtgggatttggcaaaaatcctattctgatgaatctcaaagtaaggctggtaagagaagtgagtggtgtgactcttactccttaggtgcccagaatttaccatcatctctgaaggagttacagggaagtggtctccccaattctcccctccctccagtattgccccctctcactttagcatatattaattagcaggttgggctagagaaatcagctgctatgcgggttgattattattattatttctaatccttttccttatttgccttctactccccttaatctaatctaaaagctctgttccatgcaactggagttccttatccctctcttccccttcccttatatattgaggctatggggtaggagaaaagtgcacaacccaccaccccctctactcgtgcattaaaatttcttatttacccttttcccccttcccatttcttcccactttcatctaccttttctggcaaaaaggagccttttgctctctgtgaccctaagagcacactgcacagggaaaattgccccatccagacctggctccactcttgatctctcttgtcctcttctgctcttttcctggtgctcttttttctcggtggggtgtgggtaatagaacagccgtgggcttttggggacctttaacttttttttctctcttttgtttataaaaaacactaaacattcaattccagagaacccaaaatcccaccttcccaccgaacactactaaggggcttgtgttctgctccataccttttctcttttctttctgtcttgttaatgcttttaaaaacaaatgagttttttatataaataaagtttttaaagtgtgtatgtggggggtctgtgtcatttcttcacttcaagctgttatttcttccctgctttgcatctttgttacttccttatgtatcagtgtcctttccagagcaaccagaaggaggttataccaggatttattttgagctcagccccaactctttatcaagcaacattcttgttaactatatgtgaaacattttttcttctgaagattcttaaaaattgaatgtggctgaagttgaacatgggagcttattgctaatttagagataggaaactgaagcataaagaattaatgacttactttaattactggaattcttctgcaacatttgacaaaactaaccttgaataaggcccactgtaatacgtagctctcttaaatataacacttaggactagaagattagaaactaccaatcccaactacgtaataggaaaatgtaggatcaaaaggcccatgtatataagtactgaccactgggccataatgttgcttctcaggctatatgcagtcctttagtcagaagtcaataggcctatttattaatattttacagaccatattacctggattaccagggactatctttgctgcagagatcaagggttaagatctatgggaagatacttatttttctgaggtccttatgtcctgtcatataattaaagactcaagagaatttatgtgaaatgctttctgtatgccccaatctttagattaaaattatatacctgctcct

SEQ ID NO: 18860 - DNA, 5039 bp, Homo sapiens
  SIMILAR (319)..(2166): 1001254mologous to Homo sapiens p120 catenin isoform 1A,accession number AF062324,Smith-Waterman Score=3201.
ctgccagatcagtttgtcaccacccaggctcccttgcctttggctgggtgcaacttccattttaggtgttggatctgagggggaaaaaaaagagagagggagagagagagaaagaagagcaggaaagatcccgaaaggaggaagaggtggcgaaaaatcaactgccctgctggatttgtctttctcagcaccttggcgaagccttgggtttctttcttaaaggactgatttttagaactccacatttgaggtgtgtggcttttgaagaaaatgtatgtactgacgggaaaaggaagataagcaagtcgaatttttgtcttacggagctatgaagacatgattggtgaggaggtgccatcggatcaatactactgggctcctttggcccagcatgagcgaggaagtttagcaagcttggatagcctgcgcaaaggagggcctccacctcctaattggagacagccagagctgccagaggtgatcgccatgcttggattccgcttggatgctgtcaagtccaatgcagctgcatacctgcaacacttatgctaccgcaatgacaaggtgaagactgacgtgcggaagctcaagggcatcccagtactggtgggattgttagaccatcccaaaaaggaagtgcaccttggagcctgtggagctctcaagaatatctcttttggacgtgaccaggataacaagattgccataaaaaactgtgatggtgtgcctgcccttgtgcgattgcttcgaaaggctcgtgatatggaccttactgaagttattaccggaaccctgtggaatctttcatcccatgactcaatcaaaatggagattgtggaccatgcactgcatgccttgacagatgaagtgatcattcctcattctggttgggagcgggaacctaatgaagactgtaagccacgccatattgagtgggaatcggtgctcaccaacacagctggctgccttaggaatgtaagctcagagaggagtgaagctcgccggaaacttcgggaatgtgatggtttagttgatgccctcattttcattgttcaggctgagattgggcagaaggattcagacagcaagcttgtagagaactgtgtttgccttcttcggaacttatcatatcaagttcaccgggagatcccacaggcagagcgttaccaagaggcagctcccaatgttgccaacaatactgggccacatgctgccagttgctttggggccaagaagggcaaagggaaaaaacctatagaggatccagcaaacgatacagtggatttccctaaaagaacgagtccagctcgaggctatgagctcttatttcagccagaggtggttcggatatacatctcacttcttaaggagagcaagactcctgccatcctagaagcctcagctggagctatccagaacttgtgtgctgggcgctggacgtatggtcgatacatccgctctgctctgcgtcaagagaaggctctttctgccatagctgacctcctgactaatgaacatgaacgggtggtgaaagctgcatctggagcactgagaaacctggctgtggatgctcgcaacaaagaattaattggtaaacatgctattcctaacttggtaaagaatctgccaggaggacagcagaactcctcttggaatttctctgaggacactgtcatctctattttgaacactatcaacgaggttatcgctgagaacttggaggctgccaaaaagcttcgagagacacagggtattgagaagctggtgttgatcaacaaatcagggaaccgctcagaaaaagaagttcgagcagcagcacttgtattacagacaatctggggatataaggaactgcggaagccactggaaaaagaaggatggaagaaatcagactttcaggtgaatctaaacaatgcttcccgaagccagagcagtcattcatatgatgatagtactctccctctcattgaccggaaccaaaaatcagataagaaacctgatcgggaagaaattcagatgagcaatatgggatcaaacacaaaatcactagataacaactattccacaccaaatgagagaggagaccacaatagaacactggatcgatcgggggatctaggcgacatggagccattgaagggaacaacacccttgatgcagaagatttagcaccactatctccgttccatctgggcttatatgtacttttattttttggtggtgaaattgactgatgattttcctttttcttcgctggactattgtgccaactgccaggctgcctcctgcccttacagccctaagtggctgccttctttccatcaactcccaacttcttcctgtgaagtttaattgtctcaacgcctccccctcccccattccctccatttttctcccaagaaacctgactcaattatttgcatattttgagaaactgctgcagattagttctttttgccagttttccctggaactcctggccttttgtggaggggagggatggagagaataggaatcttcactagaagccgtgggaagaattggaagttacatgctgtatatgcaatgtccagcagtctgataaactgacgattcttaatcaagatttttttcctgatggggaagggacttttattttcttttagagaggggaaagtgtgagctcttcccttattcctaatggctatttttgaagcaaagaaggccagcaacattggcacatgccacctggcaaaggacccttgagtaagtgaaggtctcctaaaactgggattaagaaaccttgctctcctcatctccaaggcagggaccatcaagaacctacagactccatctcttctgcaagcctcatgccaaccctgggctattgctgctgccccttaaacacaggctgtccttaacccacctctcctgccctgtgatatgtctgctgagttggcctggccatttccaagaggctgtagaaaggggagaatgtcaaggaagacttttggtagagaaggagcagaaagatgtgtttttgggaagaagaagacctctaggaggagctagtaggaatgtacatgaagcaattagtctgaaactggcttccccactcccccgtttctccttttcctatccttataggcctgtcccttgcctctgccctggattggttggcaaactataggacttgatgtacataactcctgtcccttttcccttacaaggtggggattgcccctggctttgcctcttctttgtgcctttggcctggggtgcatctcctcccgcccttccatgtgcctttctttgcctctgcagtctcatttctcataattttgcaaattatattttgttgctttcttacctactattggccctaaatagcagaaagaagagaagtgaccgagagaacctcagattcttcattgaggattggtatagccatgatttcagtcatagcaagcttttgctcaacagcatatgggtgggatttggcaaaaatcctattctgatgaatctcaaagtaaggctggtaagagaagtgagtggtgtgactcttactccttaggtgcccagaatttaccatcatctctgaaggagttacagggaagtggtctccccaattctcccctccctccagtattgccccctctcactttagcatatattaattagcaggttgggctagagaaatcagctgctatgcgggttgattattattattatttctaatccttttccttatttgccttctactccccttaatctaatctaaaagctctgttccatgcaactggagttccttatccctctcttccccttcccttatatattgaggctatggggtaggagaaaagtgcacaacccaccaccccctctactcgtgcattaaaatttcttatttacccttttcccccttcccatttcttcccactttcatctaccttttctggcaaaaaggagccttttgctctctgtgaccctaagagcacactgcacagggaaaattgccccatccagacctggctccactcttgatctctcttgtcctcttctgctcttttcctggtgctcttttttctcggtggggtgtgggtaatagaacagccgtgggcttttggggacctttaacttttttttctctcttttgtttataaaaaacactaaacattcaattccagagaacccaaaatcccaccttcccaccgaacactactaaggggcttgtgttctgctccataccttttctcttttctttctgtcttgttaatgcttttaaaaacaaatgagttttttatataaataaagtttttaaagtgtgtatgtggggggtctgtgtcatttcttcacttcaagctgttatttcttccctgctttgcatctttgttacttccttatgtatcagtgtcctttccagagcaaccagaaggaggttataccaggatttattttgagctcagccccaactctttatcaagcaacattcttgttaactatatgtgaaacattttttcttctgaagattcttaaaaattgaatgtggctgaagttgaacatgggagcttattgctaatttagagataggaaactgaagcataaagaattaatgacttactttaattactggaattcttctgcaacatttgacaaaactaaccttgaataaggcccactgtaatacgtagctctcttaaatataacacttaggactagaagattagaaactaccaatcccaactacgtaataggaaaatgtaggatcaaaaggcccatgtatataagtactgaccactgggccataatgttgcttctcaggctatatgcagtcctttagtcagaagtcaataggcctatttattaatattttacagaccatattacctggattaccagggactatctttgctgcagagatcaagggttaagatctatgggaagatacttatttttctgaggtccttatgtcctgtcatataattaaagactcaagagaatttatgtgaaatgctttctgtatgccccaatctttagattaaaattatatacctgctcct

SEQ ID NO: 18861 - DNA, 6135 bp, Homo sapiens
  SIMILAR (464)..(3262): 1001254mologous to Homo sapiens p120 catenin isoform 1A,accession number AF062324,Smith-Waterman Score=4871.
ctgccagatcagtttgtcaccacccaggctcccttgcctttggctgggtgcaacttccattttaggtgttggatctgagggggaaaaaaaagagagagggagagagagagaaagaagagcaggaaagatcccgaaaggaggaagaggtggcgaaaaatcaactgccctgctggatttgtctttctcagcaccttggcgaagccttgggtttctttcttaaaggactgatttttagaactccacatttgagctctctccttcctgcttcctccttgctgtggtggctgggatgctccttccatgattttttgaatctagactgggctgttctctgtgttaaaccaatcagttgcgaccttctcttaacagtgtgaagtgagggggtctctctccctccttctccttcctctgtgattcaccttcctttttaccctgccctgcggcggctccgccccttaccttcatggacgactcagaggtggagtcgaccgccagcatcttggcctctgtgaaggaacaagaggcccagtttgagaagctgacccgggcgctggaggaggaacggcgccacgtctcggcgcagctggaacgcgtccgggtctcaccacaagatgccaacccactcatggccaacggcacactcacccgccggcatcagaacggccggtttgtgggcgatgctgaccttgaaagacagaaattttcagatttgaaactcaacggaccccaggatcacagtcaccttctatatagcaccatccccaggatgcaggagccggggcagattgtggagacctacacggaggaggatcctgagggagccatgtctgtagtctctgtggagacctcagatgatgggaccactcggcgcacagagaccacggtcaagaaagtagtgaagactgtgacaacacggacagtacagccagtcgctatgggaccagacgggttgcctgtggatgcttcatcagtttctaacaactatatccagactttgggtcgtgatttccgcaagaatggcaatgggggacctggtccctatgtggggcaagctggcactgctacccttcctaggaacttccactaccctcctgatggttatagtcgccactatgaagatggttatccaggtggcagtgataactatggcagtctgtcccgggtgacccgcattgaggagcggtataggcccagcatggaaggctaccgggcacctagtagacaggatgtgtatgggccccaaccccaggttcgggtaggtgggagcagcgtggatctgcatcgctttcatccagagccttatgggctagaggatgaccagcgtagtatgggctatgatgacctggattatggtatgatgtctgattatggcactgcccgtcggactgggacaccctctgaccctcgtcggcgcctcaggagctatgaagacatgattggtgaggaggtgccatcggatcaatactactgggctcctttggcccagcatgagcgaggaagtttagcaagcttggatagcctgcgcaaaggagggcctccacctcctaattggagacagccagagctgccagaggtgatcgccatgcttggattccgcttggatgctgtcaagtccaatgcagctgcatacctgcaacacttatgctaccgcaatgacaaggtgaagactgacgtgcggaagctcaagggcatcccagtactggtgggattgttagaccatcccaaaaaggaagtgcaccttggagcctgtggagctctcaagaatatctcttttggacgtgaccaggataacaagattgccataaaaaactgtgatggtgtgcctgcccttgtgcgattgcttcgaaaggctcgtgatatggaccttactgaagttattaccggaaccctgtggaatctttcatcccatgactcaatcaaaatggagattgtggaccatgcactgcatgccttgacagatgaagtgatcattcctcattctggttgggagcgggaacctaatgaagactgtaagccacgccatattgagtgggaatcggtgctcaccaacacagctggctgccttaggaatgtaagctcagagaggagtgaagctcgccggaaacttcgggaatgtgatggtttagttgatgccctcattttcattgttcaggctgagattgggcagaaggattcagacagcaagcttgtagagaactgtgtttgccttcttcggaacttatcatatcaagttcaccgggagatcccacaggcagagcgttaccaagaggcagctcccaatgttgccaacaatactgggccacatgctgccagttgctttggggccaagaagggcaaagggaaaaaacctatagaggatccagcaaacgatacagtggatttccctaaaagaacgagtccagctcgaggctatgagctcttatttcagccagaggtggttcggatatacatctcacttcttaaggagagcaagactcctgccatcctagaagcctcagctggagctatccagaacttgtgtgctgggcgctggacgtatggtcgatacatccgctctgctctgcgtcaagagaaggctctttctgccatagctgacctcctgactaatgaacatgaacgggtggtgaaagctgcatctggagcactgagaaacctggctgtggatgctcgcaacaaagaattaattggtaaacatgctattcctaacttggtaaagaatctgccaggaggacagcagaactcctcttggaatttctctgaggacactgtcatctctattttgaacactatcaacgaggttatcgctgagaacttggaggctgccaaaaagcttcgagagacacagggtattgagaagctggtgttgatcaacaaatcagggaaccgctcagaaaaagaagttcgagcagcagcacttgtattacagacaatctggggatataaggaactgcggaagccactggaaaaagaaggatggaagaaatcagactttcaggtgaatctaaacaatgcttcccgaagccagagcagtcattcatatgatgatagtactctccctctcattgaccggaaccaaaaatcagataagaaacctgatcgggaagaaattcagatgagcaatatgggatcaaacacaaaatcactagataacaactattccacaccaaatgagagaggagaccacaatagaacactggatcgatcgggggatctaggcgacatggagccattgaagggaacaacacccttgatgcagaagatttagcaccactatctccgttccatctgggcttatatgtacttttattttttggtggtgaaattgactgatgattttcctttttcttcgctggactattgtgccaactgccaggctgcctcctgcccttacagccctaagtggctgccttctttccatcaactcccaacttcttcctgtgaagtttaattgtctcaacgcctccccctcccccattccctccatttttctcccaagaaacctgactcaattatttgcatattttgagaaactgctgcagattagttctttttgccagttttccctggaactcctggccttttgtggaggggagggatggagagaataggaatcttcactagaagccgtgggaagaattggaagttacatgctgtatatgcaatgtccagcagtctgataaactgacgattcttaatcaagatttttttcctgatggggaagggacttttattttcttttagagaggggaaagtgtgagctcttcccttattcctaatggctatttttgaagcaaagaaggccagcaacattggcacatgccacctggcaaaggacccttgagtaagtgaaggtctcctaaaactgggattaagaaaccttgctctcctcatctccaaggcagggaccatcaagaacctacagactccatctcttctgcaagcctcatgccaaccctgggctattgctgctgccccttaaacacaggctgtccttaacccacctctcctgccctgtgatatgtctgctgagttggcctggccatttccaagaggctgtagaaaggggagaatgtcaaggaagacttttggtagagaaggagcagaaagatgtgtttttgggaagaagaagacctctaggaggagctagtaggaatgtacatgaagcaattagtctgaaactggcttccccactcccccgtttctccttttcctatccttataggcctgtcccttgcctctgccctggattggttggcaaactataggacttgatgtacataactcctgtcccttttcccttacaaggtggggattgcccctggctttgcctcttctttgtgcctttggcctggggtgcatctcctcccgcccttccatgtgcctttctttgcctctgcagtctcatttctcataattttgcaaattatattttgttgctttcttacctactattggccctaaatagcagaaagaagagaagtgaccgagagaacctcagattcttcattgaggattggtatagccatgatttcagtcatagcaagcttttgctcaacagcatatgggtgggatttggcaaaaatcctattctgatgaatctcaaagtaaggctggtaagagaagtgagtggtgtgactcttactccttaggtgcccagaatttaccatcatctctgaaggagttacagggaagtggtctccccaattctcccctccctccagtattgccccctctcactttagcatatattaattagcaggttgggctagagaaatcagctgctatgcgggttgattattattattatttctaatccttttccttatttgccttctactccccttaatctaatctaaaagctctgttccatgcaactggagttccttatccctctcttccccttcccttatatattgaggctatggggtaggagaaaagtgcacaacccaccaccccctctactcgtgcattaaaatttcttatttacccttttcccccttcccatttcttcccactttcatctaccttttctggcaaaaaggagccttttgctctctgtgaccctaagagcacactgcacagggaaaattgccccatccagacctggctccactcttgatctctcttgtcctcttctgctcttttcctggtgctcttttttctcggtggggtgtgggtaatagaacagccgtgggcttttggggacctttaacttttttttctctcttttgtttataaaaaacactaaacattcaattccagagaacccaaaatcccaccttcccaccgaacactactaaggggcttgtgttctgctccataccttttctcttttctttctgtcttgttaatgcttttaaaaacaaatgagttttttatataaataaagtttttaaagtgtgtatgtggggggtctgtgtcatttcttcacttcaagctgttatttcttccctgctttgcatctttgttacttccttatgtatcagtgtcctttccagagcaaccagaaggaggttataccaggatttattttgagctcagccccaactctttatcaagcaacattcttgttaactatatgtgaaacattttttcttctgaagattcttaaaaattgaatgtggctgaagttgaacatgggagcttattgctaatttagagataggaaactgaagcataaagaattaatgacttactttaattactggaattcttctgcaacatttgacaaaactaaccttgaataaggcccactgtaatacgtagctctcttaaatataacacttaggactagaagattagaaactaccaatcccaactacgtaataggaaaatgtaggatcaaaaggcccatgtatataagtactgaccactgggccataatgttgcttctcaggctatatgcagtcctttagtcagaagtcaataggcctatttattaatattttacagaccatattacctggattaccagggactatctttgctgcagagatcaagggttaagatctatgggaagatacttatttttctgaggtccttatgtcctgtcatataattaaagactcaagagaatttatgtgaaatgctttctgtatgccccaatctttagattaaaattatatacctgctcct

SEQ ID NO: 18862 - DNA, 6099 bp, Homo sapiens
  SIMILAR (440)..(3226): 991254mologous to Homo sapiens p120 catenin isoform 1A,accession number AF062324,Smith-Waterman Score=4847.
ctgccagatcagtttgtcaccacccaggctcccttgcctttggctgggtgcaacttccattttaggtgttggatctgagggggaaaaaaaagagagagggagagagagagaaagaagagcaggaaagatcccgaaaggaggaagaggtggcgaaaaatcaactgccctgctggatttgtctttctcagcaccttggcgaagccttgggtttctttcttaaaggactgatttttagaactccacatttgaggtgtgtggcttttgaagaaaatgtatgtactgacgggaaaaggaagataagcaagtcgaatttttgtcttacgctctctccttcctgcttcctccttgctgtggtggctgggatgctccttccatgattttttgaatctagactgggctgttctctgtgttaaaccaatcagttgcgaccttctcttaacaggtggagtcgaccgccagcatcttggcctctgtgaaggaacaagaggcccagtttgagaagctgacccgggcgctggaggaggaacggcgccacgtctcggcgcagctggaacgcgtccgggtctcaccacaagatgccaacccactcatggccaacggcacactcacccgccggcatcagaacggccggtttgtgggcgatgctgaccttgaaagacagaaattttcagatttgaaactcaacggaccccaggatcacagtcaccttctatatagcaccatccccaggatgcaggagccggggcagattgtggagacctacacggaggaggatcctgagggagccatgtctgtagtctctgtggagacctcagatgatgggaccactcggcgcacagagaccacggtcaagaaagtagtgaagactgtgacaacacggacagtacagccagtcgctatgggaccagacgggttgcctgtggatgcttcatcagtttctaacaactatatccagactttgggtcgtgatttccgcaagaatggcaatgggggacctggtccctatgtggggcaagctggcactgctacccttcctaggaacttccactaccctcctgatggttatagtcgccactatgaagatggttatccaggtggcagtgataactatggcagtctgtcccgggtgacccgcattgaggagcggtataggcccagcatggaaggctaccgggcacctagtagacaggatgtgtatgggccccaaccccaggttcgggtaggtgggagcagcgtggatctgcatcgctttcatccagagccttatgggctagaggatgaccagcgtagtatgggctatgatgacctggattatggtatgatgtctgattatggcactgcccgtcggactgggacaccctctgaccctcgtcggcgcctcaggagctatgaagacatgattggtgaggaggtgccatcggatcaatactactgggctcctttggcccagcatgagcgaggaagtttagcaagcttggatagcctgcgcaaaggagggcctccacctcctaattggagacagccagagctgccagaggtgatcgccatgcttggattccgcttggatgctgtcaagtccaatgcagctgcatacctgcaacacttatgctaccgcaatgacaaggtgaagactgacgtgcggaagctcaagggcatcccagtactggtgggattgttagaccatcccaaaaaggaagtgcaccttggagcctgtggagctctcaagaatatctcttttggacgtgaccaggataacaagattgccataaaaaactgtgatggtgtgcctgcccttgtgcgattgcttcgaaaggctcgtgatatggaccttactgaagttattaccggaaccctgtggaatctttcatcccatgactcaatcaaaatggagattgtggaccatgcactgcatgccttgacagatgaagtgatcattcctcattctggttgggagcgggaacctaatgaagactgtaagccacgccatattgagtgggaatcggtgctcaccaacacagctggctgccttaggaatgtaagctcagagaggagtgaagctcgccggaaacttcgggaatgtgatggtttagttgatgccctcattttcattgttcaggctgagattgggcagaaggattcagacagcaagcttgtagagaactgtgtttgccttcttcggaacttatcatatcaagttcaccgggagatcccacaggcagagcgttaccaagaggcagctcccaatgttgccaacaatactgggccacatgctgccagttgctttggggccaagaagggcaaagggaaaaaacctatagaggatccagcaaacgatacagtggatttccctaaaagaacgagtccagctcgaggctatgagctcttatttcagccagaggtggttcggatatacatctcacttcttaaggagagcaagactcctgccatcctagaagcctcagctggagctatccagaacttgtgtgctgggcgctggacgtatggtcgatacatccgctctgctctgcgtcaagagaaggctctttctgccatagctgacctcctgactaatgaacatgaacgggtggtgaaagctgcatctggagcactgagaaacctggctgtggatgctcgcaacaaagaattaattggtaaacatgctattcctaacttggtaaagaatctgccaggaggacagcagaactcctcttggaatttctctgaggacactgtcatctctattttgaacactatcaacgaggttatcgctgagaacttggaggctgccaaaaagcttcgagagacacagggtattgagaagctggtgttgatcaacaaatcagggaaccgctcagaaaaagaagttcgagcagcagcacttgtattacagacaatctggggatataaggaactgcggaagccactggaaaaagaaggatggaagaaatcagactttcaggtgaatctaaacaatgcttcccgaagccagagcagtcattcatatgatgatagtactctccctctcattgaccggaaccaaaaatcagataagaaacctgatcgggaagaaattcagatgagcaatatgggatcaaacacaaaatcactagataacaactattccacaccaaatgagagaggagaccacaatagaacactggatcgatcgggggatctaggcgacatggagccattgaagggaacaacacccttgatgcagaagatttagcaccactatctccgttccatctgggcttatatgtacttttattttttggtggtgaaattgactgatgattttcctttttcttcgctggactattgtgccaactgccaggctgcctcctgcccttacagccctaagtggctgccttctttccatcaactcccaacttcttcctgtgaagtttaattgtctcaacgcctccccctcccccattccctccatttttctcccaagaaacctgactcaattatttgcatattttgagaaactgctgcagattagttctttttgccagttttccctggaactcctggccttttgtggaggggagggatggagagaataggaatcttcactagaagccgtgggaagaattggaagttacatgctgtatatgcaatgtccagcagtctgataaactgacgattcttaatcaagatttttttcctgatggggaagggacttttattttcttttagagaggggaaagtgtgagctcttcccttattcctaatggctatttttgaagcaaagaaggccagcaacattggcacatgccacctggcaaaggacccttgagtaagtgaaggtctcctaaaactgggattaagaaaccttgctctcctcatctccaaggcagggaccatcaagaacctacagactccatctcttctgcaagcctcatgccaaccctgggctattgctgctgccccttaaacacaggctgtccttaacccacctctcctgccctgtgatatgtctgctgagttggcctggccatttccaagaggctgtagaaaggggagaatgtcaaggaagacttttggtagagaaggagcagaaagatgtgtttttgggaagaagaagacctctaggaggagctagtaggaatgtacatgaagcaattagtctgaaactggcttccccactcccccgtttctccttttcctatccttataggcctgtcccttgcctctgccctggattggttggcaaactataggacttgatgtacataactcctgtcccttttcccttacaaggtggggattgcccctggctttgcctcttctttgtgcctttggcctggggtgcatctcctcccgcccttccatgtgcctttctttgcctctgcagtctcatttctcataattttgcaaattatattttgttgctttcttacctactattggccctaaatagcagaaagaagagaagtgaccgagagaacctcagattcttcattgaggattggtatagccatgatttcagtcatagcaagcttttgctcaacagcatatgggtgggatttggcaaaaatcctattctgatgaatctcaaagtaaggctggtaagagaagtgagtggtgtgactcttactccttaggtgcccagaatttaccatcatctctgaaggagttacagggaagtggtctccccaattctcccctccctccagtattgccccctctcactttagcatatattaattagcaggttgggctagagaaatcagctgctatgcgggttgattattattattatttctaatccttttccttatttgccttctactccccttaatctaatctaaaagctctgttccatgcaactggagttccttatccctctcttccccttcccttatatattgaggctatggggtaggagaaaagtgcacaacccaccaccccctctactcgtgcattaaaatttcttatttacccttttcccccttcccatttcttcccactttcatctaccttttctggcaaaaaggagccttttgctctctgtgaccctaagagcacactgcacagggaaaattgccccatccagacctggctccactcttgatctctcttgtcctcttctgctcttttcctggtgctcttttttctcggtggggtgtgggtaatagaacagccgtgggcttttggggacctttaacttttttttctctcttttgtttataaaaaacactaaacattcaattccagagaacccaaaatcccaccttcccaccgaacactactaaggggcttgtgttctgctccataccttttctcttttctttctgtcttgttaatgcttttaaaaacaaatgagttttttatataaataaagtttttaaagtgtgtatgtggggggtctgtgtcatttcttcacttcaagctgttatttcttccctgctttgcatctttgttacttccttatgtatcagtgtcctttccagagcaaccagaaggaggttataccaggatttattttgagctcagccccaactctttatcaagcaacattcttgttaactatatgtgaaacattttttcttctgaagattcttaaaaattgaatgtggctgaagttgaacatgggagcttattgctaatttagagataggaaactgaagcataaagaattaatgacttactttaattactggaattcttctgcaacatttgacaaaactaaccttgaataaggcccactgtaatacgtagctctcttaaatataacacttaggactagaagattagaaactaccaatcccaactacgtaataggaaaatgtaggatcaaaaggcccatgtatataagtactgaccactgggccataatgttgcttctcaggctatatgcagtcctttagtcagaagtcaataggcctatttattaatattttacagaccatattacctggattaccagggactatctttgctgcagagatcaagggttaagatctatgggaagatacttatttttctgaggtccttatgtcctgtcatataattaaagactcaagagaatttatgtgaaatgctttctgtatgccccaatctttagattaaaattatatacctgctcct

SEQ ID NO: 18863 - DNA, 473 bp, Homo sapiens
  SIMILAR (1)..(303): 951254mologous to Homo sapiens p120 catenin isoform 4AC,accession number AF062318,Smith-Waterman Score=490.
atgcttggattccgcttggatgctgtcaagtccaatgcagctgcatacctgcaacacttatgctaccgcaatgacaaggtgaagactgacgtgcggaagctcaagggcatcccagtactggtgggattgttagaccatcccaaaaaggaagtgcaccttggagcctgtggagctctcaagaatatctcttttggacgtgaccaggataacccccccgccataaaaaactgtgatggtgaaaaaacccttgtgcgattgcttcgaaaggctcgtgatatggaccttactgaagttattaccgggccaggcggtgaagggcaatcagctgttgcccgtctcactggtgaaaagaaaaaccaccctggcgcccaatacgcaaaccgcctctccccgcgcgttggccgattcattaatgcagctggcacgacaggtttcccgactggaaagcgggcagtgagcgcaacgcaattaat

SEQ ID NO: 18864 - DNA, 6012 bp, Homo sapiens
  SIMILAR (248)..(3139): 1001254mologous to Homo sapiens p120 catenin isoform 1ABC,accession number AF062341,Smith-Waterman Score=5033.
ctgccagatcagtttgtcaccacccaggctcccttgcctttggctgggtgcaacttccattttaggtgttggatctgagggggaaaaaaaagagagagggagagagagagaaagaagagcaggaaagatcccgaaaggaggaagaggtggcgaaaaatcaactgccctgctggatttgtctttctcagcaccttggcgaagccttgggtttctttcttaaaggactgatttttagaactccacatttgaggtggagtcgaccgccagcatcttggcctctgtgaaggaacaagaggcccagtttgagaagctgacccgggcgctggaggaggaacggcgccacgtctcggcgcagctggaacgcgtccgggtctcaccacaagatgccaacccactcatggccaacggcacactcacccgccggcatcagaacggccggtttgtgggcgatgctgaccttgaaagacagaaattttcagatttgaaactcaacggaccccaggatcacagtcaccttctatatagcaccatccccaggatgcaggagccggggcagattgtggagacctacacggaggaggatcctgagggagccatgtctgtagtctctgtggagacctcagatgatgggaccactcggcgcacagagaccacggtcaagaaagtagtgaagactgtgacaacacggacagtacagccagtcgctatgggaccagacgggttgcctgtggatgcttcatcagtttctaacaactatatccagactttgggtcgtgatttccgcaagaatggcaatgggggacctggtccctatgtggggcaagctggcactgctacccttcctaggaacttccactaccctcctgatggttatagtcgccactatgaagatggttatccaggtggcagtgataactatggcagtctgtcccgggtgacccgcattgaggagcggtataggcccagcatggaaggctaccgggcacctagtagacaggatgtgtatgggccccaaccccaggttcgggtaggtgggagcagcgtggatctgcatcgctttcatccagagccttatgggctagaggatgaccagcgtagtatgggctatgatgacctggattatggtatgatgtctgattatggcactgcccgtcggactgggacaccctctgaccctcgtcggcgcctcaggagctatgaagacatgattggtgaggaggtgccatcggatcaatactactgggctcctttggcccagcatgagcgaggaagtttagcaagcttggatagcctgcgcaaaggagggcctccacctcctaattggagacagccagagctgccagaggtgatcgccatgcttggattccgcttggatgctgtcaagtccaatgcagctgcatacctgcaacacttatgctaccgcaatgacaaggtgaagactgacgtgcggaagctcaagggcatcccagtactggtgggattgttagaccatcccaaaaaggaagtgcaccttggagcctgtggagctctcaagaatatctcttttggacgtgaccaggataacaagattgccataaaaaactgtgatggtgtgcctgcccttgtgcgattgcttcgaaaggctcgtgatatggaccttactgaagttattaccggaaccctgtggaatctttcatcccatgactcaatcaaaatggagattgtggaccatgcactgcatgccttgacagatgaagtgatcattcctcattctggttgggagcgggaacctaatgaagactgtaagccacgccatattgagtgggaatcggtgctcaccaacacagctggctgccttaggaatgtaagctcagagaggagtgaagctcgccggaaacttcgggaatgtgatggtttagttgatgccctcattttcattgttcaggctgagattgggcagaaggattcagacagcaagcttgtagagaactgtgtttgccttcttcggaacttatcatatcaagttcaccgggagatcccacaggcagagcgttaccaagaggcagctcccaatgttgccaacaatactgggccacatgctgccagttgctttggggccaagaagggcaaagatgagtggttctccagagggaaaaaacctatagaggatccagcaaacgatacagtggatttccctaaaagaacgagtccagctcgaggctatgagctcttatttcagccagaggtggttcggatatacatctcacttcttaaggagagcaagactcctgccatcctagaagcctcagctggagctatccagaacttgtgtgctgggcgctggacgtatggtcgatacatccgctctgctctgcgtcaagagaaggctctttctgccatagctgacctcctgactaatgaacatgaacgggtggtgaaagctgcatctggagcactgagaaacctggctgtggatgctcgcaacaaagaattaattggtaaacatgctattcctaacttggtaaagaatctgccaggaggacagcagaactcctcttggaatttctctgaggacactgtcatctctattttgaacactatcaacgaggttatcgctgagaacttggaggctgccaaaaagcttcgagagacacagggtattgagaagctggtgttgatcaacaaatcagggaaccgctcagaaaaagaagttcgagcagcagcacttgtattacagacaatctggggatataaggaactgcggaagccactggaaaaagaaggatggaagaaatcagactttcaggtgaatctaaacaatgcttcccgaagccagagcagtcattcatatgatgatagtactctccctctcattgaccggaaccaaaaatcagataagaaacctgatcgggaagaaattcagatgagcaatatgggatcaaacacaaaatcactagataacaactattccacaccaaatgagagaggagaccacaatagaacactggatcgatcgggggatctaggcgacatggagccattgaagggaacaacacccttgatgcaggacgaggggcaggaatctctggaggaagagttggatgtgttggttttggatgatgaggggggccaagtgtcttacccctccatgcagaagatttagcaccactatctccgttccatctgggcttatatgtacttttattttttggtggtgaaattgactgatgattttcctttttcttcgctggactattgtgccaactgccaggctgcctcctgcccttacagccctaagtggctgccttctttccatcaactcccaacttcttcctgtgaagtttaattgtctcaacgcctccccctcccccattccctccatttttctcccaagaaacctgactcaattatttgcatattttgagaaactgctgcagattagttctttttgccagttttccctggaactcctggccttttgtggaggggagggatggagagaataggaatcttcactagaagccgtgggaagaattggaagttacatgctgtatatgcaatgtccagcagtctgataaactgacgattcttaatcaagatttttttcctgatggggaagggacttttattttcttttagagaggggaaagtgtgagctcttcccttattcctaatggctatttttgaagcaaagaaggccagcaacattggcacatgccacctggcaaaggacccttgagtaagtgaaggtctcctaaaactgggattaagaaaccttgctctcctcatctccaaggcagggaccatcaagaacctacagactccatctcttctgcaagcctcatgccaaccctgggctattgctgctgccccttaaacacaggctgtccttaacccacctctcctgccctgtgatatgtctgctgagttggcctggccatttccaagaggctgtagaaaggggagaatgtcaaggaagacttttggtagagaaggagcagaaagatgtgtttttgggaagaagaagacctctaggaggagctagtaggaatgtacatgaagcaattagtctgaaactggcttccccactcccccgtttctccttttcctatccttataggcctgtcccttgcctctgccctggattggttggcaaactataggacttgatgtacataactcctgtcccttttcccttacaaggtggggattgcccctggctttgcctcttctttgtgcctttggcctggggtgcatctcctcccgcccttccatgtgcctttctttgcctctgcagtctcatttctcataattttgcaaattatattttgttgctttcttacctactattggccctaaatagcagaaagaagagaagtgaccgagagaacctcagattcttcattgaggattggtatagccatgatttcagtcatagcaagcttttgctcaacagcatatgggtgggatttggcaaaaatcctattctgatgaatctcaaagtaaggctggtaagagaagtgagtggtgtgactcttactccttaggtgcccagaatttaccatcatctctgaaggagttacagggaagtggtctccccaattctcccctccctccagtattgccccctctcactttagcatatattaattagcaggttgggctagagaaatcagctgctatgcgggttgattattattattatttctaatccttttccttatttgccttctactccccttaatctaatctaaaagctctgttccatgcaactggagttccttatccctctcttccccttcccttatatattgaggctatggggtaggagaaaagtgcacaacccaccaccccctctactcgtgcattaaaatttcttatttacccttttcccccttcccatttcttcccactttcatctaccttttctggcaaaaaggagccttttgctctctgtgaccctaagagcacactgcacagggaaaattgccccatccagacctggctccactcttgatctctcttgtcctcttctgctcttttcctggtgctcttttttctcggtggggtgtgggtaatagaacagccgtgggcttttggggacctttaacttttttttctctcttttgtttataaaaaacactaaacattcaattccagagaacccaaaatcccaccttcccaccgaacactactaaggggcttgtgttctgctccataccttttctcttttctttctgtcttgttaatgcttttaaaaacaaatgagttttttatataaataaagtttttaaagtgtgtatgtggggggtctgtgtcatttcttcacttcaagctgttatttcttccctgctttgcatctttgttacttccttatgtatcagtgtcctttccagagcaaccagaaggaggttataccaggatttattttgagctcagccccaactctttatcaagcaacattcttgttaactatatgtgaaacattttttcttctgaagattcttaaaaattgaatgtggctgaagttgaacatgggagcttattgctaatttagagataggaaactgaagcataaagaattaatgacttactttaattactggaattcttctgcaacatttgacaaaactaaccttgaataaggcccactgtaatacgtagctctcttaaatataacacttaggactagaagattagaaactaccaatcccaactacgtaataggaaaatgtaggatcaaaaggcccatgtatataagtactgaccactgggccataatgttgcttctcaggctatatgcagtcctttagtcagaagtcaataggcctatttattaatattttacagaccatattacctggattaccagggactatctttgctgcagagatcaagggttaagatctatgggaagatacttatttttctgaggtccttatgtcctgtcatataattaaagactcaagagaatttatgtgaaatgctttctgtatgccccaatctttagattaaaattatatacctgctcct

SEQ ID NO: 18865 - DNA, 5071 bp, Homo sapiens
  SIMILAR (246)..(2198): 1001254mologous to Homo sapiens p120 catenin isoform 2ABC,accession number AF062319,Smith-Waterman Score=3384.
ctgccagatcagtttgtcaccacccaggctcccttgcctttggctgggtgcaacttccattttaggtgttggatctgagggggaaaaaaaagagagagggagagagagagaaagaagagcaggaaagatcccgaaaggaggaagaggtggcgaaaaatcaactgccctgctggatttgtctttctcagcaccttggcgaagccttgggtttctttcttaaaggactgatttttagaactccacatttgaggagctatgaagacatgattggtgaggaggtgccatcggatcaatactactgggctcctttggcccagcatgagcgaggaagtttagcaagcttggatagcctgcgcaaaggagggcctccacctcctaattggagacagccagagctgccagaggtgatcgccatgcttggattccgcttggatgctgtcaagtccaatgcagctgcatacctgcaacacttatgctaccgcaatgacaaggtgaagactgacgtgcggaagctcaagggcatcccagtactggtgggattgttagaccatcccaaaaaggaagtgcaccttggagcctgtggagctctcaagaatatctcttttggacgtgaccaggataacaagattgccataaaaaactgtgatggtgtgcctgcccttgtgcgattgcttcgaaaggctcgtgatatggaccttactgaagttattaccggaaccctgtggaatctttcatcccatgactcaatcaaaatggagattgtggaccatgcactgcatgccttgacagatgaagtgatcattcctcattctggttgggagcgggaacctaatgaagactgtaagccacgccatattgagtgggaatcggtgctcaccaacacagctggctgccttaggaatgtaagctcagagaggagtgaagctcgccggaaacttcgggaatgtgatggtttagttgatgccctcattttcattgttcaggctgagattgggcagaaggattcagacagcaagcttgtagagaactgtgtttgccttcttcggaacttatcatatcaagttcaccgggagatcccacaggcagagcgttaccaagaggcagctcccaatgttgccaacaatactgggccacatgctgccagttgctttggggccaagaagggcaaagatgagtggttctccagagggaaaaaacctatagaggatccagcaaacgatacagtggatttccctaaaagaacgagtccagctcgaggctatgagctcttatttcagccagaggtggttcggatatacatctcacttcttaaggagagcaagactcctgccatcctagaagcctcagctggagctatccagaacttgtgtgctgggcgctggacgtatggtcgatacatccgctctgctctgcgtcaagagaaggctctttctgccatagctgacctcctgactaatgaacatgaacgggtggtgaaagctgcatctggagcactgagaaacctggctgtggatgctcgcaacaaagaattaattggtaaacatgctattcctaacttggtaaagaatctgccaggaggacagcagaactcctcttggaatttctctgaggacactgtcatctctattttgaacactatcaacgaggttatcgctgagaacttggaggctgccaaaaagcttcgagagacacagggtattgagaagctggtgttgatcaacaaatcagggaaccgctcagaaaaagaagttcgagcagcagcacttgtattacagacaatctggggatataaggaactgcggaagccactggaaaaagaaggatggaagaaatcagactttcaggtgaatctaaacaatgcttcccgaagccagagcagtcattcatatgatgatagtactctccctctcattgaccggaaccaaaaatcagataagaaacctgatcgggaagaaattcagatgagcaatatgggatcaaacacaaaatcactagataacaactattccacaccaaatgagagaggagaccacaatagaacactggatcgatcgggggatctaggcgacatggagccattgaagggaacaacacccttgatgcaggacgaggggcaggaatctctggaggaagagttggatgtgttggttttggatgatgaggggggccaagtgtcttacccctccatgcagaagatttagcaccactatctccgttccatctgggcttatatgtacttttattttttggtggtgaaattgactgatgattttcctttttcttcgctggactattgtgccaactgccaggctgcctcctgcccttacagccctaagtggctgccttctttccatcaactcccaacttcttcctgtgaagtttaattgtctcaacgcctccccctcccccattccctccatttttctcccaagaaacctgactcaattatttgcatattttgagaaactgctgcagattagttctttttgccagttttccctggaactcctggccttttgtggaggggagggatggagagaataggaatcttcactagaagccgtgggaagaattggaagttacatgctgtatatgcaatgtccagcagtctgataaactgacgattcttaatcaagatttttttcctgatggggaagggacttttattttcttttagagaggggaaagtgtgagctcttcccttattcctaatggctatttttgaagcaaagaaggccagcaacattggcacatgccacctggcaaaggacccttgagtaagtgaaggtctcctaaaactgggattaagaaaccttgctctcctcatctccaaggcagggaccatcaagaacctacagactccatctcttctgcaagcctcatgccaaccctgggctattgctgctgccccttaaacacaggctgtccttaacccacctctcctgccctgtgatatgtctgctgagttggcctggccatttccaagaggctgtagaaaggggagaatgtcaaggaagacttttggtagagaaggagcagaaagatgtgtttttgggaagaagaagacctctaggaggagctagtaggaatgtacatgaagcaattagtctgaaactggcttccccactcccccgtttctccttttcctatccttataggcctgtcccttgcctctgccctggattggttggcaaactataggacttgatgtacataactcctgtcccttttcccttacaaggtggggattgcccctggctttgcctcttctttgtgcctttggcctggggtgcatctcctcccgcccttccatgtgcctttctttgcctctgcagtctcatttctcataattttgcaaattatattttgttgctttcttacctactattggccctaaatagcagaaagaagagaagtgaccgagagaacctcagattcttcattgaggattggtatagccatgatttcagtcatagcaagcttttgctcaacagcatatgggtgggatttggcaaaaatcctattctgatgaatctcaaagtaaggctggtaagagaagtgagtggtgtgactcttactccttaggtgcccagaatttaccatcatctctgaaggagttacagggaagtggtctccccaattctcccctccctccagtattgccccctctcactttagcatatattaattagcaggttgggctagagaaatcagctgctatgcgggttgattattattattatttctaatccttttccttatttgccttctactccccttaatctaatctaaaagctctgttccatgcaactggagttccttatccctctcttccccttcccttatatattgaggctatggggtaggagaaaagtgcacaacccaccaccccctctactcgtgcattaaaatttcttatttacccttttcccccttcccatttcttcccactttcatctaccttttctggcaaaaaggagccttttgctctctgtgaccctaagagcacactgcacagggaaaattgccccatccagacctggctccactcttgatctctcttgtcctcttctgctcttttcctggtgctcttttttctcggtggggtgtgggtaatagaacagccgtgggcttttggggacctttaacttttttttctctcttttgtttataaaaaacactaaacattcaattccagagaacccaaaatcccaccttcccaccgaacactactaaggggcttgtgttctgctccataccttttctcttttctttctgtcttgttaatgcttttaaaaacaaatgagttttttatataaataaagtttttaaagtgtgtatgtggggggtctgtgtcatttcttcacttcaagctgttatttcttccctgctttgcatctttgttacttccttatgtatcagtgtcctttccagagcaaccagaaggaggttataccaggatttattttgagctcagccccaactctttatcaagcaacattcttgttaactatatgtgaaacattttttcttctgaagattcttaaaaattgaatgtggctgaagttgaacatgggagcttattgctaatttagagataggaaactgaagcataaagaattaatgacttactttaattactggaattcttctgcaacatttgacaaaactaaccttgaataaggcccactgtaatacgtagctctcttaaatataacacttaggactagaagattagaaactaccaatcccaactacgtaataggaaaatgtaggatcaaaaggcccatgtatataagtactgaccactgggccataatgttgcttctcaggctatatgcagtcctttagtcagaagtcaataggcctatttattaatattttacagaccatattacctggattaccagggactatctttgctgcagagatcaagggttaagatctatgggaagatacttatttttctgaggtccttatgtcctgtcatataattaaagactcaagagaatttatgtgaaatgctttctgtatgccccaatctttagattaaaattatatacctgctcct

SEQ ID NO: 18866 - DNA, 5423 bp, Homo sapiens
  SIMILAR (466)..(3282): 991254mologous to Homo sapiens p120 catenin isoform 1AC,accession number AF062321,Smith-Waterman Score=4902.
agatggcggtcttggcacctctaattgctctcgtgtattcggtgccgcgactttcacgatggctcgcccaaccttactaccttctgtcggccctgctctctgctgccttcctactcgtgaggaaactgccgccgctctgccacggtctgcccacccaacgcgaagacggtaacccgtgtgactttgactggagagaagtggagatcctgatgtttctcagtgccattgtgatgatgaagaaccgcagatccactctctccttcctgcttcctccttgctgtggtggctgggatgcttcttccatgattttttgaatctagactgggctgttctctgtgttaaaccaatcagttgcgaccttctcttaacagtgtgaagtgagggggtctctctccctccttctccttcctctgtgattcaccttcctttttaccctgccctgcggcggctccgccccttaccttcatggacgactcagaggtggagtcgaccgccagcatcttggcctctgtgaaggaacaagaggcccagtttgagaagctgacccgggcgctggaggaggaacggcgccacgtctcggcgcagctggaacgcgtccgggtctcaccacaagatgccaacccactcatggccaacggcacactcacccgccggcatcagaacggccggtttgtgggcgatgctgaccttgaaagacagaaattttcagatttgaaactcaacggaccccaggatcacagtcaccttctatatagcaccatccccaggatgcaggagccggggcagattgtggagacctacacggaggaggatcctgagggagccatgtctgtagtctctgtggagacctcagatgatgggaccactcggcgcacagagaccacggtcaagaaagtagtgaagactgtgacaacacggacagtacagccagtcgctatgggaccagacgggttgcctgtggatgcttcatcagtttctaacaactatatccagactttgggtcgtgatttccgcaagaatggcaatgggggacctggtccctatgtggggcaagctggcactgctacccttcctaggaacttccactaccctcctgatggttatagtcgccactatgaagatggttatccaggtggcagtgataactatggcagtctgtcccgggtgacccgcattgaggagcggtataggcccagcatggaaggctaccgggcacctagtagacaggatgtgtatgggccccaaccccaggttcgggtaggtgggagcagcgtggatctgcatcgctttcatccagagccttatgggctagaggatgaccagcgtagtatgggctatgatgacctggattatggtatgatgtctgattatggcactgcccgtcggactgggacaccctctgaccctcgtcggcgcctcatgagctatgaagacatgattggtgaggaggtgccatcggatcaatactactgggctcctttggcccagcatgagcgaggaagtttagcaagcttggatagcctgcgcaaaggagggcctccacctcctaattggagacagccagagctgccagaggtgatcgccatgcttggattccgcttggatgctgtcaagtccaatgcagctgcatacctgcaacacttatgctaccgcaatgacaaggtgaagactgacgtgcggaagctcaagggcatcccagtactggtgggattgttagaccatcccaaaaaggaagtgcaccttggagcctgtggagctctcaagaatatctcttttggacgtgaccaggataacaagattgccataaaaaactgtgatggtgtgcctgcccttgtgcgattgcttcgaaaggctcgtgatatggaccttactgaagttattaccggaaccctgtggaatctttcatcccatgactcaatcaaaatggagattgtggaccatgcactgcatgccttgacagatgaagtgatcattcctcattctggttgggagcgggaacctaatgaagactgtaagccacgccatattgagtgggaatcggtgctcaccaacacagctggctgccttaggaatgtaagctcagagaggagtgaagctcgccggaaacttcgggaatgtgatggtttagttgatgccctcattttcattgttcaggctgagattgggcagaaggattcagacagcaagcttgtagagaactgtgtttgccttcttcggaacttatcatatcaagttcaccgggagatcccacaggcagagcgttaccaagaggcagctcccaatgttgccaacaatactgggccacatgctgccagttgctttggggccaagaagggcaaagatgagtggttctccagagggaaaaaacctatagaggatccagcaaacgatacagtggatttccctaaaagaacgagtccagctcgaggctatgagctcttatttcagccagaggtggttcggatatacatctcacttcttaaggagagcaagactcctgccatcctagaagcctcagctggagctatccagaacttgtgtgctgggcgctggacgtatggtcgatacatccgctctgctctgcgtcaagagaaggctctttctgccatagctgacctcctgactaatgaacatgaacgggtggtgaaagctgcatctggagcactgagaaacctggctgtggatgctcgcaacaaagaattaattggtaaacatgctattcctaacttggtaaagaatctgccaggaggacagcagaactcctcttggaatttctctgaggacactgtcatctctattttgaacactatcaacgaggttatcgctgagaacttggaggctgccaaaaagcttcgagagacacagggtattgagaagctggtgttgatcaacaaatcagggaaccgctcagaaaaagaagttcgagcagcagcacttgtattacagacaatctggggatataaggaactgcggaagccactggaaaaagaaggatggaagaaatcagactttcaggtgaatctaaacaatgcttcccgaagccagagcagtcattcatatgatgatagtactctccctctcattgaccggaaccaaaaatcagataagaaacctgatcgggaagaaattcagatgagcaatatgggatcaaacacaaaatcactagataacaactattccacaccaaatgagagaggagaccacaatagaacactggatcgatcgggggatctaggcgacatggagccattgaagggaacaacacccttgatgcagaagatttagcaccactatctccgttccatctgggcttatatgtacttttattttttggtggtgaaattgactgatgattttcctttttcttcgctggactattgtgccaactgccaggctgcctcctgcccttacagccctaagtggctgccttctttccatcaactcccaacttcttcctgtgaagtttaattgtctcaacgcctccccctcccccattccctccatttttctcccaagaaacctgactcaattatttgcatattttgagaaactgctgcagattagttctttttgccagttttccctggaactcctggccttttgtggaggggagggatggagagaataggaatcttcactagaagccgtgggaagaattggaagttacatgctgtatatgcaatgtccagcagtctgataaactgacgattcttaatcaagatttttttcctgatggggaagggacttttattttcttttagagaggggaaagtgtgagctcttcccttattcctaatggctatttttgaagcaaagaaggccagcaacattggcacatgccacctggcaaaggacccttgagtaagtgaaggtctcctaaaactgggattaagaaaccttgctctcctcatctccaaggcagggaccatcaagaacctacagactccatctcttctgcaagcctcatgccaaccctgggctattgctgctgccccttaaacacaggctgtccttaacccacctctcctgccctgtgatatgtctgctgagttggcctggccatttccaagaggctgtagaaaggggagaatgtcaaggaagacttttggtagagaaggagcagaaagatgtgtttttgggaagaagaagacctctaggaggagctagtaggaatgtacatgaagcaattagtctgaaactggcttccccactcccccgtttctccttttcctatccttataggcctgtcccttgcctctgccctggattggttggcaaactaaaggacttgatgtacataactcctgtcccttttcccttacaaggtggggattgcccctggctttgcctcttctttgtgcctttggcctggggtgcatctcctcccgcccttccatgtgcctttctttgcctctgcagtctcatttctcataattttgcaaattatattttgttgctttcttacctactattggccctaaatagcagaaagaagagaagtgaccgagagaacctcagattcttcattgaggattggtatagccatgatttcagtcatagcaagcttttgctcaacagcatatgggtgggattttgcaaaaatcctattctgatgaatctcaaagtaaggctggtaagagaagtgagtggtgtgactcttactccttaggtgcccagaatttaccatcatctctgaaggagttacagggaagtggtctccccaattctcccctccctccagtattgccccctctcactttagcatatattaattagcaggttgggctagagaaatcagctgctatgcgggttgattattattattatttctaatccttttccttatttgccttctactccccttaatctaatctaaaagctctgttccatgcaactggagttccttatccctctcttccccttcccttatatattgaggctatggggtaggagaaaagtgcacaacccaccaccccctttactcgtgcattaaaatttcttatttacccttttcccccttcccatttcttcccactttcatctaccttttctggcaaaaaggagccttttgctctctgtgaccctaagagcacactgcacagggaaaattgccccatccagacctggctccactcttgatctctcttgtcctcttctgctcttttcctggtgctcttttttctcggtggggtgtgggtaatagaacagccgtgggcttttggggacctttaacttttttttctctcttttgtttataaaaaacactaaacattcaattccagagaaccaaaaatcccaccttcccaccgaacactactaaggggcttgtgttctgctccataccttttctcttttctttctgtcttgttaatgcttttaaaaacaaatgagttttttatataaataaagtttttaaagtgtgt

SEQ ID NO: 18867 - DNA, 5949 bp, Homo sapiens
  SIMILAR (248)..(3076): 991254mologous to Homo sapiens p120 catenin isoform 1B,accession number AF062317,Smith-Waterman Score=4870.
ctgccagatcagtttgtcaccacccaggctcccttgcctttggctgggtgcaacttccattttaggtgttggatctgagggggaaaaaaaagagagagggagagagagagaaagaagagcaggaaagatcccgaaaggaggaagaggtggcgaaaaatcaactgccctgctggatttgtctttctcagcaccttggcgaagccttgggtttctttcttaaaggactgatttttagaactccacatttgaggtggagtcgaccgccagcatcttggcctctgtgaaggaacaagaggcccagtttgagaagctgacccgggcgctggaggaggaacggcgccacgtctcggcgcagctggaacgcgtccgggtctcaccacaagatgccaacccactcatggccaacggcacactcacccgccggcatcagaacggccggtttgtgggcgatgctgaccttgaaagacagaaattttcagatttgaaactcaacggaccccaggatcacagtcaccttctatatagcaccatccccaggatgcaggagccggggcagattgtggagacctacacggaggaggatcctgagggagccatgtctgtagtctctgtggagacctcagatgatgggaccactcggcgcacagagaccacggtcaagaaagtagtgaagactgtgacaacacggacagtacagccagtcgctatgggaccagacgggttgcctgtggatgcttcatcagtttctaacaactatatccagactttgggtcgtgatttccgcaagaatggcaatgggggacctggtccctatgtggggcaagctggcactgctacccttcctaggaacttccactaccctcctgatggttatagtcgccactatgaagatggttatccaggtggcagtgataactatggcagtctgtcccgggtgacccgcattgaggagcggtataggcccagcatggaaggctaccgggcacctagtagacaggatgtgtatgggccccaaccccaggttcgggtaggtgggagcagcgtggatctgcatcgctttcatccagagccttatgggctagaggatgaccagcgtagtatgggctatgatgacctggattatggtatgatgtctgattatggcactgcccgtcggactgggacaccctctgaccctcgtcggcgcctcaggagctatgaagacatgattggtgaggaggtgccatcggatcaatactactgggctcctttggcccagcatgagcgaggaagtttagcaagcttggatagcctgcgcaaaggagggcctccacctcctaattggagacagccagagctgccagaggtgatcgccatgcttggattccgcttggatgctgtcaagtccaatgcagctgcatacctgcaacacttatgctaccgcaatgacaaggtgaagactgacgtgcggaagctcaagggcatcccagtactggtgggattgttagaccatcccaaaaaggaagtgcaccttggagcctgtggagctctcaagaatatctcttttggacgtgaccaggataacaagattgccataaaaaactgtgatggtgtgcctgcccttgtgcgattgcttcgaaaggctcgtgatatggaccttactgaagttattaccggaaccctgtggaatctttcatcccatgactcaatcaaaatggagattgtggaccatgcactgcatgccttgacagatgaagtgatcattcctcattctggttgggagcgggaacctaatgaagactgtaagccacgccatattgagtgggaatcggtgctcaccaacacagctggctgccttaggaatgtaagctcagagaggagtgaagctcgccggaaacttcgggaatgtgatggtttagttgatgccctcattttcattgttcaggctgagattgggcagaaggattcagacagcaagcttgtagagaactgtgtttgccttcttcggaacttatcatatcaagttcaccgggagatcccacaggcagagcgttaccaagaggcagctcccaatgttgccaacaatactgggccacatgctgccagttgctttggggccaagaagggcaaagatgagtggttctccagagggaaaaaacctatagaggatccagcaaacgatacagtggatttccctaaaagaacgagtccagctcgaggctatgagctcttatttcagccagaggtggttcggatatacatctcacttcttaaggagagcaagactcctgccatcctagaagcctcagctggagctatccagaacttgtgtgctgggcgctggacgtatggtcgatacatccgctctgctctgcgtcaagagaaggctctttctgccatagctgacctcctgactaatgaacatgaacgggtggtgaaagctgcatctggagcactgagaaacctggctgtggatgctcgcaacaaagaattaattggtaaacatgctattcctaacttggtaaagaatctgccaggaggacagcagaactcctcttggaatttctctgaggacactgtcatctctattttgaacactatcaacgaggttatcgctgagaacttggaggctgccaaaaagcttcgagagacacagggtattgagaagctggtgttgatcaacaaatcagggaaccgctcagaaaaagaagttcgagcagcagcacttgtattacagacaatctggggatataaggaactgcggaagccactggaaaaagaaggatggaagaaatcagactttcaggtgaatctaaacaatgcttcccgaagccagagcagtcattcatatgatgatagtactctccctctcattgaccggaaccaaaaatcagataacaactattccacaccaaatgagagaggagaccacaatagaacactggatcgatcgggggatctaggcgacatggagccattgaagggaacaacacccttgatgcaggacgaggggcaggaatctctggaggaagagttggatgtgttggttttggatgatgaggggggccaagtgtcttacccctccatgcagaagatttagcaccactatctccgttccatctgggcttatatgtacttttattttttggtggtgaaattgactgatgattttcctttttcttcgctggactattgtgccaactgccaggctgcctcctgcccttacagccctaagtggctgccttctttccatcaactcccaacttcttcctgtgaagtttaattgtctcaacgcctccccctcccccattccctccatttttctcccaagaaacctgactcaattatttgcatattttgagaaactgctgcagattagttctttttgccagttttccctggaactcctggccttttgtggaggggagggatggagagaataggaatcttcactagaagccgtgggaagaattggaagttacatgctgtatatgcaatgtccagcagtctgataaactgacgattcttaatcaagatttttttcctgatggggaagggacttttattttcttttagagaggggaaagtgtgagctcttcccttattcctaatggctatttttgaagcaaagaaggccagcaacattggcacatgccacctggcaaaggacccttgagtaagtgaaggtctcctaaaactgggattaagaaaccttgctctcctcatctccaaggcagggaccatcaagaacctacagactccatctcttctgcaagcctcatgccaaccctgggctattgctgctgccccttaaacacaggctgtccttaacccacctctcctgccctgtgatatgtctgctgagttggcctggccatttccaagaggctgtagaaaggggagaatgtcaaggaagacttttggtagagaaggagcagaaagatgtgtttttgggaagaagaagacctctaggaggagctagtaggaatgtacatgaagcaattagtctgaaactggcttccccactcccccgtttctccttttcctatccttataggcctgtcccttgcctctgccctggattggttggcaaactataggacttgatgtacataactcctgtcccttttcccttacaaggtggggattgcccctggctttgcctcttctttgtgcctttggcctggggtgcatctcctcccgcccttccatgtgcctttctttgcctctgcagtctcatttctcataattttgcaaattatattttgttgctttcttacctactattggccctaaatagcagaaagaagagaagtgaccgagagaacctcagattcttcattgaggattggtatagccatgatttcagtcatagcaagcttttgctcaacagcatatgggtgggatttggcaaaaatcctattctgatgaatctcaaagtaaggctggtaagagaagtgagtggtgtgactcttactccttaggtgcccagaatttaccatcatctctgaaggagttacagggaagtggtctccccaattctcccctccctccagtattgccccctctcactttagcatatattaattagcaggttgggctagagaaatcagctgctatgcgggttgattattattattatttctaatccttttccttatttgccttctactccccttaatctaatctaaaagctctgttccatgcaactggagttccttatccctctcttccccttcccttatatattgaggctatggggtaggagaaaagtgcacaacccaccaccccctctactcgtgcattaaaatttcttatttacccttttcccccttcccatttcttcccactttcatctaccttttctggcaaaaaggagccttttgctctctgtgaccctaagagcacactgcacagggaaaattgccccatccagacctggctccactcttgatctctcttgtcctcttctgctcttttcctggtgctcttttttctcggtggggtgtgggtaatagaacagccgtgggcttttggggacctttaacttttttttctctcttttgtttataaaaaacactaaacattcaattccagagaacccaaaatcccaccttcccaccgaacactactaaggggcttgtgttctgctccataccttttctcttttctttctgtcttgttaatgcttttaaaaacaaatgagttttttatataaataaagtttttaaagtgtgtatgtggggggtctgtgtcatttcttcacttcaagctgttatttcttccctgctttgcatctttgttacttccttatgtatcagtgtcctttccagagcaaccagaaggaggttataccaggatttattttgagctcagccccaactctttatcaagcaacattcttgttaactatatgtgaaacattttttcttctgaagattcttaaaaattgaatgtggctgaagttgaacatgggagcttattgctaatttagagataggaaactgaagcataaagaattaatgacttactttaattactggaattcttctgcaacatttgacaaaactaaccttgaataaggcccactgtaatacgtagctctcttaaatataacacttaggactagaagattagaaactaccaatcccaactacgtaataggaaaatgtaggatcaaaaggcccatgtatataagtactgaccactgggccataatgttgcttctcaggctatatgcagtcctttagtcagaagtcaataggcctatttattaatattttacagaccatattacctggattaccagggactatctttgctgcagagatcaagggttaagatctatgggaagatacttatttttctgaggtccttatgtcctgtcatataattaaagactcaagagaatttatgtgaaatgctttctgtatgccccaatctttagattaaaattatatacctgctcct

SEQ ID NO: 18868 - DNA, 1608 bp, Homo sapiens
  SIMILAR (43)..(504): 1001254mologous to Homo sapiens putative ATP/GTP-binding protein,accession number U73524,Smith-Waterman Score=787.
atggagagaattaaagcaaggcacagcagctacacagaagagatgggagaagaggctaatgatgacaagaagccaaccactaaatttgaactagagcgagaaacagaacttcgctttgaggtggaggcatctcagtcagttcagttggagttgttgactggcatggcagagatctttggcacagagctgacccgaaacaagaaattcacctttgatgctggtgccaaggtggctgttttcacttggcatggctgttctgtgcaactgagcggccgcactgaggtggcttatgtctccaaggacactcctatgttgctttacctcaacactcacacagccttggaacagatgcggaggcaagcggaaaaggaagaagagcgaggtccccgagtgatggtagtgggccccactgatgtgggcaagtctacagtgtgtcgccttctgctcaactacgcagtgcgtttgggccgccgtcccacttatgtggagctggatgtgggccagttctgtgtccatccctgttttgacgtgaactgttcggaccctcagtgctacctgatagaaaactgcattccaggaaaggaacacagctgtgcagtggagtcgaccgccagcatcttggcctctgtgaaggaacaagaggcccagtttgagaagctgacccgggcgctggaggaggaacggcgccacgtctcggcgcagctggaacgcgtccgggtctcaccacaagatgccaacccactcatggccaacggcacactcacccgccggcatcaggatcacagtcaccttctatatagcaccatccccaggatgcaggagccggggcagattgtggagacctacacggaggaggatcctgagggagccatgtctgtagtctctgtggagacctcagatgatgggaccactcggcgcacagagaccacgatggttatccttaaggctcaggaatttgatcatcactgcccctgggtgaataactgtattggtcgccggaactaccgttattttttccttttcctcctttccctgacagcccacattatggctggcctcacgggatttcacgtggttctggtggccaggggacgcacaaccaatgaacaggttacgggtaaattccggggaggtgtgaaccccttcaccaatggctgctgtaacaatgtcagccgtgttctctgcagttctccagcacccaggtacacctatccctctggtctagtgtttaccattgttggcctcttggatgtctaccgtgctgaaggtcagccaaataggcagtctaagggaagcctggagataacagagagccagtctgcagatgctgaacctccacctcctcctaagccagacctgagccgttacacagggttgcgaacacacctcggcctggctactaatgaggatagtagcttattggccaaggacagccccccgacacctaccatgtacaagtatcggccgggttacagtagcagcagtacgtcagctgccatgccgcattcctccagcgccaagaggcctagctttgagaactcatctacaatgccatcttctgaaatgagacacaacaatttaattgaactggactatcccccaaaatga

SEQ ID NO: 18869 - DNA, 5791 bp, Homo sapiens
  SIMILAR (273)..(2918): 991254mologous to Homo sapiens p120 catenin isoform 1B,accession number AF062317,Smith-Waterman Score=4574.
ctgccagatcagtttgtcaccacccaggctcccttgcctttggctgggtgcaacttccattttaggtgttggatctgagggggaaaaaaaagagagagggagagagagagaaagaagagcaggaaagatcccgaaaggaggaagaggtggcgaaaaatcaactgccctgctggatttgtctttctcagcaccttggcgaagccttgggtttctttcttaaaggactgatttttagaactccacatttgaggtgtgtggcttttgaagaaaataacggccggtttgtgggcgatgctgaccttgaaagacagaaattttcagatttgaaactcaacggaccccaggatcacagtcaccttctatatagcaccatccccaggatgcaggagccggggcagattgtggagacctacacggaggaggatcctgagggagccatgtctgtagtctctgtggagacctcagatgatgggaccactcggcgcacagagaccacggtcaagaaagtagtgaagactgtgacaacacggacagtacagccagtcgctatgggaccagacgggttgcctgtggatgcttcatcagtttctaacaactatatccagactttgggtcgtgatttccgcaagaatggcaatgggggacctggtccctatgtggggcaagctggcactgctacccttcctaggaacttccactaccctcctgatggttatagtcgccactatgaagatggttatccaggtggcagtgataactatggcagtctgtcccgggtgacccgcattgaggagcggtataggcccagcatggaaggctaccgggcacctagtagacaggatgtgtatgggccccaaccccaggttcgggtaggtgggagcagcgtggatctgcatcgctttcatccagagccttatgggctagaggatgaccagcgtagtatgggctatgatgacctggattatggtatgatgtctgattatggcactgcccgtcggactgggacaccctctgaccctcgtcggcgcctcaggagctatgaagacatgattggtgaggaggtgccatcggatcaatactactgggctcctttggcccagcatgagcgaggaagtttagcaagcttggatagcctgcgcaaaggagggcctccacctcctaattggagacagccagagctgccagaggtgatcgccatgcttggattccgcttggatgctgtcaagtccaatgcagctgcatacctgcaacacttatgctaccgcaatgacaaggtgaagactgacgtgcggaagctcaagggcatcccagtactggtgggattgttagaccatcccaaaaaggaagtgcaccttggagcctgtggagctctcaagaatatctcttttggacgtgaccaggataacaagattgccataaaaaactgtgatggtgtgcctgcccttgtgcgattgcttcgaaaggctcgtgatatggaccttactgaagttattaccggaaccctgtggaatctttcatcccatgactcaatcaaaatggagattgtggaccatgcactgcatgccttgacagatgaagtgatcattcctcattctggttgggagcgggaacctaatgaagactgtaagccacgccatattgagtgggaatcggtgctcaccaacacagctggctgccttaggaatgtaagctcagagaggagtgaagctcgccggaaacttcgggaatgtgatggtttagttgatgccctcattttcattgttcaggctgagattgggcagaaggattcagacagcaagcttgtagagaactgtgtttgccttcttcggaacttatcatatcaagttcaccgggagatcccacaggcagagcgttaccaagaggcagctcccaatgttgccaacaatactgggccacatgctgccagttgctttggggccaagaagggcaaagatgagtggttctccagagggaaaaaacctatagaggatccagcaaacgatacagtggatttccctaaaagaacgagtccagctcgaggctatgagctcttatttcagccagaggtggttcggatatacatctcacttcttaaggagagcaagactcctgccatcctagaagcctcagctggagctatccagaacttgtgtgctgggcgctggacgtatggtcgatacatccgctctgctctgcgtcaagagaaggctctttctgccatagctgacctcctgactaatgaacatgaacgggtggtgaaagctgcatctggagcactgagaaacctggctgtggatgctcgcaacaaagaattaattggtaaacatgctattcctaacttggtaaagaatctgccaggaggacagcagaactcctcttggaatttctctgaggacactgtcatctctattttgaacactatcaacgaggttatcgctgagaacttggaggctgccaaaaagcttcgagagacacagggtattgagaagctggtgttgatcaacaaatcagggaaccgctcagaaaaagaagttcgagcagcagcacttgtattacagacaatctggggatataaggaactgcggaagccactggaaaaagaaggatggaagaaatcagactttcaggtgaatctaaacaatgcttcccgaagccagagcagtcattcatatgatgatagtactctccctctcattgaccggaaccaaaaatcagataacaactattccacaccaaatgagagaggagaccacaatagaacactggatcgatcgggggatctaggcgacatggagccattgaagggaacaacacccttgatgcaggacgaggggcaggaatctctggaggaagagttggatgtgttggttttggatgatgaggggggccaagtgtcttacccctccatgcagaagatttagcaccactatctccgttccatctgggcttatatgtacttttattttttggtggtgaaattgactgatgattttcctttttcttcgctggactattgtgccaactgccaggctgcctcctgcccttacagccctaagtggctgccttctttccatcaactcccaacttcttcctgtgaagtttaattgtctcaacgcctccccctcccccattccctccatttttctcccaagaaacctgactcaattatttgcatattttgagaaactgctgcagattagttctttttgccagttttccctggaactcctggccttttgtggaggggagggatggagagaataggaatcttcactagaagccgtgggaagaattggaagttacatgctgtatatgcaatgtccagcagtctgataaactgacgattcttaatcaagatttttttcctgatggggaagggacttttattttcttttagagaggggaaagtgtgagctcttcccttattcctaatggctatttttgaagcaaagaaggccagcaacattggcacatgccacctggcaaaggacccttgagtaagtgaaggtctcctaaaactgggattaagaaaccttgctctcctcatctccaaggcagggaccatcaagaacctacagactccatctcttctgcaagcctcatgccaaccctgggctattgctgctgccccttaaacacaggctgtccttaacccacctctcctgccctgtgatatgtctgctgagttggcctggccatttccaagaggctgtagaaaggggagaatgtcaaggaagacttttggtagagaaggagcagaaagatgtgtttttgggaagaagaagacctctaggaggagctagtaggaatgtacatgaagcaattagtctgaaactggcttccccactcccccgtttctccttttcctatccttataggcctgtcccttgcctctgccctggattggttggcaaactataggacttgatgtacataactcctgtcccttttcccttacaaggtggggattgcccctggctttgcctcttctttgtgcctttggcctggggtgcatctcctcccgcccttccatgtgcctttctttgcctctgcagtctcatttctcataattttgcaaattatattttgttgctttcttacctactattggccctaaatagcagaaagaagagaagtgaccgagagaacctcagattcttcattgaggattggtatagccatgatttcagtcatagcaagcttttgctcaacagcatatgggtgggatttggcaaaaatcctattctgatgaatctcaaagtaaggctggtaagagaagtgagtggtgtgactcttactccttaggtgcccagaatttaccatcatctctgaaggagttacagggaagtggtctccccaattctcccctccctccagtattgccccctctcactttagcatatattaattagcaggttgggctagagaaatcagctgctatgcgggttgattattattattatttctaatccttttccttatttgccttctactccccttaatctaatctaaaagctctgttccatgcaactggagttccttatccctctcttccccttcccttatatattgaggctatggggtaggagaaaagtgcacaacccaccaccccctctactcgtgcattaaaatttcttatttacccttttcccccttcccatttcttcccactttcatctaccttttctggcaaaaaggagccttttgctctctgtgaccctaagagcacactgcacagggaaaattgccccatccagacctggctccactcttgatctctcttgtcctcttctgctcttttcctggtgctcttttttctcggtggggtgtgggtaatagaacagccgtgggcttttggggacctttaacttttttttctctcttttgtttataaaaaacactaaacattcaattccagagaacccaaaatcccaccttcccaccgaacactactaaggggcttgtgttctgctccataccttttctcttttctttctgtcttgttaatgcttttaaaaacaaatgagttttttatataaataaagtttttaaagtgtgtatgtggggggtctgtgtcatttcttcacttcaagctgttatttcttccctgctttgcatctttgttacttccttatgtatcagtgtcctttccagagcaaccagaaggaggttataccaggatttattttgagctcagccccaactctttatcaagcaacattcttgttaactatatgtgaaacattttttcttctgaagattcttaaaaattgaatgtggctgaagttgaacatgggagcttattgctaatttagagataggaaactgaagcataaagaattaatgacttactttaattactggaattcttctgcaacatttgacaaaactaaccttgaataaggcccactgtaatacgtagctctcttaaatataacacttaggactagaagattagaaactaccaatcccaactacgtaataggaaaatgtaggatcaaaaggcccatgtatataagtactgaccactgggccataatgttgcttctcaggctatatgcagtcctttagtcagaagtcaataggcctatttattaatattttacagaccatattacctggattaccagggactatctttgctgcagagatcaagggttaagatctatgggaagatacttatttttctgaggtccttatgtcctgtcatataattaaagactcaagagaatttatgtgaaatgctttctgtatgccccaatctttagattaaaattatatacctgctcct

SEQ ID NO: 18870 - DNA, 601 bp, Homo sapiens
  SIMILAR (301)..(555): 481254mologous to Coturnix coturnix qdgl-1,accession number AF190625,Smith-Waterman Score=170.
  misc_feature (1)...(601): n = a,t,c or g
ggctgcttctgccccaggagggagaaacaccgactccctggctttggcgccagaagcctggatcggctgccaggagacttctatttctatctgggtctcgtctgggggggccctggccgggcagccccccaacgacttgtcctgccctgaaacacggctctagccaacctgctccgctgcttcacctgcgaccgtctctgcgggggctgcacggcgccagcccctccagcccaccagggcattgtcctccagcccgtcatgcccagctgtgaccccggtccgggccctgcctgcctccccaccaagactttccgcagctatctgccccgctgtcaccgcactttacagctgtgtccactggccgtgcacacctggccaaacacgatggagcttatttccaagttcctttccaagggaggccatggccggagcctaacctgttttaactccgtgggttcaacgtgggttgcggggccagctgaacagcgcctcttgctcacggggctccactcggtagctgacattttntgtggagagctgcaaaaccacactgggctgggaaatatggaggcaaagctttttggaggacggagccagaagt

SEQ ID NO: 18871 - DNA, 5833 bp, Homo sapiens
  SIMILAR (351)..(2960): 1001254mologous to Homo sapiens p120 catenin isoform 2ABC,accession number AF062319,Smith-Waterman Score=4561.
ctgccagatcagtttgtcaccacccaggctcccttgcctttggctgggtgcaacttccattttaggtgttggatctgagggggaaaaaaaagagagagggagagagagagaaagaagagcaggaaagatcccgaaaggaggaagaggtggcgaaaaatcaactgccctgctggatttgtctttctcagcaccttggcgaagccttgggtttctttcttaaaggactgatttttagaactccacatttgagaacggccggtttgtgggcgatgctgaccttgaaagacagaaattttcagatttgaaactcaacggaccccaggatcacagtcaccttctatatagcacccatccccaggatgcaggagccggggcagattgtggagacctacacggaggaggatcctgagggagccatgtctgtagtctctgtggagacctcagatgatgggaccactcggcgcacagagaccacggtcaagaaagtagtgaagactgtgacaacacggacagtacagccagtcgctatgggaccagacgggttgcctgtggatgcttcatcagtttctaacaactatatccagactttgggtcgtgatttccgcaagaatggcaatgggggacctggtccctatgtggggcaagctggcactgctacccttcctaggaacttccactaccctcctgatggttatagtcgccactatgaagatggttatccaggtggcagtgataactatggcagtctgtcccgggtgacccgcattgaggagcggtataggcccagcatggaaggctaccgggcacctagtagacaggatgtgtatgggccccaaccccaggttcgggtaggtgggagcagcgtggatctgcatcgctttcatccagagccttatgggctagaggatgaccagcgtagtatgggctatgatgacctggattatggtatgatgtctgattatggcactgcccgtcggactgggacaccctctgaccctcgtcggcgcctcaggagctatgaagacatgattggtgaggaggtgccatcggatcaatactactgggctcctttggcccagcatgagcgaggaagtttagcaagcttggatagcctgcgcaaaggagggcctccacctcctaattggagacagccagagctgccagaggtgatcgccatgcttggattccgcttggatgctgtcaagtccaatgcagctgcatacctgcaacacttatgctaccgcaatgacaaggtgaagactgacgtgcggaagctcaagggcatcccagtactggtgggattgttagaccatcccaaaaaggaagtgcaccttggagcctgtggagctctcaagaatatctcttttggacgtgaccaggataacaagattgccataaaaaactgtgatggtgtgcctgcccttgtgcgattgcttcgaaaggctcgtgatatggaccttactgaagttattaccggaaccctgtggaatctttcatcccatgactcaatcaaaatggagattgtggaccatgcactgcatgccttgacagatgaagtgatcattcctcattctggttgggagcgggaacctaatgaagactgtaagccacgccatattgagtgggaatcggtgctcaccaacacagctggctgccttaggaatgtaagctcagagaggagtgaagctcgccggaaacttcgggaatgtgatggtttagttgatgccctcattttcattgttcaggctgagattgggcagaaggattcagacagcaagcttgtagagaactgtgtttgccttcttcggaacttatcatatcaagttcaccgggagatcccacaggcagagcgttaccaagaggcagctcccaatgttgccaacaatactgggccacatgctgccagttgctttggggccaagaagggcaaagatgagtggttctccagagggaaaaaacctatagaggatccagcaaacgatacagtggatttccctaaaagaacgagtccagctcgaggctatgagctcttatttcagccagaggtggttcggatatacatctcacttcttaaggagagcaagactcctgccatcctagaagcctcagctggagctatccagaacttgtgtgctgggcgctggacgtatggtcgatacatccgctctgctctgcgtcaagagaaggctctttctgccatagctgacctcctgactaatgaacatgaacgggtggtgaaagctgcatctggagcactgagaaacctggctgtggatgctcgcaacaaagaattaattggtaaacatgctattcctaacttggtaaagaatctgccaggaggacagcagaactcctcttggaatttctctgaggacactgtcatctctattttgaacactatcaacgaggttatcgctgagaacttggaggctgccaaaaagcttcgagagacacagggtattgagaagctggtgttgatcaacaaatcagggaaccgctcagaaaaagaagttcgagcagcagcacttgtattacagacaatctggggatataaggaactgcggaagccactggaaaaagaaggatggaagaaatcagactttcaggtgaatctaaacaatgcttcccgaagccagagcagtcattcatatgatgatagtactctccctctcattgaccggaaccaaaaatcagataagaaacctgatcgggaagaaattcagatgagcaatatgggatcaaacacaaaatcactagataacaactattccacaccaaatgagagaggagaccacaatagaacactggatcgatcgggggatctaggcgacatggagccattgaagggaacaacacccttgatgcaggacgaggggcaggaatctctggaggaagagttggatgtgttggttttggatgatgaggggggccaagtgtcttacccctccatgcagaagatttagcaccactatctccgttccatctgggcttatatgtacttttattttttggtggtgaaattgactgatgattttcctttttcttcgctggactattgtgccaactgccaggctgcctcctgcccttacagccctaagtggctgccttctttccatcaactcccaacttcttcctgtgaagtttaattgtctcaacgcctccccctcccccattccctccatttttctcccaagaaacctgactcaattatttgcatattttgagaaactgctgcagattagttctttttgccagttttccctggaactcctggccttttgtggaggggagggatggagagaataggaatcttcactagaagccgtgggaagaattggaagttacatgctgtatatgcaatgtccagcagtctgataaactgacgattcttaatcaagatttttttcctgatggggaagggacttttattttcttttagagaggggaaagtgtgagctcttcccttattcctaatggctatttttgaagcaaagaaggccagcaacattggcacatgccacctggcaaaggacccttgagtaagtgaaggtctcctaaaactgggattaagaaaccttgctctcctcatctccaaggcagggaccatcaagaacctacagactccatctcttctgcaagcctcatgccaaccctgggctattgctgctgccccttaaacacaggctgtccttaacccacctctcctgccctgtgatatgtctgctgagttggcctggccatttccaagaggctgtagaaaggggagaatgtcaaggaagacttttggtagagaaggagcagaaagatgtgtttttgggaagaagaagacctctaggaggagctagtaggaatgtacatgaagcaattagtctgaaactggcttccccactcccccgtttctccttttcctatccttataggcctgtcccttgcctctgccctggattggttggcaaactataggacttgatgtacataactcctgtcccttttcccttacaaggtggggattgcccctggctttgcctcttctttgtgcctttggcctggggtgcatctcctcccgcccttccatgtgcctttctttgcctctgcagtctcatttctcataattttgcaaattatattttgttgctttcttacctactattggccctaaatagcagaaagaagagaagtgaccgagagaacctcagattcttcattgaggattggtatagccatgatttcagtcatagcaagcttttgctcaacagcatatgggtgggatttggcaaaaatcctattctgatgaatctcaaagtaaggctggtaagagaagtgagtggtgtgactcttactccttaggtgcccagaatttaccatcatctctgaaggagttacagggaagtggtctccccaattctcccctccctccagtattgccccctctcactttagcatatattaattagcaggttgggctagagaaatcagctgctatgcgggttgattattattattatttctaatccttttccttatttgccttctactccccttaatctaatctaaaagctctgttccatgcaactggagttccttatccctctcttccccttcccttatatattgaggctatggggtaggagaaaagtgcacaacccaccaccccctctactcgtgcattaaaatttcttatttacccttttcccccttcccatttcttcccactttcatctaccttttctggcaaaaaggagccttttgctctctgtgaccctaagagcacactgcacagggaaaattgccccatccagacctggctccactcttgatctctcttgtcctcttctgctcttttcctggtgctcttttttctcggtggggtgtgggtaatagaacagccgtgggcttttggggacctttaacttttttttctctcttttgtttataaaaaacactaaacattcaattccagagaacccaaaatcccaccttcccaccgaacactactaaggggcttgtgttctgctccataccttttctcttttctttctgtcttgttaatgcttttaaaaacaaatgagttttttatataaataaagtttttaaagtgtgtatgtggggggtctgtgtcatttcttcacttcaagctgttatttcttccctgctttgcatctttgttacttccttatgtatcagtgtcctttccagagcaaccagaaggaggttataccaggatttattttgagctcagccccaactctttatcaagcaacattcttgttaactatatgtgaaacattttttcttctgaagattcttaaaaattgaatgtggctgaagttgaacatgggagcttattgctaatttagagataggaaactgaagcataaagaattaatgacttactttaattactggaattcttctgcaacatttgacaaaactaaccttgaataaggcccactgtaatacgtagctctcttaaatataacacttaggactagaagattagaaactaccaatcccaactacgtaataggaaaatgtaggatcaaaaggcccatgtatataagtactgaccactgggccataatgttgcttctcaggctatatgcagtcctttagtcagaagtcaataggcctatttattaatattttacagaccatattacctggattaccagggactatctttgctgcagagatcaagggttaagatctatgggaagatacttatttttctgaggtccttatgtcctgtcatataattaaagactcaagagaatttatgtgaaatgctttctgtatgccccaatctttagattaaaattatatacctgctcct

SEQ ID NO: 18872 - DNA, 1904 bp, Homo sapiens
  SIMILAR (698)..(597): 851254mologous to Coturnix coturnix qdgl-1,accession number AF190625,Smith-Waterman Score=174.
ccggggcggagggtacgatggagaatttcacggcactgtttggggctcaggctgacccaccaccgcccccaaccgcactcggcttcggaccaggaaagcctccacccccgccaccgcctcctgcgggcgggggacccggcacggccccgcctcccaccgcggccacggctcctcctggcgcggacaagtcaggagctggctgtggccctttttacctcatgagggaactgccaggtagcacagagctgacaggcagcacgaatctgatcacacactacaacttggaacaagcctataataaattctgtgggaagaaggtgaaggagaagctaagtaacttcctgcctgacctgccagggatgattgatctgcctggttcccatgataacagcagcctccgctctctcattgagaagccccctattctcagtagctctttcaatcctatcacagggaccatgctggccggcttccgcctccacactggcccgttgccggagcagtgtcgtctgatgcatattcagcctcccaagaagaagaataagcacaagcacaaacagagccgtacccaggatcctgtccccccaggtacttacatatttccagcccagtgtggttttgcagctctcacagaaaatgtcagctaccgagtggagccccgtgagcaagaggcgctgttcagctggcccgcaacccacaggaaaattactcactcacacacaagcacaagcacacgcacaaggaaagaggtagactcacacggagttaaacaggctagcctggtgcgcgagaggaggggaatggcaggtccccgcttcgcgtaccttggaaataagctcatcgtgtttggccaggtgtgcacggcagtggacacagctgtaagtgcggtgacagcggggcagatagctgcggaaagtcttggtggggaggcaggcagggcccggaccggggtcacagctgggcatgacgggctggaggacaatgccctggtgggctggaggggctggcgccgtgcagcccccgcagagacggtcgcagctgaggaggatgaggacaaggaagatgatttccgagctcccctttacaaaacagtggagataaagggcatccaggtgcgcatgaaatggtgtgccacctgccgcttttaccgtccccctcgatgttcccactgcagtgtctgtgacaactgtgtggaggtatttggggagaccaaagaaagagaagacattgtaatcagacctcccttccttcgaccagaagtttcagatgggcagataactgtgaagatcatggataatggcatccagggagagctgaggagaaccaaggcaagcaggccgtcgcgggacctagaccgagacaggcagatttcccatcagagctccaacatgcccgcagagtctggaaagagattcaaacccagcaagtatgtcccggtctctgcagccgccatcttcctagtgggagctacgacactcttctttgcctttacgctacaactagctacattattagaagccccagattctggcactgtgggggcagactttattttggcaacagatactggaattccattccaggattacacactttatctggaccaagttgatatccagaaggttgtagggtgtccaggactaagcctgtatgtgtcacctgcagtgcccatctacaatgcaattatgtttctctttgtgttggccaacttcagcatggccaccttcatggacccagggattttccctcgagatttttctatgctttccagatggactagcctgttggaaggacatacaagacatgtagaagagccaagttgtcctggtgtcatggctgaggccacagaagaccagtcatcccctaaccaacccaacaactataccttacagatgtatgaatga

SEQ ID NO: 18873 - DNA, 1975 bp, Homo sapiens
  SIMILAR (1302)..(1646): 1001254mologous to Homo sapiens p120 catenin isoform 4AB,accession number AF062326,Smith-Waterman Score=581.
  misc_feature (1)...(1975): n = a,t,c or g
atggggagaaaccagagaagaaaagctgaaaattctataaaccagagagcctcttctcctccaaaggattgcagttcctcgccagcaatggaacaaagctggatggagaatgactttgatgagctaacagaagtaggcttcagaagtgatggagagaatggaaccaagctggaaaacacgcttcaggatattatccaggagaacttccccaacttagcaaggcaggccaacattcaaattcaggaaatacagagaacaccacaaagatactcctcaagaagagcaactccaagacacgtaattgtcagattcaccaaggttgaaatgaaggaaaaaattttaagggcagccagagagaaagcaccacattgtacttattccaaaattgaccacatagttggaagtaaagcactcctcagcaaatataaaagtacagaaatcacaacaaactgtctctcagaccacagtgcaatcaaattagaactcaagattaagaaactcactcgaaaccgctcaactacatggaaaccgaacaacctgctcctgaatgactactgggtaaataacgaaatgaaggcagaaataaagatgttctttgaaaccaatgacaacaaagacacaacgtaccagaatctctgggacacatttaaagcagtctgtagagggaaatttatagcactaaatgcccacaagagaaagcaggaaagatctaaaatcgacaccctaacatcacaattaaaagaactagagaagcaagagcaaacaaattcaaaagctatcagaaggcaagaaataactaagatcagagcagaactgaagctgataaccaacttcagcaaagtctcagcatacatcaatgtgcaaaaatcacaagcattcttatacacaaataacagacaaacagagagccaaatcatgagtgaactcccattcacaatagctacaaagggaataaaatacctaggaatccaacttacaacagatgtgaaggacctcttcaaggagaactacaaaccactgctcaacgaaataaaagaggacacaaacaaatggaagaacattccatactcatggataggaagaatcaatatcatgaaaatggccatactgcccaagtatggtcgatacatccgctctgctctgcgtcnngagaaggctctttctgccatagctgacctcctgactaatgaacatgaacgggtggtgaaagctgcatctggagcacctgagaaacctggctgtggatgctcgcaacaaagaattaattgggtaacatgctattcctaacttggtaaagaatcttgccaggaggacagcagaactcctcttggaatttctctgaggacactgtcatctctattttgaacactatcaacgaggttatcgctgagaacttggaggctgccaaaaagcttcgagagacacagggtattgagaagctggtgttgatcaacaaatcagggaaccgctcagaaaaagaagttcgagcagcagcacttgtattacagacaatctggggatataaggaactgcggaagccactggaaaaagaaggatggaagaaatcagactttcaggtgaatctaaacaatgcttcccgaagccagagcagtcattcatatgatgatagtactctccctctcatttgacccggacccaaaaatcagataagaaacctgatcgggaagaaattcagatgagcaatatgggatcaaacacaaaatcactagataacaactattccacaccaaatgagagaggagaccacaatagaacactggatcgatcgggggatctaggcgacatggagccattgaagggaacaacacccttgatgcaggacgaggggcaggaatctctggaggaagagttggatgtgttggttttggatgatgaggggggccaagtgtcttacccctccatggtatgtccttcagtcacccccaagattgttcttgaggaaggaggctcctga

SEQ ID NO: 18874 - DNA, 6313 bp, Homo sapiens
  SIMILAR (537)..(3440): 1001254mologous to Homo sapiens p120 catenin isoform 1ABC,accession number AF062341,Smith-Waterman Score=5054.
ctgccagatcagtttgtcaccacccaggctcccttgcctttggctgggtgcaacttccattttaggtgttggatctgagggggaaaaaaaagagagagggagagagagagaaagaagagcaggaaagatcccgaaaggaggaagaggtggcgaaaaatcaactgccctgctggatttgtctttctcagcaccttggcgaagccttgggtttctttcttaaaggactgatttttagaactccacatttgaggtgtgtggcttttgaagaaaatgtatgtactgacgggaaaaggaagataagcaagtcgaatttttgtcttacgctctctccttcctgcttcctccttgctgtggtggctgggatgctccttccatgattttttgaatctagactgggctgttctctgtgttaaaccaatcagttgcgaccttctcttaacagtgtgaagtgagggggtctctctccctccttctccttcctctgtgattcaccttcctttttaccctgccctgcggcggctccgccccttaccttcatggacgactcagaggtggagtcgaccgccagcatcttggcctctgtgaaggaacaagaggcccagtttgagaagctgacccgggcgctggaggaggaacggcgccacgtctcggcgcagctggaacgcgtccgggtctcaccacaagatgccaacccactcatggccaacggcacactcacccgccggcatcagaacggccggtttgtgggcgatgctgaccttgaaagacagaaattttcagatttgaaactcaacggaccccaggatcacagtcaccttctatatagcaccatccccaggatgcaggagccggggcagattgtggagacctacacggaggaggatcctgagggagccatgtctgtagtctctgtggagacctcagatgatgggaccactcggcgcacagagaccacggtcaagaaagtagtgaagactgtgacaacacggacagtacagccagtcgctatgggaccagacgggttgcctgtggatgcttcatcagtttctaacaactatatccagactttgggtcgtgatttccgcaagaatggcaatgggggacctggtccctatgtggggcaagctggcactgctacccttcctaggaacttccactaccctcctgatggttatagtcgccactatgaagatggttatccaggtggcagtgataactatggcagtctgtcccgggtgacccgcattgaggagcggtataggcccagcatggaaggctaccgggcacctagtagacaggatgtgtatgggccccaaccccaggttcgggtaggtgggagcagcgtggatctgcatcgctttcatccagagccttatgggctagaggatgaccagcgtagtatgggctatgatgacctggattatggtatgatgtctgattatggcactgcccgtcggactgggacaccctctgaccctcgtcggcgcctcaggagctatgaagacatgattggtgaggaggtgccatcggatcaatactactgggctcctttggcccagcatgagcgaggaagtttagcaagcttggatagcctgcgcaaaggagggcctccacctcctaattggagacagccagagctgccagaggtgatcgccatgcttggattccgcttggatgctgtcaagtccaatgcagctgcatacctgcaacacttatgctaccgcaatgacaaggtgaagactgacgtgcggaagctcaagggcatcccagtactggtgggattgttagaccatcccaaaaaggaagtgcaccttggagcctgtggagctctcaagaatatctcttttggacgtgaccaggataacaagattgccataaaaaactgtgatggtgtgcctgcccttgtgcgattgcttcgaaaggctcgtgatatggaccttactgaagttattaccggaaccctgtggaatctttcatcccatgactcaatcaaaatggagattgtggaccatgcactgcatgccttgacagatgaagtgatcattcctcattctggttgggagcgggaacctaatgaagactgtaagccacgccatattgagtgggaatcggtgctcaccaacacagctggctgccttaggaatgtaagctcagagaggagtgaagctcgccggaaacttcgggaatgtgatggtttagttgatgccctcattttcattgttcaggctgagattgggcagaaggattcagacagcaagcttgtagagaactgtgtttgccttcttcggaacttatcatatcaagttcaccgggagatcccacaggcagagcgttaccaagaggcagctcccaatgttgccaacaatactgggccacatgctgccagttgctttggggccaagaagggcaaagatgagtggttctccagagggaaaaaacctatagaggatccagcaaacgatacagtggatttccctaaaagaacgagtccagctcgaggctatgagctcttatttcagccagaggtggttcggatatacatctcacttcttaaggagagcaagactcctgccatcctagaagcctcagctggagctatccagaacttgtgtgctgggcgctggacgtatggtcgatacatccgctctgctctgcgtcaagagaaggctctttctgccatagctgacctcctgactaatgaacatgaacgggtggtgaaagctgcatctggagcactgagaaacctggctgtggatgctcgcaacaaagaattaattggtaaacatgctattcctaacttggtaaagaatctgccaggaggacagcagaactcctcttggaatttctctgaggacactgtcatctctattttgaacactatcaacgaggttatcgctgagaacttggaggctgccaaaaagcttcgagagacacagggtattgagaagctggtgttgatcaacaaatcagggaaccgctcagaaaaagaagttcgagcagcagcacttgtattacagacaatctggggatataaggaactgcggaagccactggaaaaagaaggatggaagaaatcagactttcaggtgaatctaaacaatgcttcccgaagccagagcagtcattcatatgatgatagtactctccctctcattgaccggaaccaaaaatcagataagaaacctgatcgggaagaaattcagatgagcaatatgggatcaaacacaaaatcactagataacaactattccacaccaaatgagagaggagaccacaatagaacactggatcgatcgggggatctaggcgacatggagccattgaagggaacaacacccttgatgcaggacgaggggcaggaatctctggaggaagagttggatgtgttggttttggatgatgaggggggccaagtgtcttacccctccatgcagaagatttagcaccactatctccgttccatctgggcttatatgtacttttattttttggtggtgaaattgactgatgattttcctttttcttcgctggactattgtgccaactgccaggctgcctcctgcccttacagccctaagtggctgccttctttccatcaactcccaacttcttcctgtgaagtttaattgtctcaacgcctccccctcccccattccctccatttttctcccaagaaacctgactcaattatttgcatattttgagaaactgctgcagattagttctttttgccagttttccctggaactcctggccttttgtggaggggagggatggagagaataggaatcttcactagaagccgtgggaagaattggaagttacatgctgtatatgcaatgtccagcagtctgataaactgacgattcttaatcaagatttttttcctgatggggaagggacttttattttcttttagagaggggaaagtgtgagctcttcccttattcctaatggctatttttgaagcaaagaaggccagcaacattggcacatgccacctggcaaaggacccttgagtaagtgaaggtctcctaaaactgggattaagaaaccttgctctcctcatctccaaggcagggaccatcaagaacctacagactccatctcttctgcaagcctcatgccaaccctgggctattgctgctgccccttaaacacaggctgtccttaacccacctctcctgccctgtgatatgtctgctgagttggcctggccatttccaagaggctgtagaaaggggagaatgtcaaggaagacttttggtagagaaggagcagaaagatgtgtttttgggaagaagaagacctctaggaggagctagtaggaatgtacatgaagcaattagtctgaaactggcttccccactcccccgtttctccttttcctatccttataggcctgtcccttgcctctgccctggattggttggcaaactataggacttgatgtacataactcctgtcccttttcccttacaaggtggggattgcccctggctttgcctcttctttgtgcctttggcctggggtgcatctcctcccgcccttccatgtgcctttctttgcctctgcagtctcatttctcataattttgcaaattatattttgttgctttcttacctactattggccctaaatagcagaaagaagagaagtgaccgagagaacctcagattcttcattgaggattggtatagccatgatttcagtcatagcaagcttttgctcaacagcatatgggtgggatttggcaaaaatcctattctgatgaatctcaaagtaaggctggtaagagaagtgagtggtgtgactcttactccttaggtgcccagaatttaccatcatctctgaaggagttacagggaagtggtctccccaattctcccctccctccagtattgccccctctcactttagcatatattaattagcaggttgggctagagaaatcagctgctatgcgggttgattattattattatttctaatccttttccttatttgccttctactccccttaatctaatctaaaagctctgttccatgcaactggagttccttatccctctcttccccttcccttatatattgaggctatggggtaggagaaaagtgcacaacccaccaccccctctactcgtgcattaaaatttcttatttacccttttcccccttcccatttcttcccactttcatctaccttttctggcaaaaaggagccttttgctctctgtgaccctaagagcacactgcacagggaaaattgccccatccagacctggctccactcttgatctctcttgtcctcttctgctcttttcctggtgctcttttttctcggtggggtgtgggtaatagaacagccgtgggcttttggggacctttaacttttttttctctcttttgtttataaaaaacactaaacattcaattccagagaacccaaaatcccaccttcccaccgaacactactaaggggcttgtgttctgctccataccttttctcttttctttctgtcttgttaatgcttttaaaaacaaatgagttttttatataaataaagtttttaaagtgtgtatgtggggggtctgtgtcatttcttcacttcaagctgttatttcttccctgctttgcatctttgttacttccttatgtatcagtgtcctttccagagcaaccagaaggaggttataccaggatttattttgagctcagccccaactctttatcaagcaacattcttgttaactatatgtgaaacattttttcttctgaagattcttaaaaattgaatgtggctgaagttgaacatgggagcttattgctaatttagagataggaaactgaagcataaagaattaatgacttactttaattactggaattcttctgcaacatttgacaaaactaaccttgaataaggcccactgtaatacgtagctctcttaaatataacacttaggactagaagattagaaactaccaatcccaactacgtaataggaaaatgtaggatcaaaaggcccatgtatataagtactgaccactgggccataatgttgcttctcaggctatatgcagtcctttagtcagaagtcaataggcctatttattaatattttacagaccatattacctggattaccagggactatctttgctgcagagatcaagggttaagatctatgggaagatacttatttttctgaggtccttatgtcctgtcatataattaaagactcaagagaatttatgtgaaatgctttctgtatgccccaatctttagattaaaattatatacctgctcct

SEQ ID NO: 18875 - DNA, 6250 bp, Homo sapiens
  SIMILAR (537)..(3377): 991254mologous to Homo sapiens p120 catenin isoform 1B,accession number AF062317,Smith-Waterman Score=4891.
ctgccagatcagtttgtcaccacccaggctcccttgcctttggctgggtgcaacttccattttaggtgttggatctgagggggaaaaaaaagagagagggagagagagagaaagaagagcaggaaagatcccgaaaggaggaagaggtggcgaaaaatcaactgccctgctggatttgtctttctcagcaccttggcgaagccttgggtttctttcttaaaggactgatttttagaactccacatttgaggtgtgtggcttttgaagaaaatgtatgtactgacgggaaaaggaagataagcaagtcgaatttttgtcttacgctctctccttcctgcttcctccttgctgtggtggctgggatgctccttccatgattttttgaatctagactgggctgttctctgtgttaaaccaatcagttgcgaccttctcttaacagtgtgaagtgagggggtctctctccctccttctccttcctctgtgattcaccttcctttttaccctgccctgcggcggctccgccccttaccttcatggacgactcagaggtggagtcgaccgccagcatcttggcctctgtgaaggaacaagaggcccagtttgagaagctgacccgggcgctggaggaggaacggcgccacgtctcggcgcagctggaacgcgtccgggtctcaccacaagatgccaacccactcatggccaacggcacactcacccgccggcatcagaacggccggtttgtgggcgatgctgaccttgaaagacagaaattttcagatttgaaactcaacggaccccaggatcacagtcaccttctatatagcaccatccccaggatgcaggagccggggcagattgtggagacctacacggaggaggatcctgagggagccatgtctgtagtctctgtggagacctcagatgatgggaccactcggcgcacagagaccacggtcaagaaagtagtgaagactgtgacaacacggacagtacagccagtcgctatgggaccagacgggttgcctgtggatgcttcatcagtttctaacaactatatccagactttgggtcgtgatttccgcaagaatggcaatgggggacctggtccctatgtggggcaagctggcactgctacccttcctaggaacttccactaccctcctgatggttatagtcgccactatgaagatggttatccaggtggcagtgataactatggcagtctgtcccgggtgacccgcattgaggagcggtataggcccagcatggaaggctaccgggcacctagtagacaggatgtgtatgggccccaaccccaggttcgggtaggtgggagcagcgtggatctgcatcgctttcatccagagccttatgggctagaggatgaccagcgtagtatgggctatgatgacctggattatggtatgatgtctgattatggcactgcccgtcggactgggacaccctctgaccctcgtcggcgcctcaggagctatgaagacatgattggtgaggaggtgccatcggatcaatactactgggctcctttggcccagcatgagcgaggaagtttagcaagcttggatagcctgcgcaaaggagggcctccacctcctaattggagacagccagagctgccagaggtgatcgccatgcttggattccgcttggatgctgtcaagtccaatgcagctgcatacctgcaacacttatgctaccgcaatgacaaggtgaagactgacgtgcggaagctcaagggcatcccagtactggtgggattgttagaccatcccaaaaaggaagtgcaccttggagcctgtggagctctcaagaatatctcttttggacgtgaccaggataacaagattgccataaaaaactgtgatggtgtgcctgcccttgtgcgattgcttcgaaaggctcgtgatatggaccttactgaagttattaccggaaccctgtggaatctttcatcccatgactcaatcaaaatggagattgtggaccatgcactgcatgccttgacagatgaagtgatcattcctcattctggttgggagcgggaacctaatgaagactgtaagccacgccatattgagtgggaatcggtgctcaccaacacagctggctgccttaggaatgtaagctcagagaggagtgaagctcgccggaaacttcgggaatgtgatggtttagttgatgccctcattttcattgttcaggctgagattgggcagaaggattcagacagcaagcttgtagagaactgtgtttgccttcttcggaacttatcatatcaagttcaccgggagatcccacaggcagagcgttaccaagaggcagctcccaatgttgccaacaatactgggccacatgctgccagttgctttggggccaagaagggcaaagatgagtggttctccagagggaaaaaacctatagaggatccagcaaacgatacagtggatttccctaaaagaacgagtccagctcgaggctatgagctcttatttcagccagaggtggttcggatatacatctcacttcttaaggagagcaagactcctgccatcctagaagcctcagctggagctatccagaacttgtgtgctgggcgctggacgtatggtcgatacatccgctctgctctgcgtcaagagaaggctctttctgccatagctgacctcctgactaatgaacatgaacgggtggtgaaagctgcatctggagcactgagaaacctggctgtggatgctcgcaacaaagaattaattggtaaacatgctattcctaacttggtaaagaatctgccaggaggacagcagaactcctcttggaatttctctgaggacactgtcatctctattttgaacactatcaacgaggttatcgctgagaacttggaggctgccaaaaagcttcgagagacacagggtattgagaagctggtgttgatcaacaaatcagggaaccgctcagaaaaagaagttcgagcagcagcacttgtattacagacaatctggggatataaggaactgcggaagccactggaaaaagaaggatggaagaaatcagactttcaggtgaatctaaacaatgcttcccgaagccagagcagtcattcatatgatgatagtactctccctctcattgaccggaaccaaaaatcagataacaactattccacaccaaatgagagaggagaccacaatagaacactggatcgatcgggggatctaggcgacatggagccattgaagggaacaacacccttgatgcaggacgaggggcaggaatctctggaggaagagttggatgtgttggttttggatgatgaggggggccaagtgtcttacccctccatgcagaagatttagcaccactatctccgttccatctgggcttatatgtacttttattttttggtggtgaaattgactgatgattttcctttttcttcgctggactattgtgccaactgccaggctgcctcctgcccttacagccctaagtggctgccttctttccatcaactcccaacttcttcctgtgaagtttaattgtctcaacgcctccccctcccccattccctccatttttctcccaagaaacctgactcaattatttgcatattttgagaaactgctgcagattagttctttttgccagttttccctggaactcctggccttttgtggaggggagggatggagagaataggaatcttcactagaagccgtgggaagaattggaagttacatgctgtatatgcaatgtccagcagtctgataaactgacgattcttaatcaagatttttttcctgatggggaagggacttttattttcttttagagaggggaaagtgtgagctcttcccttattcctaatggctatttttgaagcaaagaaggccagcaacattggcacatgccacctggcaaaggacccttgagtaagtgaaggtctcctaaaactgggattaagaaaccttgctctcctcatctccaaggcagggaccatcaagaacctacagactccatctcttctgcaagcctcatgccaaccctgggctattgctgctgccccttaaacacaggctgtccttaacccacctctcctgccctgtgatatgtctgctgagttggcctggccatttccaagaggctgtagaaaggggagaatgtcaaggaagacttttggtagagaaggagcagaaagatgtgtttttgggaagaagaagacctctaggaggagctagtaggaatgtacatgaagcaattagtctgaaactggcttccccactcccccgtttctccttttcctatccttataggcctgtcccttgcctctgccctggattggttggcaaactataggacttgatgtacataactcctgtcccttttcccttacaaggtggggattgcccctggctttgcctcttctttgtgcctttggcctggggtgcatctcctcccgcccttccatgtgcctttctttgcctctgcagtctcatttctcataattttgcaaattatattttgttgctttcttacctactattggccctaaatagcagaaagaagagaagtgaccgagagaacctcagattcttcattgaggattggtatagccatgatttcagtcatagcaagcttttgctcaacagcatatgggtgggatttggcaaaaatcctattctgatgaatctcaaagtaaggctggtaagagaagtgagtggtgtgactcttactccttaggtgcccagaatttaccatcatctctgaaggagttacagggaagtggtctccccaattctcccctccctccagtattgccccctctcactttagcatatattaattagcaggttgggctagagaaatcagctgctatgcgggttgattattattattatttctaatccttttccttatttgccttctactccccttaatctaatctaaaagctctgttccatgcaactggagttccttatccctctcttccccttcccttatatattgaggctatggggtaggagaaaagtgcacaacccaccaccccctctactcgtgcattaaaatttcttatttacccttttcccccttcccatttcttcccactttcatctaccttttctggcaaaaaggagccttttgctctctgtgaccctaagagcacactgcacagggaaaattgccccatccagacctggctccactcttgatctctcttgtcctcttctgctcttttcctggtgctcttttttctcggtggggtgtgggtaatagaacagccgtgggcttttggggacctttaacttttttttctctcttttgtttataaaaaacactaaacattcaattccagagaacccaaaatcccaccttcccaccgaacactactaaggggcttgtgttctgctccataccttttctcttttctttctgtcttgttaatgcttttaaaaacaaatgagttttttatataaataaagtttttaaagtgtgtatgtggggggtctgtgtcatttcttcacttcaagctgttatttcttccctgctttgcatctttgttacttccttatgtatcagtgtcctttccagagcaaccagaaggaggttataccaggatttattttgagctcagccccaactctttatcaagcaacattcttgttaactatatgtgaaacattttttcttctgaagattcttaaaaattgaatgtggctgaagttgaacatgggagcttattgctaatttagagataggaaactgaagcataaagaattaatgacttactttaattactggaattcttctgcaacatttgacaaaactaaccttgaataaggcccactgtaatacgtagctctcttaaatataacacttaggactagaagattagaaactaccaatcccaactacgtaataggaaaatgtaggatcaaaaggcccatgtatataagtactgaccactgggccataatgttgcttctcaggctatatgcagtcctttagtcagaagtcaataggcctatttattaatattttacagaccatattacctggattaccagggactatctttgctgcagagatcaagggttaagatctatgggaagatacttatttttctgaggtccttatgtcctgtcatataattaaagactcaagagaatttatgtgaaatgctttctgtatgccccaatctttagattaaaattatatacctgctcct

SEQ ID NO: 18876 - DNA, 1477 bp, Homo sapiens
  SIMILAR (425)..(976): 991254mologous to Homo sapiens p120 catenin isoform 1B,accession number AF062317,Smith-Waterman Score=972.
atgattggtgaggaggtgccatcggatcaatactactgggctcctttggcccagcatgagcgaggaagtttagcaagcttggatagcctgcgcaaaggagggcctccacctcctaattggagacagccagagctgccagaggtgatcgccatgcttggattccgcttggatgctgtcaagtccaatgcagctgcatacctgcaacacttatgctaccgcaatgacaaggtgaagactgacgtgcggaagctcaagggcatcccagtactggtgggattgttagaccatcccaaaaaggaagtgcaccttggagcctgtggagctctcaagaatatctcttttggacgtgaccaggataacaagattgccataaaaaactgtgatggtgtgcctgcccttgtgcgattgcttcgaaaggctcgtgaatatggaccttactgaagttattaccggaaccctgtggaatctttcatcccatgactcaatcaaaatggagattgtggaccatgcactgcatgccttgacagatgaagtgatcattcctcattctggttgggagcgggaacctaatgaagactgtaagccacgccacattgagtgggaatcggtgctcaccaacacagctggctgccttaggaatgtaagctcagagaggagtgaagctcgccggaaacttcgggaatgtgatggtttagttgatgccctcattttcattgttcaggctgagattgggcagaaggattcagacagcaagcttgtagagaactgtgtttgccttcttcggaacttatcatatcaagttcaccgggagatcccacaggcagagcgttaccaagaggcagctcccaatgttgccaacaatactgggccacatgctgccagttgctttggggccaagaagggcaaagggaaaaaacctatagaggatccagcaaacgatacagtggatttccctaaaagaacgagtccagctcgagaacgactgtacaatgaactgaaacgggacctcccccactttgtacgcactgtgctgctccctaaatctgggggtgtggtggagcgctccaaggacttccggcgggaatgtagggatgagcgtatccgtgagtatttttatggattccgaggctgtttctatccccatgccttcaatgtcaaattttcagatgtgaaaatctacaaagttggggcacccaccatcccagactcctgtttacctttgggcatgtctcaagaggataatcagctcaagctagtacctgtcactcctgggcgagatatggtgcaccacctactgagtgttagcactgccgagggtacagaggagaacctgtccgagacaagtgtagctggcttcattgtggtgaccagtgtggacctggagcatcaggtgtttactgttctgtctccagcccctcgcccactgcctaagaacttccttctcatcatggatatccggttcatggatctgaagtag

SEQ ID NO: 18877 - DNA, 1895 bp, Homo sapiens
  SIMILAR (152)..(610): 1001254mologous to Homo sapiens p120 catenin isoform 1B,accession number AF062317,Smith-Waterman Score=764.
catcctagaagcctcagctggagctatcaagaactgtgtgctgggcgctggacggtaccttttagaaaagggatttggagatgggaaaacttagataactagtttgctgccatttgtaatttgttccacccctttctatttgctattctagtatggtcgatacatccgctctgctctgcgtcaagagaaggctctttctgccatagctgacctcctgactaatgaacatgaacgggtggtgaaagctgcatctggagcactgagaaacctggctgtggatgctcgcaacaaagaattaattggtaaacatgctattcctaacttggtaaagaatctgccaggaggacagcagaactcctcttggaatttctctgaggacactgtcatctctattttgaacactatcaacgaggttatcgctgagaacttggaggctgccaaaaagcttcgagagacacagggtattgagaagctggtgttgatcaacaaatcagggaaccgctcagaaaaagaagttcgagcagcagcacttgtattacagacaatctggggatataaggaactgcggaagccactggaaaaagaaggatggaagaaatcagactttcaggaggcggtggcgggggtggaggctttcctggtccgaagccgagtgcggttgggggcggtggtggcgttcagagaactacatccgggtttagaggccgtacgtttgcgatatagcccaatagcagtcgttatggtgggggaggcggggcgagacctacgacgccggcgagcagtggccgttacggccgaaaagatggcggtcttggcacctctaattgctctcgtgtattcggtgccgcgactttcacgatggctcgcccaaccttactaccttctgtcggccctgctctctgctgccttcctactcgtgaggaaactgccgccgctctgccacggtctgcccacccaacgcgaagacggtaacccgtgtgactttgactgggtggtgcatgtcagaggggaactcgctggcaaagttgaaggcaaacctgtgaagcagagactgaaaggtggtctcttggcaaggagggcccgtttcctgcagccggagcccaatgtcaccctgaactcagcccaagagcctcacgaagaactgaaaaccaaggagagggcacttgcagatgacgttgctcccatggcagcgtctgtgcccgtgggcttctctctgtggaaaatggtggaggctgcttctgccccaggagggagaaacaccgactccctggctttggcgccagaagcctggatcggctgccagcccgtcatgcccagctgtgaccccggtccgggccctgcctgcctccccaccaagactttccgcagctatctgccccgctgtcaccgcacttacagctgtgtccactgccgtgcacacctggccaaacacgatgagcttatttccaaggagcaagcttttgagacgagccagaagtacaaggaagggaaatacatcattgaaatgtcacacatggtgaaggacaacggctgggactgaggggctcaggcagggtgtgcccttcctccgcatgcccctccctccccacggccctgccaagcagtctataccagcatgagtactgccccacccctgggggaaacctggctccaaccaacccctcccctgcctccaccatatccactaccaggcaccctttataacaggggtctgggggtaccccaggggtgttaaggctcacgagtgggcagcagtcagggagagacagaactggtggaaagggatggttgagggtctttctgttcccaagatcctgaacatggaagcgatggcagggcatagactcatgcacagaggattgtgggaggaatccgctattgctccaccttttttg

SEQ ID NO: 18878 - DNA, 6040 bp, Homo sapiens
  SIMILAR (367)..(1620): 981254mologous to Homo sapiens p120 catenin isoform 1A,accession number AF062324,Smith-Waterman Score=2171.
ctgccagatcagtttgtcaccacccaggctcccttgcctttggctgggtgcaacttccattttaggtgttggatctgagggggaaaaaaaagagagagggagagagagagaaagaagagcaggaaagatcccgaaaggaggaagaggtggcgaaaaatcaactgccctgctggatttgtctttctcagcaccttggcgaagccttgggtttctttcttaaaggactgatttttagaactccacatttgagctctctccttcctgcttcctccttgctgtggtggctgggatgctccttccatgattttttgaatctagactgggctgttctctgtgttaaaccaatcagttgcgaccttctcttaacaggtggagtcgaccgccagcatcttggcctctgtgaaggaacaagaggcccagtttgagaagctgacccgggcgctggaggaggaacggcgccacgtctcggcgcagctggaacgcgtccgggtctcaccacaagatgccaacccactcatggccaacggcacactcacccgccggcatcagaacggccggtttgtgggcgatgctgaccttgaaagacagaaattttcagatttgaaactcaacggaccccaggatcacagtcaccttctatatagcaccatccccaggatgcaggagccggggcagattgtggagacctacacggaggaggatcctgagggagccatgtctgtagtctctgtggagacctcagatgatgggaccactcggcgcacagagaccacggtcaagaaagtagtgaagactgtgacaacacggacagtacagccagtcgctatgggaccagacgggttgcctgtggatgcttcatcagtttctaacaactatatccagactttgggtcgtgatttccgcaagaatggcaatgggggacctggtccctatgtggggcaagctggcactgctacccttcctaggaacttccactaccctcctgatggttatagtcgccactatgaagatggttatccaggtggcagtgataactatggcagtctgtcccgggtgacccgcattgaggagcggtataggcccagcatggaaggctaccgggcacctagtagacaggatgtgtatgggccccaaccccaggttcgggtaggtgggagcagcgtggatctgcatcgctttcatccagagccttatgggctagaggatgaccagcgtagtatgggctatgatgacctggattatggtatgatgtctgattatggcactgcccgtcggactgggacaccctctgaccctcgtcggcgcctcaggagctatgaagacatgattggtgaggaggtgccatcggatcaatactactgggctcctttggcccagcatgagcgaggaagtttagcaagcttggatagcctgcgcaaaggagggcctccacctcctaattggagacagccagagctgccagaggtgatcgccatgcttggattccgcttggatgctgtcaagtccaatgcagctgcatacctgcaacacttatgctaccgcaatgacaaggtgaagactgacgtgcggaagctcaagggcatcccagtacttgttgggattgttagaccatcccaaaaaggaagtgcaccttggagcctgtggagctctcaagaatatctcttttggacgtgaccaggataacaagattgccataaaaaactgtgatggtgtgcctgcccttgtgcgattgcttcgaaaggctcgtgatatggaccttactgaagttattaccggaaccctgtggaatctttcatcccatgactcaatcaaaatggagattgtggaccatgcactgcatgccttgacagatgaagtgatcattcctcattctggttgggagcgggaacctaatgaagactgtaagccacgccatattgagtgggaatcggtgctcaccaacacagctggctgccttaggaatgtaagctcagagaggagtgaagctcgccggaaacttcgggaatgtgatggtttagttgatgccctcattttcattgttcaggctgagattgggcagaaggattcagacagcaagcttgtagagaactgtgtttgccttcttcggaacttatcatatcaagttcaccgggagatcccacaggcagagcgttaccaagaggcagctcccaatgttgccaacaatactgggccacatgctgccagttgctttggggccaagaagggcaaagggaaaaaacctatagaggatccagcaaacgatacagtggatttccctaaaagaacgagtccagctcgaggctatgagctcttatttcagccagaggtggttcggatatacatctcacttcttaaggagagcaagactcctgccatcctagaagcctcagctggagctatccagaacttgtgtgctgggcgctggacgtatggtcgatacatccgctctgctctgcgtcaagagaaggctctttctgccatagctgacctcctgactaatgaacatgaacgggtggtgaaagctgcatctggagcactgagaaacctggctgtggatgctcgcaacaaagaattaattggtaaacatgctattcctaacttggtaaagaatctgccaggaggacagcagaactcctcttggaatttctctgaggacactgtcatctctattttgaacactatcaacgaggttatcgctgagaacttggaggctgccaaaaaagcttcgagagacacagggtattgagaagctggtgttgatcaacaaatcagggaaccgctcagaaaaagaagttcgagcagcagcacttgtattacagacaatctggggatataaggaactgcggaagccactggaaaaagaaggatggaagaaatcagactttcaggtgaatctaaacaatgcttcccgaaaccagagcagccattcatatgatgatagtactctccctctcattgaccggaaccaaaaatcagataagaaacctgatcgggaagatattcagatgagcaatatgggatcaaacacaaaatcactagataacaactattccacaccatatgagagaggagaccacaatagaacactggatcgatcgggggatctaggcgacatggagccattgaagggaacaacacccttgatgcagaagatttagcaccactatctccgttccatctgggcttatatggacctctaattttttggtggtgaaattgactggatgatctcactttttcttcactggaatattgggccaactgccaagctgccctccggccctaacggccctaaggggctggccttatttccattaaacttccatacttcttcctggggaagctaaaacgggcctaaaggccttccccttcccccattcccatccaatttttttcccaagaaacctgactcaattatttgcatattttgagaaactgctgcagattagttctttttgccagttttccctggaactcctggccttttgtggaggggagggatggagagaataggaatcttcactagaagccgtgggaagaattggaagttacatgctgtatatgcaatgtccagcagtctgataaactgacgattcttaatcaagatttttttcctgatggggaagggacttttattttcttttagagaggggaaagtgtgagctcttcccttattcctaatggctatttttgaagcaaagaaggccagcaacattggcacatgccacctggcaaaggacccttgagtaagtgaaggtctcctaaaactgggattaagaaaccttgctctcctcatctccaaggcagggaccatcaagaacctacagactccatctcttctgcaagcctcatgccaaccctgggctattgctgctgccccttaaacacaggctgtccttaacccacctctcctgccctgtgatatgtctgctgagttggcctggccatttccaagaggctgtagaaaggggagaatgtcaaggaagacttttggtagagaaggagcagaaagatgtgtttttgggaagaagaagacctctaggaggagctagtaggaatgtacatgaagcaattagtctgaaactggcttccccactcccccgtttctccttttcctatccttataggcctgtcccttgcctctgccctggattggttggcaaactataggacttgatgtacataactcctgtcccttttcccttacaaggtggggattgcccctggctttgcctcttctttgtgcctttggcctggggtgcatctcctcccgcccttccatgtgcctttctttgcctctgcagtctcatttctcataattttgcaaattatattttgttgctttcttacctactattggccctaaatagcagaaagaagagaagtgaccgagagaacctcagattcttcattgaggattggtatagccatgatttcagtcatagcaagcttttgctcaacagcatatgggtgggatttggcaaaaatcctattctgatgaatctcaaagtaaggctggtaagagaagtgagtggtgtgactcttactccttaggtgcccagaatttaccatcatctctgaaggagttacagggaagtggtctccccaattctcccctccctccagtattgccccctctcactttagcatatattaattagcaggttgggctagagaaatcagctgctatgcgggttgattattattattatttctaatccttttccttatttgccttctactccccttaatctaatctaaaagctctgttccatgcaactggagttccttatccctctcttccccttcccttatatattgaggctatggggtaggagaaaagtgcacaacccaccaccccctctactcgtgcattaaaatttcttatttacccttttcccccttcccatttcttcccactttcatctaccttttctggcaaaaaggagccttttgctctctgtgaccctaagagcacactgcacagggaaaattgccccatccagacctggctccactcttgatctctcttgtcctcttctgctcttttcctggtgctcttttttctcggtggggtgtgggtaatagaacagccgtgggcttttggggacctttaacttttttttctctcttttgtttataaaaaacactaaacattcaattccagagaacccaaaatcccaccttcccaccgaacactactaaggggcttgtgttctgctccataccttttctcttttctttctgtcttgttaatgcttttaaaaacaaatgagttttttatataaataaagtttttaaagtgtgtatgtggggggtctgtgtcatttcttcacttcaagctgttatttcttccctgctttgcatctttgttacttccttatgtatcagtgtcctttccagagcaaccagaaggaggttataccaggatttattttgagctcagccccaactctttatcaagcaacattcttgttaactatatgtgaaacattttttcttctgaagattcttaaaaattgaatgtggctgaagttgaacatgggagcttattgctaatttagagataggaaactgaagcataaagaattaatgacttactttaattactggaattcttctgcaacatttgacaaaactaaccttgaataaggcccactgtaatacgtagctctcttaaatataacacttaggactagaagattagaaactaccaatcccaactacgtaataggaaaatgtaggatcaaaaggcccatgtatataagtactgaccactgggccataatgttgcttctcaggctatatgcagtcctttagtcagaagtcaataggcctatttattaatattttacagaccatattacctggattaccagggactatctttgctgcagagatcaagggttaagatctatgggaagatacttatttttctgaggtccttatgtcctgtcatataattaaagactcaagagaatttatgtgaaatgctttctgtatgccccaatctttagattaaaattatatacctgctcct

SEQ ID NO: 18879 - DNA, 5020 bp, Homo sapiens
  SIMILAR (246)..(1394): 961254mologous to Homo sapiens p120 catenin isoform 1B,accession number AF062317,Smith-Waterman Score=1909.
ctgccagatcagtttgtcaccacccaggctcccttgcctttggctgggtgcaacttccattttaggtgttggatctgagggggaaaaaaaagagagagggagagagagagaaagaagagcaggaaagatcccgaaaggaggaagaggtggcgaaaaatcaactgccctgctggatttgtctttctcagcaccttggcgaagccttgggtttctttcttaaaggactgatttttagaactccacatttgaggagctatgaagacatgattggtgaggaggtgccatcggatcaatactactgggctcctttggcccagcatgagcgaggaagtttagcaagcttggatagcctgcgcaaaggagggcctccacctcctaattggagacagccagagctgccagaggtgatcgccatgcttggattccgcttggatgctgtcaagtccaatgcagctgcatacctgcaacacttatgctaccgcaatgacaaggtgaagactgacgtgcggaagctcaagggcatcccagtactggtgggattgttagaccatcccaaaaaggaagtgcaccttggagcctgtggagctctcaagaatatctcttttggacgtgaccaggataacaagattgccataaaaaactgtgatggtgtgcctgcccttgtgcgattgcttcgaaaggctcgtgatatggaccttactgaagttattaccggaaccctgtggaatctttcatcccatgactcaatcaaaatggagattgtggaccatgcactgcatgccttgacagatgaagtgatcattcctcattctggttgggagcgggaacctaatgaagactgtaagccacgccatattgagtgggaatcggtgctcaccaacacagctggctgccttaggaatgtaagctcagagaggagtgaagctcgccggaaacttcgggaatgtgatggtttagttgatgccctcattttcattgttcaggctgagattgggcagaaggattcagacagcaagcttgtagagaactgtgtttgccttcttcggaacttatcatatcaagttcaccgggagatcccacaggcagagcgttaccaagaggcagctcccaatgttgccaacaatactgggccacatgctgccagttgctttggggccaagaagggcaaagatgagtggttctccagagggaaaaaacctatagaggatccagcaaacgatacagtggatttccctaaaagaacgagtccagctcgaggctatgagctcttatttcagccagaggtggttcggatatacatctcacttcttaaggagagcaagactcctgccatcctagaagcctcagctgggagctatccaggaacttgtgtgctgggcgctgggacgtatgggtcgatacatccgctctgctctgcgtcaagaggaaggctctttctgccatagctgaccctccgtgactaatgaacatgaacgggtggtgaaagctgcatctggagcacctgagaaacctggcttgtggaatgctcgcaacaaagaattaattggtaaacatgctattcctaacttggtaaagaatctgcccaggaggacagcagaactcctcttggaatttctctgagggacactgtcatctctattttgaacactatcaacgaggttatcgctgagaacttggaggctgccaaaaagcttcgagagacacagggtattgagaagctggtggtgatcaacaaatcagggaaccgctcagaaaaagaagttcgagcagcagcacttgtattacagacaatctggggatataaggaactgcggaagccactggaaaaagaaggatggaagaaatcagactttcaggtgaatctaaacaatgcttcccgaagccagagcagtcattcatatgatgatagtactctccctctcattgaccggaaccaaaaatcagataacaactattccacaccaaatgagagaggagaccacaatagaacactggatcgatcgggggatctaggcgacatggagccattgaagggaacaacacccttgatgcaggacgaggggcaggaatctctggaggaagagttggatgtgttggttttggatgatgaggggggccaagtgtcttacccctccatgcagaagatttagcaccactatctccgttccatctgggcttatatgtacttttattttttggtggtgaaattgactgatgattttcctttttcttcgctggactattgtgccaactgccaggctgcctcctgcccttacagccctaagtggctgccttctttccatcaactcccaacttcttcctgtgaagtttaattgtctcaacgcctccccctcccccattccctccatttttctcccaagaaacctgactcaattatttgcatattttgagaaactgctgcagattagttctttttgccagttttccctggaactcctggccttttgtggaggggagggatggagagaataggaatcttcactagaagccgtgggaagaattggaagttacatgctgtatatgcaatgtccagcagtctgataaactgacgattcttaatcaagatttttttcctgatggggaagggacttttattttcttttagagaggggaaagtgtgagctcttcccttattcctaatggctatttttgaagcaaagaaggccagcaacattggcacatgccacctggcaaaggacccttgagtaagtgaaggtctcctaaaactgggattaagaaaccttgctctcctcatctccaaggcagggaccatcaagaacctacagactccatctcttctgcaagcctcatgccaaccctgggctattgctgctgccccttaaacacaggctgtccttaacccacctctcctgccctgtgatatgtctgctgagttggcctggccatttccaagaggctgtagaaaggggagaatgtcaaggaagacttttggtagagaaggagcagaaagatgtgtttttgggaagaagaagacctctaggaggagctagtaggaatgtacatgaagcaattagtctgaaactggcttccccactcccccgtttctccttttcctatccttataggcctgtcccttgcctctgccctggattggttggcaaactataggacttgatgtacataactcctgtcccttttcccttacaaggtggggattgcccctggctttgcctcttctttgtgcctttggcctggggtgcatctcctcccgcccttccatgtgcctttctttgcctctgcagtctcatttctcataattttgcaaattatattttgttgctttcttacctactattggccctaaatagcagaaagaagagaagtgaccgagagaacctcagattcttcattgaggattggtatagccatgatttcagtcatagcaagcttttgctcaacagcatatgggtgggatttggcaaaaatcctattctgatgaatctcaaagtaaggctggtaagagaagtgagtggtgtgactcttactccttaggtgcccagaatttaccatcatctctgaaggagttacagggaagtggtctccccaattctcccctccctccagtattgccccctctcactttagcatatattaattagcaggttgggctagagaaatcagctgctatgcgggttgattattattattatttctaatccttttccttatttgccttctactccccttaatctaatctaaaagctctgttccatgcaactggagttccttatccctctcttccccttcccttatatattgaggctatggggtaggagaaaagtgcacaacccaccaccccctctactcgtgcattaaaatttcttatttacccttttcccccttcccatttcttcccactttcatctaccttttctggcaaaaaggagccttttgctctctgtgaccctaagagcacactgcacagggaaaattgccccatccagacctggctccactcttgatctctcttgtcctcttctgctcttttcctggtgctcttttttctcggtggggtgtgggtaatagaacagccgtgggcttttggggacctttaacttttttttctctcttttgtttataaaaaacactaaacattcaattccagagaacccaaaatcccaccttcccaccgaacactactaaggggcttgtgttctgctccataccttttctcttttctttctgtcttgttaatgcttttaaaaacaaatgagttttttatataaataaagtttttaaagtgtgtatgtggggggtctgtgtcatttcttcacttcaagctgttatttcttccctgctttgcatctttgttacttccttatgtatcagtgtcctttccagagcaaccagaaggaggttataccaggatttattttgagctcagccccaactctttatcaagcaacattcttgttaactatatgtgaaacattttttcttctgaagattcttaaaaattgaatgtggctgaagttgaacatgggagcttattgctaatttagagataggaaactgaagcataaagaattaatgacttactttaattactggaattcttctgcaacatttgacaaaactaaccttgaataaggcccactgtaatacgtagctctcttaaatataacacttaggactagaagattagaaactaccaatcccaactacgtaataggaaaatgtaggatcaaaaggcccatgtatataagtactgaccactgggccataatgttgcttctcaggctatatgcagtcctttagtcagaagtcaataggcctatttattaatattttacagaccatattacctggattaccagggactatctttgctgcagagatcaagggttaagatctatgggaagatacttatttttctgaggtccttatgtcctgtcatataattaaagactcaagagaatttatgtgaaatgctttctgtatgccccaatctttagattaaaattatatacctgctcct

SEQ ID NO: 18880 - DNA, 2030 bp, Homo sapiens
  SIMILAR (152)..(1279): 471254mologous to Homo sapiens My009 protein,accession number AF059753,Smith-Waterman Score=612.
  misc_feature (1)...(2030): n = a,t,c or g
gggggtacgtttgcgatatagcccaatagcagtcgttatggtgggggaggcggggcgagacctacgacgccggcgagcagtggccgttacggccgaaaagatggcggtcttggcacctctaatttgctctcggtgtattcggtgccgcgacatttcacgatggctcgcccaaccttactaccttctgtcggcccctgctctctgctgccttccctactcgtgaggaaactgccgccgctctgccacggtctgcccacccaaccgcgaagacggtaaccccgtgtgactttgactggagagaaagtggagatcctgatgtttctcagtgccattgtgatgatgaagaacccgcagatccatcactgtggagcaacatataggcaacattttcatgtttaagtaaaagtggccaacacaattcttttcttcccgcttggatattcgcatgggcctactttacatcacactctgcatagtgttcctgatgacgtgcaaacccccccctccccatatatgggccctgagtatatcaagtacttcaatggataaaccctttgatgaggaactagaacgggacaacagggtcaattggaattgttggagttctttggcaattggtctaatgactggcaatcatttgcccctatctatgctgacctctcccttaaatacaactgtacagggctaaattttgggaaggtggatgttggacgctatactgatgttagtacgcggtacaaagtgagcacatcacccctcaccaaggcaactccctaccctggatcctgttccaaggtgggcaaggagggcaatgcgggcggccacagatttgacaaggaaagggacggggctgttttcatgggaccttctctgaggtacctgaaaggaagggcaggagaatgtgatccgagaatttaacttaaatgagctataccagcgggccaagaaactatcaaaggctggagacaatatcccctgaggagcagcctgtggcttcaacccccaccacagtgtcagatgggggaaaacaagaaggataaataagatcctcgactttggcaagtgcttcctctcctgtcaattcccaggctctttccataaccacaagcctgaggttgcaagctttttatttatgttttccctttggcttgtgactgggtgggggcagcatgcagcttctgattttaaagaggcatctagggaattgtcaggcaccctacaggaaaggcctgccatgctgttggccaactgtttcactggagcaaagaaagagatctcatagggacggagggggaaatggttttccctccaagcttgggtcaagtgtgttaacttgcttatcaagctattcaggaccatctccatggttttctccatggaaactctgtggtttccatcattccctccttagttgaaccctgcacagccttggttagaaccctagatttaaacccttaaggttaagatgcctggggtataggaacgcttaagaattttccccccaaggaactcttgccttcccttaaagccctttctggcttcggtttatggtccttcaattaaaagtataagccgtaactttgtccgcctagtccctaaggagaaaccttttaaccacaaaagtttttatcattgaagacaaatattgaacaacccccctattttgtggggggattgaggaagggggtggaataggagggctttgaggacttttccttttgtgtgggtagggacttggaggagaaatcccctggactttccctaaccctgctgacatacatccccacacccagttgatggctttccgtaataaaaagattgggatttccttttgnnnnnnnnnnnnnnngggggggccgtttaaaaggatcaaattttactgccgggggctgggaaggtattattttttttatggggcccccaaaataaaatcccgggcccggggtttaaaaacggggggaggggaaaaccctgggggtacccaaattaaatggcttggaaaaaaatccctttttggccggggggggaag

SEQ ID NO: 18881 - DNA, 1422 bp, Homo sapiens
  SIMILAR (206)..(90): 561254mologous to Homo sapiens HDCGC21P,accession number AF067801,Smith-Waterman Score=107.
atggaatctactggtgaagatgctgtgaatattgttgaaatggtaactgaggatttagtatatcgtctagtagtcctgaagtctctccaagtctggctgagtccaggggattttatgggctcagaagggacagagtgcatgctgattggtccatgggtggccatgggcaggcccagtgaaagcaccctaagttctcactctgggccgaggtctccacatggaactggcagcccagcccccaggcttcaggctgtccatgtcttgaagtgcccaaagtccagaggggttcaaggtggctgggggctggcatctcagtgtctccctgagcacaggcacacccagttgagttgtgacagcacccaggcttggccacaactttgctctgcccagagcctgcgccacaatcggagtggccagggagcaggagcagtcacttctgagcctgcaggggcaggagggcttcccaggcccccaagaacacaaggatgcctgggtgcagagtcacggctggacaactgcactctcagcagagaggaggccctgaagagggtagactcctctctgatgttgatcatcctgacctcagcagctctcagcagagaggtccagaagggccaaggtggcaggaggctggtgtgtcagtgctgcctggagcagcacacacctggctgggccacaacaacgctgggaccaggaagaggccaggcaatgggagcagatacccctgagtctgctgatgatgggggacccacctgggtactcgagagcaccaggagacccaggcccacagccacaacccaggcagctgcagctgtgcctggggagctctcaccctaccaactcataaggggcagagctcccgccagtccctggctctgcagagtgtgcagcattgactgtgctgccttctctgcatctcccacagtggtggcaggtaggtcggcccggccccacctgagtggatcccagggttgggcttccagggcagcaggccccagagcaaagagtttactcactgactcacccagagcaacttccagtcctgcaagtaccattgctgatatacagatactcctcaacttacaatggagttccttcctgttaaagcatggcccagggaaaccaaaagattggacagccctgaagtctagtccttatgtccaaacttgctttctccctgccaatactactgcttcctatggccggtgccatccaatggccgccagcagctacaacaaaacaggcaggagaaggggtataagcagtttgctgagacttctggctttctctttctacctgtgtcagacgcttgcctcctctcttactactcctgaacatcatactccaggttatccagcctttggactgtggaattgtaccagcggcctcctggaggctctcaggctttcagccacagactga

SEQ ID NO: 18882 - DNA, 393 bp, Homo sapiens
  SIMILAR (392)..(186): 971254mologous to Homo sapiens HSPC303,accession number AF161421,Smith-Waterman Score=358.
  misc_feature (1)...(393): n = a,t,c or g
cttaacttgccagcccgggtgataaagcttgttccctttaaacggcccccccnnnnnnnnnnnnnnnnnncaacacaaatccaggaggaagtgcatgccgatacatgcaaatatccccccctccagggcatacccaaaaccagccatacttgttgttttcaatagcttccaggaaatgcttgcaccccgtgcttcttgttcactacttcttccagctttttctcatcccaattatccatagtatctttttcaagttcttcatctcttgcatcaatgtaaacacttcgcttttcacattttctctccagagtcaagtcatgggagaacttccacttatctcctttagtacactgtccttgctagaagaaagcacatactacagacttgggatct

SEQ ID NO: 18883 - DNA, 376 bp, Homo sapiens
ttttggattttaatgtatgatggtctttattttctaactttattggcaaaaaagaaaagggaaacttttaaacaatttaacacagggcattgtagctgatcctgtcagataaaagaagttccattttaaatgtccatctaattgtccaaagatacacaatactgaatctgcatacgcagtttcctttatgaagtacagtgctcatgttttaggcagtctttatgagatgtagccaaagtcagaagagaagatgtagggacaagatgccttttttgcaggaggttaactcctccagaatcagcataggaaataaacatcctgttgattcatctttatctgaagtatatgtgctgaatctttcaagaacttggcttta

SEQ ID NO: 18884 - DNA, 1425 bp, Homo sapiens
  SIMILAR (1122)..(877): 971254mologous to Mus musculus integrin alpha v subunit,accession number U14135,Smith-Waterman Score=406.
tcatagctgcagcataataggtgtatcataaaacaaaggtggtgtgaagtgttgaaagctgtagttttcagttgtacttgacggtggtcctctggcagcatctgggttctgctttttcttagtcttatatatgtgaattctgctagtgtgccatttgaagggttccactgctctttcctcttctgtacctgttctgctgccacctctatggaccttcactgtggaaaaatcaacatgcaggttttgggaactagcagtggtccccaacctttccttccctggacatagagggggatgctttcgggatgaaactgtccaactcggatcaccaggtattaggttctcataagaagcatgtaacctagatcccttgcatgcacacttcacagcagggttcacacaatagggtttgctcctatgagaatctaatgccaccactgatgaagacgcgctgggcacgaagaaatccacgcgaagccgaagtaacttccctcggggccagagtactcggcaggactgtccacgtctaggttgaaggcgcggcacagaggtagcaggagtcccgagagaagaagcgggaggccgcggggaccgaggcgcagccgtgccgcggcggaaaagccatcgccgaagtgcgcgcgggacgccaagccgggagcggtagccacctcccccgccccagcgaggcgcccagtgcccggcccgcgcctgcgcgcgcccaaacttgccggccgctctcttctcggctagcccgggacagctccggggcaggcaagagggctgagcttcggagcgaccgccagggacgacggcggagagcgcgcggggcggggacagcagcgcagacggtcctttgcttaccactgctcccgtccacgcagcgtcattgaaaccatcctggtccagatctcccaaaggagctatggcactgccaaaccgtgcaaagacctcaaatccattcagctttgtcgtctggaagtctcctgaagctctctgtagagacactgagacctgccccacctcttggagtttgccatcagagccacgatccatgaagagaggtgctccaataaacacatctgcataatcatctccattaatgtcagtggcagctacagaaaaatccgaaatatgcagccatctacccaaatagctgtcatcaaaaatagcttgtgcagtccgagttgctaattggttattatacttgatgctgtaaacattggggtcgtatttagatacgatttctgccacttgatccgaaataagctgaccttgccaataaaagctaccaggaccaccaagaagtactctgtcagcctttgcatttgattgttcttcccacaagataatctgcccaaatatctgctcatcctctcttgctttctccagtgtctctctcgaagaattttcctctctctcctgcat

SEQ ID NO: 18885 - DNA, 649 bp, Homo sapiens
  SIMILAR (323)..(646): 1001254mologous to Homo sapiens vitronectin alpha subunit precursor,accession number M14648,Smith-Waterman Score=561.
atcagtggtggcattagattctcataggagcaaaccctattgtgtgaaccctgctgtgaagtgtgcatgcaagggatctaggttacatgcttcttatgagaacctaatacctggtgatccgagttggacagtttcatcccgaaagcatccccctctatgtccagggaaggaaagccggatgtttcttctcgtgggagctcccaaagcaaacaccacccagcctgggattgtggaaggagggcaggtcctcaaatgtgactggtcttctacccgccggtgccagccaattgaatttgatgcaacagaattacacagagagctgaaagaaaatcagaatcattcctattctctgaagtcgtctgcttcatttaatgtcatagagtttccttataagaatcttccaattgaggatatcaccaactccacattggttaccactaatgtcacctggggcattcagccagcgcccatgcctgtgcctgtgtgggtgatcattttagcagttctagcaggattgttgctactggctgttttggtatttgtaatgtacaggatgggcttttttaaacgggtccggccacctcaagaagaacaagaaagggagcagcttcaacctcatgaaaatggtgaaggaaactcagaaacttaa

SEQ ID NO: 18886 - DNA, 5717 bp, Homo sapiens
  SIMILAR (42)..(3185): 1001254mologous to Homo sapiens vitronectin alpha subunit precursor,accession number M14648,Smith-Waterman Score=5484.
ggctaccgctcccggcttggcgtcccgcgcgcacttcggcgatggcttttccgccgcggcgacggctgcgcctcggtccccgcggcctcccgcttcttctctcgggactcctgctacctctgtgccgcgccttcaacctagacgtggacagtcctgccgagtactctggccccgagggaagttacttcggcttcgccgtggatttcttcgtgcccagcgcgtcttcccggatgtttcttctcgtgggagctcccaaagcaaacaccacccagcctgggattgtggaaggagggcaggtcctcaaatgtgactggtcttctacccgccggtgccagccaattgaatttgatgcaacaggcaatagagattatgccaaggatgatccattggaatttaagtcccatcagtggtttggagcatctgtgaggtcgaaacaggataaaattttggcctgtgccccattgtaccattggagaactgagatgaaacaggagcgagagcctgttggaacatgctttcttcaagatggaacaaagactgttgagtatgctccatgtagatcacaagatattgatgctgatggacagggattttgtcaaggaggattcagcattgattttactaaagctgacagagtacttcttggtggtcctggtagcttttattggcaaggtcagcttatttcggatcaagtggcagaaatcgtatctaaatacgaccccaatgtttacagcatcaagtataataaccaattagcaactcggactgcacaagctatttttgatgacagctatttgggttattctgtggctgtcggagatttcaatggtgatggcatagatgactttgtttcaggagttccaagagcagcaaggactttgggaatggtttatatttatgatgggaagaacatgtcctccttatacaattttactggcgagcagatggctgcatatttcggattttctgtagctgccactgacattaatggagatgattatgcagatgtgtttattggagcacctctcttcatggatcgtggctctgatggcaaactccaagaggtggggcaggtctcagtgtctctacagagagcttcaggagacttccagacgacaaagctgaatggatttgaggtctttgcacggtttggcagtgccatagctcctttgggagatctggaccaggatggtttcaatgatattgcaattgctgctccatatgggggtgaagataaaaaaggaattgtttatatcttcaatggaagatcaacaggcttgaacgcagtcccatctcaaatccttgaagggcagtgggctgctcgaagcatgccaccaagctttggctattcaatgaaaggagccacagatatagacaaaaatggatatccagacttaattgtaggagcttttggtgtagatcgagctatcttatacagggccagaccagttatcactgtaaatgctggtcttgaagtgtaccctagcattttaaatcaagacaataaaacctgctcactgcctggaacagctctcaaagtttcctgttttaatgttaggttctgcttaaaggcagatggcaaaggagtacttcccaggaaacttaatttccaggtggaacttcttttggataaactcaagcaaaagggagcaattcgacgagcactgtttctctacagcaggtccccaagtcactccaagaacatgactatttcaagggggggactgatgcagtgtgaggaattgatagcgtatctgcgggatgaatctgaatttagagacaaactcactccaattactatttttatggaatatcggttggattatagaacagctgctgatacaacaggcttgcaacccattcttaaccagttcacgcctgctaacattagtcgacaggctcacattctacttgactgtggtgaagacaatgtctgtaaacccaagctggaagtttctgtagatagtgatcaaaagaagatctatattggggatgacaaccctctgacattgattgttaaggctcagaatcaaggagaaggtgcctacgaagctgagctcatcgtttccattccactgcaggctgatttcatcggggttgtccgaaacaatgaagccttagcaagactttcctgtgcatttaagacagaaaaccaaactcgccaggtggtatgtgaccttggaaacccaatgaaggctggaactcaactcttagctggtcttcgtttcagtgtgcaccagcagtcagagatggatacttctgtgaaatttgacttacaaatccaaagctcaaatctatttgacaaagtaagcccagttgtatctcacaaagttgatcttgctgttttagctgcagttgagataagaggagtctcgagtcctgatcatatctttcttccgattccaaactgggagcacaaggagaaccctgagactgaagaagatgttgggccagttgttcagcacatctatgagctgagaaacaatggtccaagttcattcagcaaggcaatgctccatcttcagtggccttacaaatataataataacactctgttgtatatccttcattatgatattgatggaccaatgaactgcacttcagatatggagatcaaccctttgagaattaagatctcatctttgcaaacaactgaaaagaatgacacggttgccgggcaaggtgagcgggaccatctcatcactaagcgggatcttgccctcagtgaaggagatattcacactttgggttgtggagttgctcagtgcttgaagattgtctgccaagttgggagattagacagaggaaagagtgcaatcttgtacgtaaagtcattactgtggactgagacttttatgaataaagaaaatcagaatcattcctattctctgaagtcgtctgcttcatttaatgtcatagagtttccttataagaatcttccaattgaggatatcaccaactccacattggttaccactaatgtcacctggggcattcagccagcgcccatgcctgtgcctgtgtgggtgatcattttagcagttctagcaggattgttgctactggctgttttggtatttgtaatgtacaggatgggcttttttaaacgggtccggccacctcaagaagaacaagaaagggagcagcttcaacctcatgaaaatggtgaaggaaactcagaaacttaactgcagtttttaagttatgctacatcttgacccactagaattagcaactttattatagatttaaactttcttcatgaggagtaaaaatccaaggctttactgctgatagtgctaattggcattaaccacaaaatgagaattatatttgtcaaccttctccttataaataagttcagacatacatttaataacatagggtgacttgtgtttttaggtatttaaataataaaatttcaagggatagtttttattcaatgtatataagacaggtagtgcctgatttactactttatataaaatagtacctccttcagttactgtttctgatttaatgtacggaactttatttgttgttgttgttgttgttgttgttgttgttttaaagcagtccaaatttggaccttagcaatcatgtcttttgtataggtacttaatgttaatacatattacactacagtttacttttcagaatactaaagactttataactgcatgaacttggatttttttaatcactcatatggtagaattttataaacacatacatgataccatccaaattcttgcttttaataacaaaggtacaatattttgttttagtatgaaaatctggtagatcctattacacttctgtttatattaaatccacaatattttattacatttttaacttgtataaattttaggtcaaatccttcaagccaacctatactaaaaattagttccataatcacaaatggctcttttgtgtaattgtttaatttcacctgaatatcataatgcttaaagccatatggagttggaaattatttccaaagcatatttattccattgttttagtctggctatttacagtataaaaaaagcattttattaaaatactgtgtagttctttgagatagttgcttatgcatatagtaagtattacattcttagagtagagcagagtttttagttagtattaatttattttcctccattcatgtacttttccttatatttccaaaactgttactgagaatgggtcaagatcagtgagaaatctttacagttgacaggaacctggaccccttaccccaactttatgagtaatgcttggaataaaaaactcttaaggcaactcactgatttacttctagcaatagcatgatgttacaggaatattacctctgtttaagcaaggtaatgtgtaaaatcagtctcggctgtcagaataacttctaaaaggtatttttataagcagttcaagttactgaaaaccttttaaacctttctgaagttcgttagtataaattacttttctaggattattaataaaagccacataggtggcaagttgtagttttatatggctctgtagagtggtgaaccttctagaggaatatatgatttattcacagttcctcaaggcctggggatgatgatcagttatacctatttttgtgcaattacatcatgttgtacattagaaatggagagtttaatagctctttaactgctgtcctcattaggtaatgataaatatttcccttaaataattgactattttgctgtgttttaaaaatgattgaaatttatcttgccatatctcataatttcatgcacaagttgactgagctaatcttgagaatatattcgtaaaataggagcacatttagttgaggtatacaaggtaggactctagacaaaaccttctattttagctttagtgaatttcaaaagtaatgggtcttggagtatagatttttattagtagcttgaaagagcttaatcatatgcagtaagtatttttattaccaataaatttaaaattttttaagaaaaatatttttatcctagggccaagtgttgcctgccaccaatcagtaagttagtctataacaaattttaccctaacagttttaccacctagcaacagtcatttctgaaaatatgttggatagaaagtcactctttggcaaaagtgttagaatttgcttttgtgccatctattccttttatggcatctatcttgaaagtaatcttgtattggagattgaaagatgctgtaatttagaaattaacatgatatcttaaattacctttatgaaatatagttttgtataatagcatagattttccttcaaaaaatgaacatttatatatctacaaaaatatggagaagagcaatttgaaagcctactttctgaagaaaatggtgggatttttttttatcatgattaaatatcaaaaaattgccctatgaaaactttaaatctctaaaacatttgaaatactaccatatttgtgatttattgagaataaaaatccattttgaaatgtaaaatttttatgatctgattcagttttaagaaaacatgaatgaactagaagatattaaaaacatttgacattggtaagaaatattgatactgatattgatttttatataggtatttatttcagaattgatattttgagaaaaatacatgtgagtcattttttctgtttctcttttctcttaacgattatcactgtaattctgaatct

SEQ ID NO: 18887 - DNA, 423 bp, Homo sapiens
  SIMILAR (274)..(423): 941254mologous to Homo sapiens uncharacterized hypothalamus protein HT010,accession number AF220184,Smith-Waterman Score=280.
cgtatgatttagaatttagaacaaatgaaaactgtatagattcccctttaagggaatttgccccattgttctacatattttaagataaacttcctgttgcaattcctgccacagaatagaggcctagacagagcacccttatgtgcagaaatgaatagaatgtacttgtgtaatataacgtacttgtgtgtatacttgttccatatactcaggcatttaccttggaaatggcctacactgagccaccgcttgtgaataatattgtctctataggtgtgcaagcatttcctggaagctattgaaaacaacaagtatggctggttttgggtatgccctggagggggtgatatttgcatgtatcgtcatgcacttcctcctggatttgtgttcaacaaagataaaaagaaagaagagaaaaaagat

SEQ ID NO: 18888 - DNA, 3416 bp, Homo sapiens
  SIMILAR (1468)..(2316): 701254mologous to Homo sapiens HSPC303,accession number AF161421,Smith-Waterman Score=902.
ttatgcagatgtgtttattggagcacctctcttcatggatcgtggctctgatggcaaactccaagaggtggggcaggtctcagtgtctctacagagagcttcaggagacttccagacgacaaagctgaatggatttgaggtctttgcacggtttggcagtgccatagctcctttgggagatctggaccaggatggtttcaatgacgctgcgtggagcggcggacgagtggaagcaaaggaccgtctgcgctgctgtccccgccccgcgcgctctgcgccctcgtccctggcggtcgctccgaagctcagccctcttgcctgccccggagctgtcccgggctagccgagaagagagcggccggcaagtttgggcgcgcgcagcggcgggcgcggcaactgggcgcctcgctggggcgcggggaggtggctaccgctcccggcttggcgtcccgcgcgcacttcggcgatggcttttccgccgcggcgacggctgcgcctcggtccccgcggcctcccgcttcttctctcgggactcctgctacctctgtgccgcgccttcaacctagacgtggacagtcctgccgagtactctggccccgagggaagttacttcggcttcgccgtggatttcttcgtgcccagcgcgtcttcatcagtggtggcattagattctcataggagcaaaccctattgtgtgaaccctgctgtgaagtgtgcatgcaagggatctaggttacatgcttcttatgagaacctaatacctggtgatccgagttggacagtttcatcccgaaagcatccccctctatgtccagggaaggaaagccggatgtttcttctcgtgggagctcccaaagcaaacaccacccagcctgggattgtggaaggagggcaggtcctcaaatgtgactggtcttctacccgccggtgccagccaattgaatttgatgcaacagggcctatcggatgcgcgacatcacgagtgacgcgtagtcattttcccacgtcccgtccctgccccctcctagtgggacgcagtgggcgcgcacgcgcagctccgcttccgggagccgctcctcgctacccactatgctctgcgacatcgacctgtcgcaaaggccgcgtttgcggggccaatgagcgactcgctttccgtgcgggccagaacccctgacggtattcagctgcgcgtaagtctggccggtgccatctgtctccgcaatgccccccaagaaacaggctcaggccgggggcagcaaaaaggcggagcaaaaaaagaaggagaagattatcgaacccctgatgacgctagctctctcattactatagtgacgctgctggcgcccccgcacgctgggctttgcctctccgcccacacgcccgtgttcacccacccatgcacccgggtgcgaaatgacccctcgggactggcacagggttttatccttcgctagtcctctcagaattgaggagattttccaaggttatgacaaaactttcggtttgaagaataagaaaggagcaaagcaacagaagtttatcaaggctgtcacacatcaagttaaatttggtcaacaaaatccacgtcaggtagcacagagtgaagctggaaaaggaaattgaagaaggatgacaagaagaaagaattgcaggagctaaatgagctgttcaaacctgtagttgctgctcaaaaaattaagttaaaggtgcagatcccaagtctgtagtattgtgcattcttcaagcaagggcagtgtactaaaggagataagtgtaagttctcccatgacttgactctgggagagaaaatgtgaaaagcgaagtgtttacattgatgcaagagatgaagaacttgaaaaagagacaaagtcttcccttatccaggctgatactatggataattgggatgagaaaaagctggaagaagtagtgaacaagaagcacggtgaggcggaaaagaaaaaaccaaaaactcaaatagtgtgcaagcatttcctggaagctattgaaaacaacaagtatggctggttttgggtatgccctggagggggtgatatttgcatgtatcgtcatgcacttcctcctggatttgtgttgaaaaaagataaaaagaaagaagagaaagaagatgaaatttcattagaagatctaattgagagagagcgttctgccctaggtccaaatgttaccaaaatcactctagaatcttttcttgcctggaagaaaaggaaaagacaagtataagattgttaaacttgaacaagatatggaaagagaggaaagctgacttcaaagcagggaaagcacttagtgatccagtgggcgtgaagtgtttgaatttcgtcctgaactggtcaatggatgatgatgaggaagcagatgataccccgctacaccccagggaacaggtggtgattgaggttgatgattcagtgagtgtaaattgacatagattttaagcctggtacatccccaagagatgtagatggaaacaggtattactgtagccagtcttggaaagattcagcacatatacttcagattaaagatgaaaacaaattaagtgaagcttctgggaggtagggctgaaaatggtgaaagaagtgacttggaagaggacaacgagagggagggaacggaaaatgggagccattgatgctgttcctgttgatgaaaatcttttccctgggagaggatttgggatgaactagaagaagaatataaatgcacttgatttagaagaatgacaccaaacacatcgctgaaaaaattaagtcagctcagcacgagttgaaattgactacattaatttctttccacctagaatcaacaggatgtttatttcctatgctgattctggaggagttaacctcctgcaaaaaaggcatcttgtccctacatcttctcttctgactttggctacatctcatagtaagttcagagtagttcatgataaattgaaaatataatggtccattgccagaaaatggattggatgttgtaactgtccacccaagtaagaaggtgtatctgcctttccatcttttggttttcatttgggccatgtgcttattacccagaaaccaacaaaccttatatttaaaaataccccttcatttggacacagtttttaaatgagtgatttaatttccctctgtatttgtatgtttagaagactgcctaaaacatgagcactgtactttataaaaggaaactgcgtatgcagattccagtattgtgtatctttgggacaattagatgggcatttaaaatggaacttcttttatctgacaggatcagctacaatgcccggtgttaaattgtttaaaagtttcccttttcttttttgccaataaagttgtaaataaagaccatcatacattaaaatccaaaaaaaaaaacaaagggcggccgct

SEQ ID NO: 18889 - DNA, 484 bp, Homo sapiens
  SIMILAR (1)..(219): 901254mologous to Anas platyrhynchos lactate dehydrogenase B- 4/epsilon crystallin,accession number J03869,Smith-Waterman Score= 360.
agcagctgccatggatggattttgggggaacatggcgactcaagtgtggctgtgtggagtggtgtgaatgtggcaggtgtttctctccaggaattgaatccagaaatgggaactgccaatgatagtgaaaattggaaggaagtgcataagatggtggttgaaagtgcctatgaagtcatcaagctaaaaggatataccaactgggctattggattaaccagcgttatcaaccagaagctaaaggatgatgaggttgctcagctcaagaaaagtgcagataccctgtgggacataggctgtagaaatttaaaaactacaatgtgattaactcgagcctttagttttcatccatgtacatggatcacagtttgctttgatcttcttcaatatgtgaatttgggctcacagaatcaaagcctatgcttggtttaatgcttgcaatctgagctcttgaacaaataaaattaactattgtagtgtgaaa

SEQ ID NO: 18890 - DNA, 825 bp, Homo sapiens
  SIMILAR (76)..(423): 1001254mologous to Homo sapiens lactate dehydrogenase B (AA 1 - 334),accession number Y00711,Smith-Waterman Score=607.
atgggaaaagctaaggaagaggtgtttctagcagacgagctagtgcatgcaaagaccaatagaaataaagaatgtgattattctgtgaccgccaattctaagattgtagtggtaactgcaggagtccgtcagcaagaaggggagagtcggctcaatctggtgcagagaaatgttaatgtcttcaaattcattattcctcagatcgtcaagtacagtcctgattgcatcataattgtggtttccaacccagtggacattcttacgtatgttacctggaaactaagtggattacccaaacaccgcgtgattggaagtggatgtaatctggattctgctagatttcgctaccttatggctgaaaaacttggcattcatcccagcagctgccatggatggattttgggggaacatggcgactcaagtgaccaccctggccggccacgtccccatcctgtgcctataaaaccccctgagaccctaccaggcagagacacaagcagctggacgtcaagaggagcacactggcggaggaacacacaagcagctggacgtcgagagcacatcgacaggcaccagcaggccatcgacaggtggaacaacgtggggtttggacggggtggtcagaggagagcccggctgctgagtgacctgactccaacaggaaaaccatcttcctactctgtctcccttctggctcccccatctgctgagagctacttccactcaataaaaccttgcattcattctccaagcccacgtgagatccaattcttcgggtacaccaaggcaagaaaccccagggtacagaaagccttctgtccttga

SEQ ID NO: 18891 - DNA, 1339 bp, Homo sapiens
  SIMILAR (764)..(1336): 991254mologous to Homo sapiens lactate dehydrogenase B (AA 1 - 334),accession number Y00711,Smith-Waterman Score=993.
atggagaaacctaagaggctgcggtggttgtggggccccgccccctcctccctccttgcagagccggcgccggaggagacgcacgcagctgactttgtcttctccgcacgactgttacagaggtctccagagccttctctctcctgggggggccgtgccctggcggaggagcagaaggcagagggtagcagctgcggctcagcggagagacttgttgcatttgcagctaaaaccaggccctacttgtccttgtgcaaaatggcaactcttaaggaaaaactcattgcaccagttgcggaagaagaggcaacagttccaaacaataagatcactgtagtgggtgttggacaagttggtatggcgtgtgctatcagcattctgggaaagagcagagcaatggagcacacaactgcaggggcaccatacacaccaaggcagcagacctgccagtgcaacatgatgtctctggctgatgaacttgctcttgtggatgttttggaagataagcttaaaggagaaatgatggatctgcagcatgggagcttatttcttcagacacctaaaattgtggcagataaagattattctgtgactgccaattctaagattgtagtggtaactgcaggagtccgtcagcaagaaggggagagtcggctcaatctggtgcagagaaatgttaatgtcttcaaattcattattcctcagatcgtcaagtacagtcctgattgcatcataattgtggtttccaacccaagggacatttttaacgtatggtacctggaaactaagtggattacccaaacaccgcgtgattggaagtggatgtaatctggattctgctagatttcgctaccttatggctgaaaaacttggcattcatcccagcagctgccatggatggattttgggggaacatggcgactcaagtgtggctgtgtggagtggtgtgaatgtggcaggtgtttctctccaggaattgaatccagaaatgggaactgacaatgatagtgaaaattggaaggaagtgcataagatggtggttgaaagtgcctatgaagtcatcaagctaaaaggatataccaactgggctattggattaagtgtggctgatcttattgaatccatgttgaaaaatctatccaggattcatcccgtgtcaacaatggtaaaggggatgtatggcattgagaatgaagtcttcctgagccttccatgtatcctcaatgcccggggattaaccagcgttatcaaccagaagctaaaggatgatgaggttgctcagctcaagaaaagtgcagataccctgtgggacatccagaaggacctaaaagacctgtga

SEQ ID NO: 18892 - DNA, 1430 bp, Homo sapiens
  SIMILAR (1302)..(409): 491254mologous to Homo sapiens lactate dehydrogenase B (AA 1 - 334),accession number Y00711,Smith-Waterman Score=460.
  misc_feature (1)...(1430): n = a,t,c or g
tttttttttttttttttttcacactacaatagttaattttatttgttccaagaagctcaagattccaagcattaaaccaagcataggcttttgaattctgtgagcccaaattcacaatatttgaagaagatcaaagcaaacttgtgatccatgtaccatggatcgaaaactaaaggctcgagttaatcacattgtagtttttaaatttctacagcctagagctcactagtcacaggtcttttaaggtccttctggatgtccccacagggtatctgcacttttcttgaagctgagcaacctcatcatcctttaagcttctgggttgataacgctggttaatccccggggcatttgaggatacatggaaaggctccagggaagacttcattctccaatggccatacatccccctttaaccattggttgacacgggatggaatcctgggataggatttttcaacatggaattcaataagattcagccacacttaaatccaaatagccccagttggggatatccttttagcttggatgacttcataggcacatttcaaccaccatccttatgcacttccttcccatttttcactatcattgtcagttcccatttctgggattcaattcctggagagaaacacctgccacattcacaccattccaacaccaagccacacttgagtcgccatgttccccccaaaattccatccatgggcagctgcttgggatgaatgccaagttttttcagccataaggtagcgaaatctagcaggaatccagattacatccacttccaatcacgcggtgtttgggtaatcccactttagtttcccagggtaacatacggtaagaatgtcccactgggggttgaaacccacaattatgatgcaatccaggactgtacttggacgatcttgaggaataatgaatttgaagacattaaccatttctctgcacccagattggagccgactctccctttcgtggctgacgggactccctgcagttacccactacaatctttagaattggcggtccacagaaataatctttatcctgcccacaattttagggtgtctgaagaaataagctcccatgctgcagatccatcatttctcctttaagcttatcttccaaaacatccacaagagcaaagttcatcaggccaggagactttcccaggaatgctgatagcacactgccataccaacttgtccaacacccactacaggtgatcttattgtttggaactgttgcctcttcttccgcaactggtgcaatgagtttttccttaagagttgccattttgcacaggagagagaaggctctggagacctctgtaacagtcgtgcggagaagacaaagtcaggctgcgtgcgtctcctcgtgccgaattcaacgccgtacgatttncaattncnnnccggcccgcg

SEQ ID NO: 18893 - DNA, 1062 bp, Homo sapiens
  SIMILAR (914)..(582): 331254mologous to Homo sapiens Human apolipoprotein E mutant protein fragment 12,accession number Y20299,Smith-Waterman Score= 91.
atgagtggcagcttcctgatgttcttgcctaaagcagatatgccagctcccatgcttgtacagccagcagaacgatttgactcatgggtctgggcggggcctgagcagctgcattctaaccagctgccgggtgatgccgatgctctgctcctcggccgcaatttgacaaaagggacacggcgcctctgtacagaagaacaggtcaaaattccccagccagagccaggtcccccgcagaagctgtgtgtcctgtctgcagcgggaggccaggcctgcctggtgctcacattccccaggtggactgtctgggaagaaccgccaccccctgggcttgtgggagtgaaggcctgtgcaaggtggtgggggaagggcgagccggacagaaaagccccagcccccccacccccgcccccgggaactgagaaagtggatcagacatcagaggcaaagaggaaccctcattcagagaccacctgcaccagcgcttccgggctgggtcagaaaaacaggtcgtcctcgccgcccgcgccgggcgcctgcagcaggttcctcttctgggagccagcacgcagccagagctccagggaggggggtgcacccggggttagtccaggtcttggggaagatgttgagaagatggtatgtcgctgtcttacctggctgagtagccacaagcaacaagccaaagggcaccctgaggggagaacactgtggctctcagtggccgcctcgggagaaacagcagcagctacacctgcaggcctgcaggggagaggaactttcacccacgtgggggcccctcctccactgcagctcttcatcttagaaagatgccagggaccccccaatgtgagggccgcagagctgtgcccagggctttacccgaaacctgaatgcttcagggaccaggcacaaccaggtgaacgctccagggcctctcgccttctcacccccatcaagccccacaggtcctcagaaggtcaaaagcctcggaaacagttcagccagaacaattttgccacccaaatggtgactcaaggagggaggcagaagaatgcgtaa

SEQ ID NO: 18894 - DNA, 212 bp, Homo sapiens
  SIMILAR (80)..(211): 771254mologous to Homo sapiens Fragment of human secreted protein encoded by gene 33,accession number Y36521,Smith-Waterman Score=190.
gtgtgactgcacagaaaagttacaaaacaaatttgactttttgcgctcacagttgaatgatatttcgtcatttaagaatatctacagatatgcctttgattttgcaaggcaatcaaagtatcgtgttatgaacaaagatcaatggtacaatgtattagaattcagcagaacagtccatgctgatcttagtaactatgatgaagatggtgctt

SEQ ID NO: 18895 - DNA, 425 bp, Homo sapiens
  SIMILAR (281)..(424): 1001254mologous to Homo sapiens Fragment of human secreted protein encoded by gene 33,accession number Y36521,Smith-Waterman Score=248.
cccacgcgtccggcagcagtagcggaagacggaggcctcaaaaagtgtaaaatctccagctattgcagatcccaaccccctgctagactaataagtggagaggaacatttttcaagcaagaagtgcctggcttggttttatgaatatgcaggtcctgatgaagttgtagggccagaaggaatggaaaaattttgtgaagacattggtgttgaacctgaaaatgtgtgactgcacagaaaagttacaaaacaaatttgactttttgcgctcacagttgaatgatatttcgtcatttaagaatatctacagatatgcctttgattttgcaagggataaagatcagagaagccttgatattgatactgctaaatctatgttagctcttctgcttgggaggacatggccactgttttcagtattttacc

SEQ ID NO: 18896 - DNA, 1333 bp, Homo sapiens
  SIMILAR (704)..(1027): 571254mologous to Homo sapiens Fragment of human secreted protein encoded by gene 33,accession number Y36521,Smith-Waterman Score=242.
  misc_feature (1)...(1333): n = a,t,c or g
ctcttgcttgctgtgactggtggagctgccgcgctgtccgcgttatctcctcccggtgagaacgaaccgcagtgtccaccggcgaggagccagccctgtcccggtcagagaaagacgacgaggatacctgggagcgggcggcggccgggctgggccgcgccggtgcgggctggcgactctgctcctccgcttgctgcatgtctctgggaactgggtgccagcgcctgaggggcttccaagcggacagggacccccttccccggcttccctgcccaccctgcccgggaaggccggaagatgccggtgaagaagaagagaaaatcccctggggtggcagcagcagtagcggaagacggaggcctcaaaaagtgtaaaatctccagctattgcagatcccaaccccctgctagactaataagtggagaggaacatttttcaagcaagaagtgcctggcttggttttatgaatatgcaggtcctgatgaagttgtagggccagaaggaatggaaaaattttgtgaagacattggtgttgaacctgaaaatattattatgttagttttagcgtggaaattggaggctgaaagcatgggattttttaccaaggaagaatgggtaaaggggaatgacttcattacagtgtganctgcacagaaaagggtacaaaccaaattttgacttttttgccgctcacagttgaattgatatttcgtcatttaagaatatctacagatatgcctttgattttgcaagggataaagatcagagaaagccttgataatgatactgctaaatcttatgttagctcttctgcttggggagggacatggcccactgttttcaagtattttaccaggtacctggggggcaatcaaagtatcgtgttatgaacaaagactcaatggtacaatgtatcagaattcagcagaacagtcccatgctgatcttagtaactatgatgaagatgggtgcttggcctgttcttcttgatgaatttgttgagtggcaaaaagtccgtcagacatcatagcaagaactatgtggaagaaaatgccaacctttccagttcccacgtgtatacaagcttaatgtgatgagggggaaaaaaatccaacgggtgcattttcattcagtatgaaagacttctcatagtacttttttttcctttttttaaaggaggtttttcttggtacatgtgatgggcattgagccacacgtcttcttagactgaatattgaaggtttttgttttgagttatgtttataacaacatttattttcagaacaataaagattcagatttgtgacaaaggccttaaagtgaaaaaaaaaaa

SEQ ID NO: 18897 - DNA, 479 bp, Homo sapiens
  SIMILAR (3)..(344): 951254mologous to Homo sapiens c431H6.1.1 (PUTATIVE novel protein) (isoform 1),accession number AL031009,Smith-Waterman Score =580.
gcggccgcgccggctccagggccatgaagcccccaggaggagaatcgagcaatctttttggaagtccagaagaagctactccttccagcaggcctaataggatggcatctaatatttttggaccaacagaagaacctcagaacatacccaagaggacaaatcccccagggggtaaaggaagtggtatctttgacgaatcaacccccgtgcagactcgacagcacctgaacccacctggagggaagaccagcgacatttttgggtctccggtcactgccacttcacgcttggcacacccaaacaaacccaaggatcatgttttcatttccttttgcccaaatgagcggggtgggaagagggttagtcttatgtgagcctggctgctcagcgtctcctggccgtcatgacagctgcttggagacccgtgccttccagatggctgggagatgcctctgtggggatgaaatggggcacccctg

SEQ ID NO: 18898 - DNA, 1500 bp, Homo sapiens
  SIMILAR (151)..(324): 931254mologous to Homo sapiens c431H6.1.2 (PUTATIVE novel protein) (PUTATIVE isoform 2),accession number AL031009,Smith- Waterman Score=286.
gcggccgcgccggctccaggaaatggttactgctgacaggaagtttggcatccacctcccccagcctcctgagtggacaggggccctgggcaccacttcagagggccatgaagcccccaggaggagaatcgagcaatctttttgtgatttccagaagaagctactccttctagcaggcctaataggatgtcatctaatatttttggaccaacagaagaacctcagaacatactcaagaggacaaatcccccaggggtataaggaagtggtatctttgacgaatcaacccccgtgcagactcgacagcacctgaacccacctgggagggaagaccagcgacatttttgggtctccggtcactgccacttcacgcttggcacacccaaacaaacccaaggatcatgtttttcttatgtgaaggagaagaaccaaaatccggatcttaaagctgcaagggagcatcccggctgggagcagagccaggtgagaaaggcagcgccagataaagcaggccccgccaaggagcaggagcccatgcccacagtcgacagccatgagccccggctggggccgcggcctcgctctcacaacaaggtcctgaacccaccgggaggcaaatccagcatctccttctactaagagaagccactgctccacccggagccagaccacaaactcaagagatagggtatccatgttgtcatttccttttgcccaaatgaagcggggtgggaagagggttagtcttatgtgagcctggctgctcagcgtctcctggccgtcatgacagctgcttggagacccgtgccttccagatggctgggagatgcctctgtggggatgaaatggggcacccctggccatcactcatgtgtagtccaggtttgagaggaacttggaaggggggtgagggtggggaggtggggcagggcatggtccttggatcaacagcccgccagctgattggatgtctaggaatgactgaaagaaaccaaaacagcctgtccacttgttgttgtgggatggaggaggcgtaagcagaaacactaacagtatattgaccttttagcagaaccgcttccattttggagatcacggctgctaaatccagcatccccacttcattttacccccagcatattgttttgtagtcttttcttgaaacattttgattgcttttcctcggcagctttcaaaaaaccaaataataatagttatccgttttttacttcatgggaaggattgttttgggtgccctggaccctctggaagtggcccagttcctggccatctggaaacctcgggcctggatcttgatctcatgttggggaatctggcctgtctttttcacacaggggctggtcttgggtcctttaacatgccagttttggcttgtggaattcttgctttttttcctctcatcagccttaagtttaggcgttttgttggtcttcaacgatgtagacagttccctttacaagtcacaggtttttcccatag

SEQ ID NO: 18899 - DNA, 687 bp, Homo sapiens
  SIMILAR (1)..(684): 891254mologous to Mus musculus protein synthesis initiation factor 4A,accession number X56953,Smith-Waterman Score=1039.
atgtctggtggctccatggattataacagagaacgtggcagcccagagggaatggaccctgatggtgccattgagagcaactgtaatgagatcgttgataactttgatgatatgaatttaaaggagtctcttctttggggcatctatgcttacgattttgagaagtcttctgctattcagcagagagctattattacctgtatgaaagggtatgatgtgattgctcaagctcagtcaggtactggcaagacagccacatttgctatttccatcctgcaacagttggagacccaagcactaatgctggcccccaccagagaactggctccacagatccaaaaggtaattctggcacttggagactatatgggagcaacttgtcatgcctgcattggtggaacaaatgttcaaactgaaatgcaaaaactgcaggctgaagcaccacatattgttgttggtacacttgggagagtgtttgatatgttaaacagaagatatctttttccaaaatggatcaaaatgcttgttttggatgaagcagatgaaatgttgagccatgggtttaaggatgaaatctatgagattttccaaaaactaaatacaagtattcaggttgtgttgctttctgccacaatgccaactgatgtgttggaagtgaccaaaaaattcatgagagatccaatttga

SEQ ID NO: 18900 - DNA, 262 bp, Homo sapiens
  SIMILAR (3)..(77): 1001254mologous to Homo sapiens BM-010,accession number AF208852,Smith-Waterman Score=131.
gcgggattgatgtgcaacaagtgtctttggttataaattatgatctacctaccaatcgtgaaaactatattcacaggtgagaagccagcatcttggctgtattgaaaaaaattcatacgtttttctactgtgatttgtatgaaaggtaacatcaaatcaaggaatagattcagtaaagtcagtagtgttcagtaagatgatgtaattaaatttgtactagggaaggttgatgagaacaaagtggggaaaacttgtaaacatt

SEQ ID NO: 18901 - DNA, 468 bp, Homo sapiens
  SIMILAR (184)..(423): 751254mologous to Homo sapiens prepro alpha-2-thiol proteinase inhibitor,accession number K02566,Smith-Waterman Score= 311.
gctcgtggccggaacccgtttcttgcggaggaattttctcgccgtgcttcgagcaactggaatgagattgttgataactttgatgatatgaatttaaaggagtctctccttcgtggcatctatgcttacggttttgagaagccttccgctattcagcagagagctattattccctgtattaaagccgagggccctgtggtgacagcccagtacgactgcctcggctgtgtgcatcctatatcaacgcagagcccagacctggagcccattctgagacgcggcattcagtactttaacagcaacactcaacattcctccctcttcatgcttaatgaagtaaaacgggcccaaagacagagaggaggggaaggaactggttacttcgtggacttctctgtgcggaactgccccagacaccatttccccagacaccccaatgtgaggataagaaatgtctgtgaacgttga

SEQ ID NO: 18902 - DNA, 384 bp, Homo sapiens
  SIMILAR (144)..(245): 881254mologous to Mus musculus put. altern. eIF-4A (aa 1- 370),accession number X03039,Smith-Waterman Score=153.
gtcgacgcggccgggcttaaaataaagttgtttcttaactatacctgtctgctattctcctgtaacagacagggacgcttggtctcatacatgttgattaaaattaaataccgacctgactggtgattcttgaattaaggcttattaatttgcagcatggtgacatggaccagaaggagagagatgttatcatgagggaattccggtcagggtcaagtcgtgttctgatcactactgacttgttggtaagtctcttaatgctttttaaaaatctaccaaaagttagctttttggggggcaggcttttaagtaacctttgccaacttgggctatatgcaagatgaaaagaccacactccacagtgggctataccacttagtatag

SEQ ID NO: 18903 - DNA, 3259 bp, Homo sapiens
  SIMILAR (148)..(1287): 671254mologous to Homo sapiens eukaryotic initiation factor 4AII,accession number D30655,Smith-Waterman Score=1139.
  misc_feature (1)...(3259): n = a,t,c or g
ccagcccccaattgatatcgtcagcttctcggcccgcagtccggaattccaggcacgacgccacgcgtccggtggtttttcagatcatgtctggtggctccgcggattataacagcagagaacatggcggcccagagggaatggaccccgtatggtgtcatcgagagcaactggaatgagattgttgataactttgtgtgactatgaatttaaaggagtctctccttccgtggcatcctatgcttacggttttgagaagccttcccctattcagcagaaagctaattattccctgtattaaagggtattgatgtggattgctcaagctccagtcaggtactggcaagacagccacattttgctaatttccatcctgcaaccagttgggagattgagtttcaaggagacccaaagcactagttattgggcccccaccagagaactgggctcaacagatccaaaaggtaattctggcacttggagactatatgggagccacttgtcatgcctgcattgggtggaacaaatgttcgaaatgaaatgcaaaaactgcaggctgaagcaccacatattgttggttggtacacccgggagagtgtttgatatgttaaacagaagatacctttctccaaaatgggatcaaaatgtttgttttggatgaagcagatgaaatgttgagccgtggttttaaggatgcaaatctatgagattttccaaaaactaaacacaagtattcaggttgtgtttgcttctgccacaatgccaactgatgtgttggaagtgaccaaaaaattcatgagagatccaattcgaattctggtgaaaaaggaagaattgacccttgaaggaatcaaacagttttatattaatgttgagagagaggaatggaagttggatacactttgtgacttgtacgagacactgaccattacacaggctgttatttttctcaatacgaggcgcaaggtggactggctgactgagaagatgcatgccagagacttcacagtttctgctctgcatggtgacatggaccagaaggagagagatgttatcatgagggaattccggtcagggtcaagtcgtgttctgatcactactgacttgttggctcgcgggattgatgtgcaacaagtgtctttggttataaattatgatctacctaccaatcgtgaaaactatattcacagaattggcagagggggtcgatttgggaggaaaggtgtggctataaactttgttactgaagaagacaagagatttcttcgtgacattgagactttctaccaatactacagtggaggagatgcccatgaatgtggctgaccttatttaattcctggggatgagagttttggatgcagtgctcgcttgttgctgaataggcgatcacaacgtgcaattgtgcttctttctttgggaatatttgaaatcttgtctcaattgctcataaccggatcagaaaatacagattttgatagcaaagcgacgttagtccgtgagctcttggtgagggaaagtccattggcctttatccctctttaggagttagaactgttgggggtgggtataaaaagatggggtcctgtaaaaacccttccttcccatagaaatttaattcccctagttcctgtagaaaatggttgtaattagatgttcccctatcatttaataattataacttggtggacttaaaaggatcataagtggctgtatattattaaatgatagagaaccatctaataccaaccatttctacaggaactaggggaataaatttctaagaaagaaagatttttacagacccccatcttttaataccccacccccaacagtcctaactcctaaaagagggataaagcccaatgactttccctccacaagaagcctncaggactaacgtcgctttgcctatcaaaatctgtatttctggacccgttatgagcattgagacaagattcaaatattccccaaagaaagaagcacaatgcacgttgtgatcgcctattccagcaacagcggagcactgcatccaaaactctcatccccaggaattaaaataaggtcagcccacatttcatgggcattctcctccactgtagtattggtagaaaggtctcaatgtcacggaggaatcctcttgtcttcttcaagtaacaaaagtttatagccacaccttttcctcccaaattcgacccccctctgccaattctgtgaatataggttttcacggattggtaggtagatccataaatttataaccaaaggacacttgttgcacatcaatccccgcgagcccaacaagtcagtagtgatcagaacacggactttgacccttgaccggaattccctcatgataacatctcttctccttctggtcccatgtcaccatgctgcaaattaataaaccagagcagaaacttgtgaaagtcctctggcatgcatcttctcaggtcaggccaggtccaccttgcgcctcggtattgagaaaaataacagcctgtgtaatggtcaggtgtctcgtacaacgtcacaaaggtgtatccaacttccattcctctctctcaacattaatataaaactggtttgattccttcaagggtcaattcttccttttgtcaccagaattcgaaatgggatctctcatgaattttcgggtcacctgccaaacacatcagttggcattgtggcagaaagcaacacaacctgaatacttgtgtttagtttttggaaaatcttcatagatttgatccttaaaacccaggctcaacattttcatctgcttcatccaaaacaaacattttgatccattttggagaaagggaatcttctgtttaacatatcaaacactcctcccgggttgtacccaacaacaatatgtggtgcttcagcctgcagtttttgcatttcatttcgaacatttgttccaaccaatgcaggcatgacaagtggctcccatatagtctccaagtgccagaattaccttttggatctttaatacagggaataatagctctctgctgaatagcggaaggcttctcaaaaccgtaagaatagatgccacgaaggagagactcctttaaattcatatcatcaaagttatcaacaatctcattccagttgctctcgatgacaccatcggggtccaattccttctgggccgccatgttctctgctgttataattccgcggagccaccaaacatgatccgaaaaaccaccccacgcgtccgcggacgcgtgggcggacgcgtgggtcg

SEQ ID NO: 18904 - DNA, 820 bp, Homo sapiens
  SIMILAR (96)..(527): 311254mologous to Homo sapiens CGI-90 protein,accession number AF151848,Smith-Waterman Score=235.
gggcggacaatgcaactaggctgtggttggggcatccattccttgcagtgatggtactcagcccttgtccctgagcttgctgcttccggcctaggtatgcggtgctttgtggtcagctggctgagcatgagagcatccagaggcgcatccagagtggctttagcttcaaggagcatgtggacaaagccattgctctccagccagaaaaccccatggctcactttcttcttggcaggtggtgctatcaggtctctcacctgagctggctagaaaaaaaaactgctacagccttgcttgaaagccctctcagtgccactgtggaagatgccctccagagcttcctaaaggctgaagaactacagccaggattttccaaagcaggaagggtatatatttccaagtgctacagagaactagggaaaaactctgaagctagatggtggatgaagttggccctggagctgccagatgtcacgaaggaggatttggctatccagaaggacctgggaagaacttggaagtcattttaccgagactaaccacgtttcactggccttcatgacttgatgccactatttaaggtgggggggcggggaggcttttttccttagacctttgcttgagattcaggaaaccacacaaatctgttctcctgggtctgactgctacccactaccactccccattagttaatttattctaacctctaacctaatctagaattggggcagtactcatggcttccgtttctgttgttctctcccttgagtaatctcttaaaaaaatcaagattcacacctgccccaggattacacatggg

SEQ ID NO: 18905 - DNA, 1531 bp, Homo sapiens
  SIMILAR (989)..(1390): 301254mologous to Homo sapiens CGI-90 protein,accession number AF151848,Smith-Waterman Score=131.
tttcgttgctgccatggtggctggcggccgggtaagggtctgagtggatctcctgccaggccaaagcgccttcgggggccgcgggggaaggccaagagtttgcagccagggcgccgggtttgtggtctgcagtgtcgtgaggctgatgtgcagcatgtctagactgggagccctgggtggtgcccgtgccgggctgggactgttgctgggtaccgccgacggccttggattcctgtgcctcctttacagccagcgatggaaacggacccagcgtcatgggcgcagccagagcctgcccaactccctggactatacgcagacttcagatcccggacgccacgtgatgctcctgcgggctgtcccaggtggggctggagatgcctcagtgctgcccagccttttcacggaaaggaaaggaaaagggggctggaccgcctgaattttgtgctgaccacccttgtggcgctgcggcgggaggtggaggagctgagaagcagcctgcgagggcttgcgggggagattgttggggaggtccgatgccacatggaagagaaccagagagtggctcggcggcgaacagtttccgtttgtccgggagaggagtgactccactggctccagctctgtctacttcacggcctcctcgggagccacgttcacagatgctgagagtgaagggggttacacaacagccaatgcggagtctgacaatgagcgggactctgacaaagaaagtgaggacggggaagatgaagtgagctgtgagactgtgaagatggggagaaaggattctcttgacttggaggaagaggcagcttcaggtgcctccaagtgccctggaggctggaggttcctcaggcttggaggatgtgctgcccctcctgcagcaggccgacgagctgcacaggggtgatgagcaaggcaagcgggagggcttccagctgctgctcaacaacaagcttggtgtatggaagccggcaggacttttctctggcgcctggcccgagcctacagtgacatgtgtgagctcactgaggaggtgagcgagaagaagtcatatgccctagatggaaaagaagaagcagaggctgctctggagaagggggatgaagagtgctgacttgtcacctgtggtatgccggtgctttgtggtcagctggctgagcaatgagagcatccagaaggcgcatccaagaattggctttaactttcaaggagcattgtggacaaaagccatttgctctccagccagaaaacccccatggctcactttcttcttggcaggtggtgctatcaggtctctcacctgagctggctagaaaaaaaaactgctacagccttgcttgaaagccctctcagtgccactgtggaagatgccctccagagcttcctaaagtgctacagagaactagggaaaaactctgaagctagatggtggatgaagttggccctggagctgccagatgtcacgaaggaggatttggctatccagaaggacctggaagaactggaagtcattttacgagactaa

SEQ ID NO: 18906 - DNA, 540 bp, Homo sapiens
  SIMILAR (123)..(305): 421254mologous to Canis familiaris dopamine receptor D4,accession number AB044887,Smith-Waterman Score=115.
ctaatgtccacaggagttgccagttaccacctcttggtgacaacctttaataatcctagaattggtgctgtcccagtcagaagtgtccaattttaaggcacagaaaggcgaactggcaaactcccagctctcctgacaccgaatctggtgcaactccgccgcctcctcttccccgggatccagactatctaggtcccagcccagggacgcggtcacctcctccaacgtccggcagccgctctccacgaactcgttcagctcctcctgcagccgccgccgctcctccacaggtggaggctcgccctccatagctgcagcccacccgccaagaggaagcggccgaactgcagaccgcacgcgcaggcctctgggagctgtgggcggggccacagtcgccacgtgacttgaacagccttgagtccataagaataacctgttccccaactccttgatacagtccttcactgaatctgttgttacattaggagttataagtgattccgcaatagtatcatgccttttatgtttattaactggcat

SEQ ID NO: 18907 - DNA, 1803 bp, Homo sapiens
  SIMILAR (481)..(1041): 1001254mologous to Homo sapiens dJ336K20B.1 (novel protein based on FGENESH),accession number AL390026,Smith-Waterman Score= 964.
cgaacggaaccacgggggcgacccacgcgtccggcagttcggccgcttcctcttgtcgggtgggcttgtgctatggagggcgagcctgcacctgtggaggagcggcggggggtgcaggaggagctgaacgatttcgtggagagcggctgccggacgttggaggaggtgaccgcgtccctgggctgggacctacatagtctggatcccggggaaaaggaggcggcggaggatgaagatgtgatttgtccatacgattccaatcatcacatgcctaaatcatttttggcaaagcacatggcatcttgtagattgaggaaaatgggctataccaaagaagaagaggatgaaatgtctaatcctgagtttttctatgaaaatgtgaagataccttcgattactttgaataaggactcacaattccagataattaaacaagctagaactgcagttgggaaagacagtgattgttataatcaaagaatttattcttcattgcctgttgaagttcctttgaatcacaaacggtttgtttgtgatctaactcaagctgatcgtcttgccctctatgatttcgtagttgaggagacaaagaaaaagcgctctgattctcaaattattgaaaatgacagcgatctctttgtagacttggctgccaaaatcaatcaagacaatagtcgaaaaagtccaaaatcctaccttgaaatcctggcagaagtacgagattataaaagaagacgccagtcctatagagccaagaatgttcacataaccaagaaatcatatactgaggtgattcgagatgtgataaatgtgcacatggaagaactcagcaatcattggcaagaagagcaagagaaggcagaggatgatgccgaaaagaatgaagaaaggcgatcagcttcagtagattcacggcagtctggtggaagctatttggatgctgagtgttcacgacatagaagggataggagtagaagcccacataaaagaaaaagaaacaaagataaggataaaaactgtgagtcgagaagaaggaaagagaggagccaggagcctgcacggtcctataataatgaagagagattaagcaacttgactgagctcacacagcactgggatgagacctcaggcagcctgactccagagcacccagcacctgctacggagcctagaacacagaaggcacccaggaaaaacgggttgaatgattccatgcaggaatctaggaggctgaacttcagctttagagtagaatgcccgtcagctcaatatcaaacacaaagggaaaataatgatgattttggggaggaagaagtggaactgtgggttatggtgcagacatgggaaagttcaagaacaacactacaaacaaccagtcctgaaaatagtacagaaacacatcaagaaatcctgatcacaaagattgatttcttaaagggatggaccccaagttcccgaagaacatgcacttcgcctagaagcacaacgagaagggcctggagaagatgcaggacaacaacatgcgagctgaggctatcaaggccccccaaagcctatggaagtccagcccagggttccaaagagcgccagccgcaagctcgatttgcctacactgcccaccccaaggctgggaagcatgctcgggcccacattgccacgggtctcaggctctgctggccaaaggccaaggccaaggatcaaaccaaggcccaggcctcggcttcagctgcagctccagcttcagttctagctcctgctcaggcttccaaaggtgcccaggcccccatgaaggctctggagtag

SEQ ID NO: 18908 - DNA, 1326 bp, Homo sapiens
  SIMILAR (1)..(1185): 961254mologous to Homo sapiens AF-9,accession number L13744,Smith-Waterman Score=1939.
atggctagctcgtgttccgtgcaggtgaagctggagctggggcaccgcgcccaggtgaggaaaaaacccaccgtggagggcttcacccacgactggatggtgttcgtacgcggtccggagcacagtaacatacagcactttgtggagaaagtcgtcttccacttgcacgaaagctttcctaggccaaaaagagtgtgcaaagatccaccttacaaagtagaagaatctgggtatgctggtttcattttgccaattgaagtttattttaaaaacaaggaagaacctaggaaagtccgctttgattatgacttattcctgcatcttgaaggccatccaccagtgaatcacctccgctgtgaaaagctaactttcaacaaccccacagaggactttaggagaaagttgctgaaggcaggaggggaccctaataggagtattcataccagcagcagcagcagcagcagcagtagcagcagcagcagcagcagcagcagcagcagtagcagcagcagcagcagcagcagcagcagcagtagcagcagcagtagcagcagcagcagcagcagtagtaccagtttttcaaagcctcacaaattaatgaaggagcacaaggaaaaaccttctaaagactccagagaacataaaagtgccttcaaagaaccttccagggatcacaacaaatcttccaaagaatcctctaagaaacccaaagaaaataaaccactgaaagaagagaaaatagttcctaagatggccttcaaggaacctaaacccatgtcaaaagagccaaaaccagatagtaacttactcaccatcaccagtggacaagataagaaggctcctagtaaaaggccgcccatttcagattctgaagaactctcagccaaaaaaaggaaaaagagtagctcagaggctttatttaaaagtttttctagcgcaccaccactgatactcacttgttctgctgacaaaaaacagataaaagataaatctcatgtcaagatgggaaaggtcaaaattgaaagtgagacatcagagaagaagaaatcaacgttaccgccatttgatgatattgtggatcccaatgattcagatgtggaggagaatatatcctctaaatctgattcggtccctggacaatcacctgttaccaatatattttttacatcttcttcaacgccaactattctcaaaagctaccaactggacaattctgatcaacagggagctcaggaggcctcggataagcaaattgaaggatatttttccggtgaagttcccgcttaccgacaaggtgagctgattcttgtggcaagccgccagtga

SEQ ID NO: 18909 - DNA, 1030 bp, Homo sapiens
  SIMILAR (282)..(770): 491254mologous to Homo sapiens Human secreted protein, SEQ ID NO: 4839,accession number G00758,Smith-Waterman Score=261.
tctgtggaggaattcatggtgagtcttactgttgcgggctccggggccgtcgaccatgccgctcgacctccacctccgctgggaagctgaggcgccgaacggctgccagagggtcccgggaagcgcatggtgttcaggcgcttcgtggaggttggccgggtggcctattgtctcctttggacctcatgcccgaaaaattgggtcgcgattgtagatgtattttgatcagaacaagggcttttggtcgaatgaccttgcactcaagtgaggaagacaggcccatgcctttccggtgcatgcagctcaactgatttcatccttcaaggttcccgaacagtgcccaaccagaaagtatgttccgacaggcctggcagaagggcagacattcaatacaaaatggggcagcccacacgatggggccaagaagattgaagcccagaggaaaggaaagcccaaagatgaccagatttttgatccgttttaaagttatggaaggccaaaagaaaatgagggaacaggaataatccaaggaatgaagttaaagaagcttcaaaagggcagctctcctggaaaagctttctcccaaaaaaaagcaccttggtacttaagggtactgctgcttgctgctgctgcttgctgctgctgctgctgctgctgctgctgctgctgcttgctgcttgcttgcttgctgcttaaaagttcccagcaaaaaaagatcacccgccgcgagtaaaaaagctccagcccagaaggttcctgcccagaaaagccacaggcccagaaagcagcgcctgctccaaaagctcagaagggtcaaaaagctccagcccagaaagcacctgctccaaaggcatctgggcaagaaagcataagtggcaatcataaaaagtaataaaggttctttttgacctgttgacaaatgtatttaagcctttggatttaaagcctgttgaggctagagttaggaggcagattgatagtaggattataataaacattaaataatcaaaaaaaaaaaaaaaaaaaagtc

SEQ ID NO: 18910 - DNA, 1539 bp, Homo sapiens
  SIMILAR (298)..(1191): 461254mologous to Homo sapiens phosphatidylinositol-glycan- class C (PIG-C),accession number D85418,Smith-Waterman Score=426.
agtaaactgagttgatttgactttatctcagtactactcttgacctttcacaactttcgtaggttcacagtctctctttttctaggaacttggctgtgatgtcctgcctcaaagacaaattcatctattgtaggcctagcccctgcctttgaaaacaaagaaaggttggtactaacatcaacacagcatggaatttccaggggaggtctcatttcaaaacttcataaagaacaagaaccacctgggacttctgtgagggcgatgattaaactggcctgaagtttgaatgaagggataatgtatgctcaaccttgtgactaacaccaaggaggtcaaagtggcagaaggtctttgtatgagcgacagcccttttccctggataaactatggtgggaccggcgattcctgggaagaagctccggaaaaaacatccatgctccggaaaatacccaatatttggggctgtgggtaatttgagtccagtgttggtgatccagcagctgtgcagtgtttgtgtttttgtggttatccgggtggtatatggatgagggtcttctggccccccattggcttgtagggactggcctggcttcttcactgattgggtatgttttgtttgatctcattgatggaggtgaagggcggaagaagagtggggcagacccggtgggctgacctttaagagttgccctagtctttcattactttcacttatggggttttcaccagtgctgaagacccttacagagttctgttcagcactgacacccatctatgccatgtcagtcttcatgctgttaagacatctcatcttttttgactatgggtgccaatgctgccattgtaatccagcacacatccttgtgaacatggccatctttgcttctggtatgctgggcatcacgtcttcccccggtcccctgcatgccttcatcatggttgccatttgccattcaaattttttgccctggtggccccatgttggcagaagaaactaaaaggcatgtactcccccggagctaatgtgggggtcacactggctttttgcattttcagccgtggggaggcctactgtccattagtgctgtgggagcccgtactcttggccccttctgctgatgtctatctcatgtctgtgttccattctacctccatttcgcttgcagcctttttaaagaaaacattccatgggcccttgggatgaagcctgaaatccaaggaagacttgtccccaggttccctcagttaaattaggggcatcccattacattattaaagccaagcctgatagattagcctccctaactagttatagaacttaaagaccagagttccattttggaagcagcatgtcattgtggtaagagaataagggttcaaacccaaaaaaaatgaaccaaaggcttgggtggtgagggtgcttatcctttctgttattttgtagatgaaaaaaactttctggggacctcttgaattacatgcatatgtaacatatgaagtgatgtggtttctattaaaaaaataacacatccatcaaaa

SEQ ID NO: 18911 - DNA, 325 bp, Homo sapiens
  SIMILAR (1)..(279): 981254mologous to Homo sapiens ADP.ATP translocase,accession number J03591,Smith-Waterman Score=495.
gcctacttcggtatctatgacactgcaaagggaatgcttccggatcccaagaacactcacatcgtcatcagctggatgatcgcacagactgtcactgctgttgccgggttgacttcctatccatttgacaccgttcgccgccgcatgatgatgcagtcagggcgcaaaggaactgacatcatgtacacaggcacgcttgactgctggcggaagattgctcgtgatgaaggaggcaaagcttttttcaagggtgcatggtccaatgttctcagaggcatttccccctgtgaacaggcatgttgtattatataacatatcttgagca

SEQ ID NO: 18912 - DNA, 485 bp, Homo sapiens
  SIMILAR (62)..(409): 1001254mologous to Homo sapiens ADP.ATP translocase,accession number J03591,Smith-Waterman Score=615.
cacatccctgtgttttgtgtaccctcttgattttgcccgtacccgtctagcagctgatgtgggtattatcatctaccgagccgcctacttcggtatctatgacactgcaaagggaatgcttccggatcccaagaacactcacatcgtcatcagctggatgatcgcacagactgtcactgctgttgccgggttgacttcctatccatttgacaccgttcgccgccgcatgatgatgcagtcagggcgcaaaggaactgacatcatgtacacaggcacgcttgactgctggcggaagattgctcgtgatgaaggaggcaaagcttttttcaagggtgcatggtccaatgttctcagaggcatgggtggtgcttttgtgcttgtcttgtatgatgaaatcaagaagtacacataagttatttcctaggatttttccccctgtgaacaggcatgttgtattatataacatatcttgagcattcttaaaa

SEQ ID NO: 18913 - DNA, 1580 bp, Homo sapiens
  SIMILAR (713)..(1234): 521254mologous to Homo sapiens ADP/ADT translocator protein,accession number J02966,Smith-Waterman Score=316.
atgacctctggtcctcagaccaacaagcccaaggaacatctcaccgattttaaattggacttgagcgttggtggttcacatggcatcgcctggccttcccggcaaatgggctctccgttagcccgttacctccagtttagacggaaggagtcgggtttctgtgctgtgcctactgcagggaaggggctggaaatggattctctcatcggagttattgaggacctggaccgaggctcagcccccccaaccatttcccaaggccaaaaggtcccgctggcaaaagcgtttctgtcaatggcatgcagttacgggcttcgagatggggagtttactctggattttctgaatgggcccaatgtactcacagggttgagtgctcacaaggctcataagaaaaagagagaggcggaaggctcagagccagagagagagatgccgctgtgtccttgccaaggacttcctggcaggtggagtgaccgcggccatctccaagatggcggtggcacccacggaggggtcaagctgctgctgcaggtgcagagtgccagcaagcagatcaccgcagataagcaatacacgggcgttgtagactgcatggtccgcattcccaaggagcaggagtcctgtccctctggcacgaggatccagttttggcacaagtttgcagggagtctggcatcaggtggtgcccctggggccacatccctgtgttttgtgtaccctcttgagttttgcccgtacccgtctagcagctgatgtgggtaaagctggagctgaaagggaattccgaggcctcgggtgacctgctgggttaagaatctacaaatctgatgggaaataaggggcctgtaccaaggcttttaacgtgtctgtgcagggtattatcatctaccgagccgcctacttcggtatctatgaccactgccaaggggaatgcttccggatcccccagaacactcacatcgtcatcagctggatgatcgcacagactgtcactgctgttgcccgggttgacttccctatcccatttgacacccgttcgccgccggaatgaatgaatgcagtccagggcgccaaaggaactgaccatccatgtacaccaggcacgctttgactgctgggcggaaggattgcttcgtgatgaaggagggcaaagcttttttcaaggggtgcatgggtcccaatgtttctcagagggcatggggtgggtgctttttgtgctttgtctttgtatggatggaaatccaaggaaggtacacataaattaatttcctaggggatttttccccctgtggaacagggcatgtttgtatttatattaacatatctttggaggcattcttgacaagactcctgggctgttcagttttcttcagtgggcaactattttactgggttgaaaaatggggaaggcaataatatttcatctggaccagttctctctcctctaaagccattctccatgatgtatgatgataggactaaaattataatttttatatcagtaaaacactgataaataacaaatttggagaaataaaaatatctaaaataaaaaaaaaaaaaaaaaaaaacctcgt

SEQ ID NO: 18914 - DNA, 1213 bp, Homo sapiens
  SIMILAR (461)..(541): 441254mologous to Bacteriophage T7 0.65 protein,accession number V01127,Smith-Waterman Score=59.
atggaaatgggaggctgtcaggagcccctggtgagttctaagcaggtgaatgttgtgattagacttgtgttcacagtctggtgcattgtggaggatggggcaagcaggagtacaggacatcgggagcacggtgcagcaggagcacagggcaatgggagcacaatgcagcaggagcacaaggtgatgggagcacggtgcagtaggagcacagagcagtgtgagcacagagcagtggctggtgccatgaaggaggaagagatcagagaatctatgcggagaaggtcttcttcttccagtgtggttgtagttggcattgctgcctctgggtaccaaagaatgaaaaccccattttcaactgagctatctttgctccagcctgatactccagactgtgctggagatagtcataccccactggctttttccttcaccgaggacttggaaagttcttgtttgctagaccgaaaggaagaaaaaggggattctgccaggaaatgggaatggcttcatgagtctaagaagaactatcagagtatggagaaacacaccaaactacctggggacaaatgctgtcagcccttaggcaagactaaattggaaagaaaggtgtctgccaaagaaaacaggcaggcccctgtcctccttcaaacatacagggaatcctggaatggagaaaacatagaatcagtgaaacaaagccgtagtccagtttctgtgttttcctgggacaatgaaaagaatgacaaggactcctggagtcaacttttcactgaagattctcaaggccagcgggtcattgccccccaccatagaggttccttttcaagatgtaaccaataactggaattgggacttagggccgtttcctaacagtccttgggctcagtgccaggaggatgggccaactcaaaatttgaagcctgatttgctttttacccaggactttgaaggtaatcaagttatcagacaccaattctaaatgtttgaagctttgtttctaaaagtaccttgaaatgatagagatgtaggaaaatatagttgtgggtggagagaggagtgagtttgtttaggtgggaaggtggcatgggatgaagttgtcattactgagcatcttctctgtgtaaataaagggcagtaccattgttaagacagtgattagcaaatctccccacaacccaggtgtggagagaagagaggtagaatggtgctagct

SEQ ID NO: 18915 - DNA, 408 bp, Homo sapiens
  SIMILAR (2)..(406): 1001254mologous to Homo sapiens Human phospholipase D 1b (hPLD1b) protein,accession number W53280,Smith-Waterman Score=713.
cgacaatgagcacagactcacagacgtgggcagtgtgaagcgggtcacttcaggaccgtctctgggttccctcccacctgccgcaatggagtctatggaatccttaagactcaaagataaaaatgagcctgttcaaaacctacccatccagaagagtattgatgatgtggattcaaaactgaaaggaataggaaagccaagaaagttctccaaatttagtctctacaagcagctccacaggcaccacctgcacgacgcagatagcatcagcagcattgacagcacctccaataccgggtccatccgtagtttacagacaggtgtgggagagctgcatggggaaaccagattctggcatggaaaggactactgcaatttcgtcttcaaagactgggttcaacttgataa

SEQ ID NO: 18916 - DNA, 888 bp, Homo sapiens
  SIMILAR (127)..(519): 461254mologous to Homo sapiens Human thyrotropin GPR N- terminal sequence,accession number W03626,Smith-Waterman Score=321.
atgacgcagcatgctggaaagcgtgacagtgaattgcctgtcattgtgcaagatacagagactgttccttcagtaatggatggaaaagagtaccaagctggccggtttgcccgaggacttcggctacagtgctttagaagaaggagaaggagaaggaggacgaggagaaggagaagaaaagaagaagaagaagaagaagaagaagaagaagaagaagaagaagaagaagtagaagaagaaggaatgaagaaggaagaagaaggaagaagaaggaagaagaagaagaagaagaaagcagaagaagaagaagagaagaagaagaaagaagaagaagagaagaaaagaagaagaagagaagaacccccacgcccacgcaacgacgacgacgcacgaagaagaagaaaagaagaagaagaaggaagaagaagaagtatgaagaaagaagaagaagaagaagaagaagaagaagaagaagaagaagaagaagaagaagaagaagaagaagaagaaaagaagaaaagaagaatagggcctgcctcaaagatgatgggaggatttgaggagctaaggcggggtctcaatgttgggcccacaatggctatttttttccttcagtcagcagctctagctcctgccatcctctacttttgtccttcactgaaaagcaacatttctaaatgtaacttccaattcctgatgttttgtcagcttctagggagagtaacaattcccttccttgtctcacaaagatccaggattgaagttgggagacattcactgtcaactctcaatgcagaaacagctcatgaactatatttaggaaggacagagcctgatgagtgtggaaagactgcaggtttgggcacagggctggatttaaaggtctag

SEQ ID NO: 18917 - DNA, 381 bp, Homo sapiens
  SIMILAR (1)..(231): 911254mologous to Homo sapiens phospholipase D1,accession number AJ276230,Smith-Waterman Score=353.
aaccagtttttcataagctgtgctgatgacaaagttgtgttcaacaagataggcgatgccattgcccagaggatcctgaaagctcacagggaaaaccagaaataccgggtatatgtcgtgataccacttctgccagggttcgaaggagacatttcaaccggcggaggaaatgctctacaggcaatcatgcacttcaactacaggtgccaaaactctaaatggtctattttgagctttcggtcatgcatcatctccatgataatcttaaaagccaacagctgctcaaatcagggtgaaaaccagcagcctagcagccattggagggagcagatcagggttaaggctcccatgtcccacagttctcacattgtcattatttga

SEQ ID NO: 18918 - DNA, 3703 bp, Homo sapiens
  SIMILAR (114)..(3002): 1001254mologous to Homo sapiens phospholipase D1,accession number U38545,Smith-Waterman Score=5106.
tttcgtcagctgtgccagaggcacccgagccctgagagtccgccgccaacgcgcaggtgctagcggccccttcgccctgcagcccctttgcttttactctgtccaaagttaacatgtcactgaaaaacgagccacgggtaaatacctctgcactgcagaaaattgctgctgacatgagtaatatcatagaaaatctggacacgcgggaactccactttgagggagaggaggtagactacgacgtgtctcccagcgatcccaagatacaagaagtgtatatccctttctctgctatttataacactcaaggatttaaggagcctaatatacagacgtatctctccggctgtccaataaaagcacaagttctggaagtggaacgcttcacatctacaacaagggtaccaagtattaatctttacactattgaattaacacatggggaatttaaatggcaagttaagaggaaattcaagcattttcaagaatttcacagagagctgctcaagtacaaagcctttatccgcatccccattcccactagaagacacacgtttaggaggcaaaacgtcagagaggagcctcgagagatgcccagtttgccccgttcatctgaaaacatgataagagaagaacaattccttggtagaagaaaacaactggaagattacttgacaaagatactaaaaatgcccatgtatagaaactatcatgccacaacagagtttcttgatataagccagctgtctttcatccatgatttgggaccaaagggcatagaaggtatgataatgaaaagatctggaggacacagaataccaggcttgaattgctgtggtcagggaagagcctgctacagatggtcaaaaagatggttaatagtgaaagattcctttttattgtatatgaaaccagacagcggtgccattgccttcgtcctgctggtagacaaagaattcaaaattaaggtggggaagaaggagacagaaacgaaatatggaatccgaattgataatctttcaaggacacttattttaaaatgcaacagctatagacatgctcggtggtggggaggggctatagaagaattcatccagaaacatggcaccaactttctcaaagatcatcgatttgggtcatatgctgctatccaagagaatgctttagctaaatggtatgttaatgccaaaggatattttgaagatgtggcaaatgcaatggaagaggcaaatgaagagatttttatcacagactggtggctgagtccagaaatcttcctgaaacgcccagtggttgagggaaatcgttggaggttggactgcattcttaaacgaaaagcacaacaaggagtgaggatcttcataatgctctacaaagaggtggaactcgctcttggcatcaatagtgaatacaccaagaggactttgatgcgtctacatcccaacataaaggtgatgagacacccggatcatgtgtcatccaccgtctatttgtgggctcaccatgagaagcttgtcatcattgaccaatcggtggcctttgtgggagggattgacctggcctatggaaggtgggacgacaatgagcacagactcacagacgtgggcagtgtgaagcgggtcacttcaggaccgtctctgggttccctcccacctgccgcaatggagtctatggaatccttaagactcaaagataaaaatgagcctgttcaaaacctacccatccagaagagtattgatgatgtggattcaaaactgaaaggaataggaaagccaagaaagttctccaaatttagtctctacaagcagctccacaggcaccacctgcacgacgcagatagcatcagcagcattgacagcacctccagttattttaatcactatagaagtcatcacaatttaatccatggtttaaaaccccacttcaaactctttcacccgtccagtgagtctgagcaaggactcactagacctcatgctgataccgggtccatccgtagtttacagacaggtgtgggagagctgcatggggaaaccagattctggcatggaaaggactactgcaatttcgtcttcaaagactgggttcaacttgataaaccttttgctgatttcattgacaggtactccacgccccggatgccctggcatgacattgcctctgcagtccacgggaaggcggctcgtgatgtggcacgtcacttcatccagcgctggaacttcacaaaaattatgaaatcaaaatatcggtccctttcttatccttttctgcttccaaagtctcaaacaacagcccatgagttgagatatcaagtgcctgggtctgtccatgctaacgtacagttgctccgctctgctgctgattggtctgctggtataaagtaccatgaagagtccatccacgccgcttacgtccatgtgatagagaacagcaggcactatatctatatcgaaaaccagtttttcataagctgtgctgatgacaaagttgtgttcaacaagataggcgatgccattgcccagaggatcctgaaagctcacagggaaaaccagaaataccgggtatatgtcgtgataccacttctgccagggttcgaaggagacatttcaaccggcggaggaaatgctctacaggcaatcatgcacttcaactacagaaccatgtgcagaggagaaaattccatccttggacagttaaaagcagagcttggtaatcagtggataaattacatatcattctgtggtcttagaacacatgcagagctcgaaggaaacctagtaactgagcttatctatgtccacagcaagttgttaattgctgatgataacactgttattattggctctgccaacataaatgaccgcagcatgctgggaaagcgtgacagtgaaatggctgtcattgtgcaagatacagagactgttccttcagtaatggatggaaaagagtaccaagctggccggtttgcccgaggacttcggctacagtgctttagggttgtcccttggctatcttgatgacccaagtgaggacattcaggatccagtgagtgacaaattcttcaaggagggtgtgggtttcaacagcagctcgaaatgctacaatttatgacaaggttttccggtgccttcccaatgatgaagtacacaatttaattcagctgagagactttaataaccaaggcccgtatttagcctagggaaagatcccccatcgagctgaggaggaactgaaggaagatccggtggatttttggtgcaattcccccttttatttctttgtctgaagaaagccctactgcccttcctgttgggacccaaagaggcccatagtgccccattgaaggtttggactttaagagatattcattggcagcttcaaagacttccaccctggagaccacactgcacacagtgacttccctgggggatgtcgatagccaaagccaggcctgacgcattctcgtatccaacccaaggaccttttggaaaggcttgggaagggctccagtcccattaatgtaaggcctgtaaacatcagcaagactttataattccttctgcctaacttgtaaaaagggggctgcattcttgttggtagcatgtactctgttgagtaaaacacatattcaaattccgtataccaaaatccatttcctttgtaacaagaatttaccagtaactgtgatctaggttgccaaaaa

SEQ ID NO: 18919 - DNA, 277 bp, Homo sapiens
  SIMILAR (1)..(246): 971254mologous to Homo sapiens protein phosphatase-1 regulatory subunit 7 alpha2,accession number AF067136,Smith- Waterman Score=410.
  misc_feature (1)...(277): n = a,t,c or g
gaacgcggcncggcgcagcaacagtcgcaggagatgatggaggaagaacatgagctgcctgtggacatggaaaccatcaacctggacagagatgcagaggatgttgatttgaatcactatcgcatagggaagattgaaggatttgaggtactgaagaaagtgaagactctctgcctccgccaaaatttaattaaatgcattgagaatctggaggagctacagagtcttcgagagctggatctttaccgacaaccagatcaagaacgattgagaatct

SEQ ID NO: 18920 - DNA, 412 bp, Homo sapiens
  SIMILAR (1)..(405): 911254mologous to Homo sapiens yeast sds22 homolog,accession number Z50749,Smith-Waterman Score=619.
  misc_feature (1)...(412): n = a,t,c or g
cctgtggacatggaaaccatcaacctggacagagatgcagaggatgttgatttgaatcactatcgcatagggaagattgaaggatttgagactctctgcctccgccaaaatttaattaaatgcattgagaatctggaggagctacagagtcttcgagagctggatctttacgacaaccagatcaagaagattgagaatctggatgcgctaacagagctggagattctagatatttcttttaatctgctgagaaacatcgaaggggttgacaagttgacacgnctgaaaaaactcttcttggtcaacantaaaatcagtaaaattgagaacttaagcaacttacatcaactacagatgctagagctgggatctaaccgcatccgggcatcgaaaatatcgacacttaaccaac

SEQ ID NO: 18921 - DNA, 2024 bp, Homo sapiens
  SIMILAR (30)..(365): 671254mologous to Homo sapiens yeast sds22 homolog,accession number Z50749,Smith-Waterman Score=337.
  misc_feature (1)...(2024): n = a,t,c or g
cccacgcgtccgggggaagagcagccaacatggcggcggatcgcggcgcggttcagcaacagtcgcaggatatgatggaggttgacaggcgggtcgagtctgaagaatccggcgatgaagaagggaagaaacacagcagtggcatcgtggccgacctcagtgaacagagcctgaaggatggggaggagcctgggggaggaggacccagaagaagaacatgagctgcctgtggacatggaaaccatcaacctgggacagagatgcagaggatttttgatttgaatcactatcgcatagggaagattgaaggatttgaggtacttgaagaaagttgaagactctcttgcctccgccaaaatttaatttaaatgcctttgagaatcttgggagggagctaccagagtctttccgagagctggatctttacgacaaccagatcaagaagattgagaatctggaggcgctaacagagctggagattctagatatttcttttaatctgctgagaaacatcgaaggggttgacaagttgacacgactgaaaaaactcttcttggtcaacaataaaatcagtaaaattgagaacttaaggcaacttacatcaactaccgaatgctaggagctggggatcttaaccgcatccggggccaattcggnaaatatccgaccaccttaaaccaacctgggagagttggtttttggggaaaaaaacaaaaattactaactttcagaaccctggatgcgcttcaccaaacttgacagtcctcagtatgcagagcaaccggctgaccaagatcgagggtctgcagaaccctggtgaacttgcgggagctgtactttagccacaatggcatcgaggtcatcgagggcctggagaacaataaacaaactcacgaatgttggacattgcatcaaatagaatcaaaaagatttgaaaaatatcagcccatctaacagagcttgcaagagttctgggatggaacgacaatccccttgaagagctggagcgacctcgacgagcttgaaggggagccaggagccttggaagacagtgtaccctggggcgggaacccccttgcaagaaggacccccaagtaccggcggaaaggtcatgctcgcccctcccctccgtgcggcaagatcgatgcccacgttccgtcaggttcctgaagtccttccttggctccctcatgtggtccctctcctcggaagaactgcccagccacggggtttttaacccaccgtgttgctcctgaggtcgtcactatatcaacagtcacaaacccaatgggcaataaaggcactgacgattagctgggcgcgcgcgacgccacacaccatttttcagatgccgttgcaattaaatcttgccacactgtcctcctgggtgattgttgacagttattgtagccacagagagaacataagacacgttgcgttcattcgctagaaatccctgtttccttctctcagaaggcagtcacagtccctacctgagtcgtgtgaaacacagggcctgagagtgctttacaggcattcacgggctgtccgagtggcattcgggggctggcctagctggccctagacctggtgtgcagggttcaggcagtcttgacctgcaacaaccgaggtttttttagtcttttaacccagccattttcaattttttaaaaattagggtaagttaaaaaagcttgggtaaaagctgacttcagccctgtgtggcttgtgttccttagagctctccttccaaagagcgccgggcagggctgactgttttcacgtgtgcccgtcagttctcgccacatccccttgcctgtgggtgaaagctcaggtgtggggagggtgtcctgtgtcccacacggtgctgtgctgctgccagaatacgagtcccattgagcctctccaaagacggcctccaaggatctgaactcttggccactggtatagtggcctcctgttctcaccccattgttattttggcttttttaatataaaatgtacattgacagacaaaaaaaaaa

SEQ ID NO: 18922 - DNA, 567 bp, Homo sapiens
  SIMILAR (247)..(321): 481254mologous to Lycopersicon esculentum extensin (class I),accession number X55683,Smith-Waterman Score=82.
atgacagattcctgtgcgaagctaattttcaaaaggcaggaagaagacagccctaagaaaaaatctgagtgggaacagccagaaaagaaagaagaaaaggagtttaaatcaggaatgcagcaactagtgtcaaatgatacagagaagtcatggtctctgagtcttgagaaacccccgctggagcccgaggaagaccgtattatttttcagcaccggggacagcgccgcgctgccattaacgtccaccctcccccaccttctctctccgccaccccccacccgccccaacctcagcccccacccccgcaccagcacaatgccaaggcccgtgtcgctaccattcggacaaaacgcacatcaaattgcagaattcggtcccggaaggttaggaaatcgcccccggagaaatgggtgggatttaataggcggccaaaggcttcctgtccgtcccctcctggagctgcccgcgttgatgtgggcggggagaccgaaaggagagagcaggctgcggctcctggtgaaatgggaaaatgggctcgaccgggggaggagtatttccattcataa

SEQ ID NO: 18923 - DNA, 1839 bp, Homo sapiens
  SIMILAR (1455)..(1574): 851254mologous to Homo sapiens peripheral myelin protein 22,accession number M94048,Smith-Waterman Score=195.
atgtccaaaatacacttctcccagactctggttctggctgtgggtgactttggatgtcaaaaacacttagtcatcttctgtttactctctcatcgtggaagaagctgcaaagaaaccgctggcctagatgacgaacagacatttcaatgtgcaattattaagaagagacctgccagattgggttctattgaggtatttgcacataacattgtgtggaaaagggtttcaggatggggaaaatccttcacagctggggatctttcaggggccactatggagaaagctaaagagaaaagggaactcctggggcagggagacatggagacagggcttattagtttaggtgataccaacgtcactcagcagtgtggtgaggagtctccaggtctctccagactggggatccctaacacaagaggaagtcttatgccccaagtgccagaattccaggaaactcatgcaatgaaaccagtcctcttgtgtcagagtttgcagctagaagcggttcaagggatggaggactctctgggagctggagtggtacgctgcaaagaacctaaatatgccataacttcctttacttccctctccaagaatttccaattgctcttccagcctattctgcctgacagtcccgccctcccgcacacgctgacccagggacacaccctactgcagcgacgcaaacagggcgttgttcccgttaaaggggaacgccaggagcctcccactgcccccttgcttcgcgcgcgcgcagccccgcagcgcagctttggcggcgccagcagcggagccaacgcacccgagtttgtgtttgaggccaccctgaggatcgggacagctgttcctttgggctactggacccctaggcgagcacgtgggtctagcgcaagagcagaatgccccctgaccccaggggctgcctggggaagcgcgcggtggacgggaagcgcagggtccgggcaaccctctcgagccattcttttctttccacactactctggctctgcaccacctctccggagccgccagagtctgcgcgaggctgagctggggccaggaccgttcctctacgctggcagagttgggtggaaacttggagacaaacggaatgcggagagcactggggtctgggaaaccagcctcctcgccgctgtctcccccaccgcatgccacggctgtctccaggcagaaactccgctgagcagaacttgccgccagaatgctcctcctgttgctgagtatcatcgtcctccacgtcgcggtgctggtgctgctgttcgtctccacgatcgtcagccccgtgctcctgctggttcaggactgtgttatttgcagacagttggaagtctcagacgtcccagggaagtttctggcaatctgcccccttccagttgctttgagaaaacgagagcagattcagtgataggaaccaagcgagcgctgggctgggatatctatctgattctctctagcaatggatcgtgggcaatggacacgcaactgatctctggcagaactgtagcacctcttcctcaggaaatgtccaccactgtttctcatcatcaccaaacgggtctggctgaagttcccggagcactccggatgggagtctccgtactcgctactgacacctggtggttacaagtagtgactcagcccgaaaagggcaggctttggtgctcacaggcgccatccccaagtggcatctggccacgcggcttggcacagaatcctggactcttgggcccggaagggggcagttttggcaggcgtgttaaaacccggcgaagtttcagcagaaacgaggcggcagaggagttgctaagttgtgcttaa

SEQ ID NO: 18924 - DNA, 1953 bp, Homo sapiens
  SIMILAR (205)..(546): 661254mologous to Homo sapiens peripheral myelin protein 22,accession number M94048,Smith-Waterman Score=314.
cccacgcgtccgcaccagggaacatctcggggagcctgtttggaagctgcaggcttagtctgtcggctgcgggtctctgactgccctgtggggagggtcttgccttaacatcccttgcatttggctgcaaagaaatctgcttggaagaaggggttacgctgtttggccgggcagaaactccgctgagcagaacttgccgccagaatgctcctcctgttgctgagtatcatcgtcctccacgtcgcggcgctggtgctgctgttcgtctccacgatcgtcagccaatggatcgtgggcaatggacacgcaactgatctctggcagaactgtagcacctcttcctcaggaaattgtccaccactgtttctcatcatcaccaaacgaatgggctgcagtcttgttccaggggcaccatggatcctgtcgattcatctttcagcattctgtctctgttcctgttcttctgccaactcttcaccctcaccaagggggggcaggttttacatcactggaatcttccaaattcttgctggtctgtgcgtgatcgagtgctgcggccatctacacggtgaggcacccggagtgggaatctcaactccggatacttcctaacggttcgcctaaattcctggcctgggtggccttccccctcggcccttctcagcggtgtcatctatgtgatcttgcggaaacgcgaatgaggcgcccagacggtctgtctgaggctctgagcgtccatagggaagggaggaagggaatccagaaagcagacaaaagaaaaaagagctagccccaaaatcccaacactcaaaccaaaccaaacagaaagcagtggaggtgggggttgctgttgattgaagatgtatataatatctccggtttataaaacctatttataacactttttacatatatgtacatagtattggtttgctttttatgttgaccatcagcctcgtgttgagccttaaagaagtagctaaggaactttacatcctaacagtataatcccagctcagtatttttgttttgttttttgtttgtttgttttgttttacccaggaaataaggataactccatctcgccccttccctttcatctgaaagaaggatacctccctcccaagtccacctcatttagggaaaaccaaagtgtggggtaggaaacccccaaatgtcccaaaagccctttttctgggggggggtgacccagtggcatcccaacaggaaacaggccggtggcccggaacctctggtgtgaagcttttacgcgccacacgggacaaaatgcccaaactgggagccccttgcaaaaacacgggcttgtggccattggcatacttgccctttacaggtgggagtatttttcgtcaccaccatctaaaatggggaatccagtgaccaacaagtcttttggaaatgggtggtatgggattttaccatttccttattatcactcaaccatcgtaagcaatctcactggaaaatcccaattaaccaattttaccaacataaggataggaatgggagacctggaattaatttctgtggtaattttaaatgggtttattaactggtttttgtaccttagctagggctgcctattaattacctataatgaagtaaatccataaagccttccatcactcccccacattttttccttacggtcggagcatcaagaacaagcggtctagactcccttgggacccgtgagttcctagaagcttggctgggtcctaggctgttcctgtgccctccaaggactgtctgggcaatggacttgtattgggccaccaactggtagatgtatatatgggtgcccttctggatgctaaagactccaggaccttttggtttttggctttgcattttctgattttaataccaactggtgtgggactaaggatgcattaaaaataaacatcagagtaactcaaaaaaaaaaaaaaa

SEQ ID NO: 18925 - DNA, 499 bp, Homo sapiens
  SIMILAR (106)..(492): 741254mologous to Homo sapiens beta-1,4 mannosyltransferase,accession number AB019038,Smith-Waterman Score= 468.
  misc_feature (1)...(499): n = a,t,c or g
ttcccggcttcccgtctcgtcaccctctgctcagaacctgaggacgcagccatggagcggtcggccttcatggagctggatgctgggagcaggctggtgatgcatctccgcgagtggccagccctgctggtcagcagcacgggctggacagagtttgaacaacttactcttgatggacacaaccttccttctcttgtctgtgtgataacagggtcggtggacctgggtgtctgtctgcacatgtcctccagtggcctggacctgcccatgaaggtggtggacatgttcgggtgctgtttgcctgtgtgtgccgtgaacttcaagtgtttacatgagctggtgaaacatgaagaaaatggcctggtctttgaggactcaaaggaactggcagctctgcagatgctnttctcanactttcctgatcctgcaggcaagctaaaccagttttggaaggacctgcgggagtcgcagcagcttcgatgggatgagagctgnggcg

SEQ ID NO: 18926 - DNA, 461 bp, Homo sapiens
  misc_feature (1)...(461): n = a,t,c or g
nccctcgtcatgaccagaaactgtttccttatgaagagcacttgaagatggcaatgctgaacctcacactgtaggactcacacacgactccaatgggattgtgagaatcaagtcactctcaagggaagaggtttcatatgggaaagctgataaaactttcactggactggaatgtttggagaatgttaatttccaaatcaggaactacaaactgccctctaataagacatcggctatctaagcgtgtgggtgctccctttctgccagcagttctggttcttaaggaaatcgccatcactcagacatgaaaactctggctccaaaaatagcattttctttgtgcaaataacaacgtgtgtatcaagtatgtggacacactcgaaacctcacaaagccaagcctgctgcagctgccacgaaatcgtcggcccgggaattccgaagcggtacaggcaatacact

SEQ ID NO: 18927 - DNA, 442 bp, Homo sapiens
  SIMILAR (161)..(301): 751254mologous to Homo sapiens beta-1,4 mannosyltransferase,accession number AB019038,Smith-Waterman Score= 176.
ctccatgcttggcacgaggtggtgtaggtagatccggggcaggctcaggaccaagtccctctccttccaccaaggagcgcccagaggccggcgggagctccaggttcacctcctcctcctccaggaaatcccacttccaactggatgtctggatgaactactgaaagctgctgagtgtcctgcagcagggtcggtggacctgggtgtctgtctggacacatcctccagtggcctggacctgcccatgaaggtggtggacatgttcaggagctgtttgcctgcgtgtgctgtgaacttcaagtgacggtaagggccatgtagaattgaggagcccgctggtgctcccggcaggcagccagcctccgcaggaccccgaccagcgacacgatggcttctgggcaatacagcacgtctacggtgaaagcttcaggttactgaaagg

SEQ ID NO: 18928 - DNA, 723 bp, Homo sapiens
  SIMILAR (348)..(554): 941254mologous to Homo sapiens beta-1,4 mannosyltransferase,accession number AB019038,Smith-Waterman Score= 338.
ttggaattcctccgacgcacctccaagccctttctcctgctctaggcccagcgccttggacgtgcacagtagatccctcccggcttcccggcttcccgtgtcgtcaccctctgctcagaacctgaggacgcagccatggagcggtcggccttcatggagctggatgctgggagcaggctggtgatgcatctccgcgagtggccagccctgctggtcagcagcacgggctggacagggtcggtggacctgggtgtctgtctgcacatgcctccaagtgggcctggcctgccccatgaaggtggtggacatgttcgggtgctgtttgcctgtgtgtgccgtgaacttcaaggtgtttacatgagctggtgaaacatgaagaaaatggcctggtctttgaggactcagaggaactggcagctcttcagatgcttttctcaaactttcctgatcctgcaggcaagctaaaccagttttggaagaacctgcgggagttgcagcagctccgatgggatgagagctgggtgcagactgtgctccctttggttatggacacacaactcctaggccagaggctaaaaccccgggacccctgctgtccttcccgcagcttcttctcggagtctcagagcaaacccttttgagcagcgcctcccagtggccagaagctgaagtgacggcagtggtgccgcctggtgaatgaattggttctgtgacccgggaaaa

SEQ ID NO: 18929 - DNA, 653 bp, Homo sapiens
  SIMILAR (538)..(308): 321254mologous to Hordeum bulbosum chitinase,accession number AJ400135,Smith-Waterman Score=81.
gcagagagctgatcaaaacagcaaaagcaaagcagtgccccggcccagttctaaagccaaccttccttaatcacccagacccatcccagtccaggctcggcttccgcccggtctcccggcaacgctgcggccccgcccccgtcttggtgcccgaggagaacgcggggaccgaactcttgctgcagagttctcaagcgccgctttcctggcggcgcgtgcactgcgctccttaccctggcagagcttaaaagcaaagttaagagactcatcagattctgagctgctgcgggatattttgcagaagacgtgctgtatagcccagaagccatcgtgtcgctggtcggggtcctgcggaggctggctgcctaccaggagcaccagcgggctcctcaagtctatgtggcccttaccgtctgcaacccagagacgtgccagctggttcaccaccgagctatgctggactgggatcagatgggaagcggaagctcatcatgaccagaaactgtttccctacagagagcacttggagatggcaaagctgaacctcacactgtaggactcacacatgactccaacgggattgtgagaattaagtcactctcgtgggaagaatttttatatgggaaagcggataaaactttcattggactgga

SEQ ID NO: 18930 - DNA, 842 bp, Homo sapiens
  SIMILAR (305)..(222): 921254mologous to Homo sapiens beta-1,4 mannosyltransferase,accession number AB019038,Smith-Waterman Score= 133.
ggcatgaagatcaaaagacaggaagcgtttcagagactccaaagaagaaatcagggccacacacagcctcccgagtcattcaccaggtggcaccactgccttcatttcagcttccggccactgggaggcgctgctagaaagggtttgccctgagacaccaagaagaagctgcgggaaggacagcaggggccctggggttttagcctctggcccaggagttatgtgtccataaccaaagggagcacagtctgcacccagctctcatcccatcagagctgctgcgactccggcaggttcttccggaaactggtttagcttgcctgcaggatcaggaaagttttgagaaaagcatcttgcaaaattactaaagggcgagcttacctcattgcctgtccccacccccatccccaggtcaccacctggctgaccccaggtccccggacccaacaacaaccccttcccaagtccctaactccctcacttggacttgagacccttcacaacccccctcacttggacttgagacccttcacgccccagcatcgctccgcctcccacttgacagtcatgctttctggaaacttccccgtatgtcccactttcccacacttggtgccctggagcaccttccggcctctacatgatgtacgttcccctgtgagcaccctcctctcggcctctggccaacacagtcccacccatctgtgggtaacaagggggtgttggtgttcttttcagccttgctaaactgtctgaatcaaggatcacaaactacagcctgcaggccaaatccagcccacagcctgtgtttgtaaataaagttttattggaacaaagcaaaa

SEQ ID NO: 18931 - DNA, 1024 bp, Homo sapiens
  SIMILAR (241)..(471): 891254mologous to Homo sapiens unnamed protein product,accession number AK001523,Smith-Waterman Score=382.
accgacgatttcgtcggggagcgaactcttgctgcagagtttcaagcgccgcttcctggcggcgcgcgccctgcgctccttcccctggcagagcttagaagcaaagttaagagactcatcagattctgagctgctgcgggatattttgcagaagtagactgtgaagcatcctgtgtgtgtgtgaagcacccgccgtcagtcaagaaagcccggtgctttctctcagaactcatcaaaaagacgtgctgtattgcccagaagccatcgtgtcgctggtcgggatcctgcggaggctggctgcctgccgggagcaccagcaggctcctgaggtctacgtggcctttaccgtccacaacccagagacgtgccagctgttcaccaccgagctaggccaggctgggatcatatgggaagcggaagctcatcatgaccagaaactgtttccctatggagagcacttggagatggcaatgctgaacctcacactgtaggactcacacacgactccaacgggattgtgagaatcaagtcaatctcatgggaagaatttttatatgggaaagcggataaaactttcattgtactggaatgtttggagaatgttaaattccaaatcagaaaccacaaactgccctctaataagacatcggctatctaagcgtgtgggtgccccctttctgccagcagttctggttcttacgaaaatcaccatatatcagacatgaaaattctggctccaaaaatagcattttcattgtgcaaataaaaacgtgtgtatcaagtatgacattcccccaacgtggacacacttggttcctcacaaagccaagcccgctgcagctgccacatccctggacacactcgttgcctcacaaagccaagcccgctgcagctgccacatccctggacacacttggtttctaacaatgccgagcacactggagctgacaaatccctgagcctatggtgcagcaggtgcttttttcaagacagggatcaaagtgttagcaacacggcatgtatt

SEQ ID NO: 18932 - DNA, 1687 bp, Homo sapiens
  SIMILAR (99)..(1205): 701254mologous to Homo sapiens beta-1,4 mannosyltransferase,accession number AB019038,Smith-Waterman Score= 1246.
  misc_feature (1)...(1687): n = a,t,c or g
ggcgggccagccaagatggcggcctcatgcttggtcctgctggcgctgtgtctgctgctgccgctgctgctgctgggaggatggaagcgctggcgccgggggcgggcggncggcatgtagtagcggtggtgctgggcgacgtgggccgcagcccccgtatgcagtaccacgcgctgtcgttggccatgcacggcttctcggtgaccctcctggggttctgcaactccaaaccccatgatgagctcttgcagaacaacagaattcagattgtggggttgacagaacttcagagtcttgcagttgggccccgagttttccagtacggagtcaaagttgtacttcaggctatgtacttgctgtggaagttgatgtggagggagccaggtgcctatatctttctccagaaccccccaggtctgcctagcattgctgtctgctggttcgtgggctgcctttgtggaagcaagctcgtcattgactggcacaactatggctactccatcatgggtctggtgcatggccccaaccatcccctcgttctgctggccaagtggtacgagaagttctttgggcgcctgtcccacctgaacctgtgtgttaccaatgctatgcgagaagacctggcggataactggcacatcagggctgtgaccgtctacgacaagcccgcatctttctttaaagagacacctctggacctgcacgcaccggctcttcactaaactgaccaacatgcactctccgttcagggcccgctcagaacctgaggacccagtcacggagcggtcggccttcacggagcgggatgctgggagcgggctggtgacgcgtctccgtgagcggccagccctgctggtcagcagcaccgagctggacagaggacgaagacttctccatcctgctggcagctttagaaagtagagtttgaacaactgactcttgattggacacaaccttccttctctcgtctgtgtgataacaggcaaagggcctccgagggagtattacagccgcctcatccaccagaagcatttccagcacatccaggtctgcaccccttggctggaggccgaggactacccccgcttctagggtcggtggatctgggtgtctgtctgcacacgtcctgcagtggcctggacctgcccatgaaggtggtggacatgttcgggtgctgtttgcctgtgtgtgccgtgaacttcaagtggcaggagcagaacccgaatctttctggggatagcttcacagatccaccgctgaggaggaaacagtgcagagcgagctgcccacagtgaggccctgctcctggtttacatgagctggtgaaacatgaagaaaatggcctggtctttgaggactcagaggaactggcagctcagctgcaggtgcttttctcaaactttcctgatcctgcgggcaagctaaaccagttccggaagaacctgcgggagtcgcagcagctccgatgggattagagctgggtgcagactgtgctccctttggttatggacacataactcctgggccagaggctaaaaccccgggacccctgctgtccttcccacagcttcttctcagagtctcagggcaaatcctttcgagcagcgcctcccagtggccagaagctgaaatgatggcagtagtgccacctggtgaatgaattggttctgtgacccgggaaaaaaaa

SEQ ID NO: 18933 - DNA, 2918 bp, Homo sapiens
  SIMILAR (699)..(1520): 721254mologous to Homo sapiens beta-1,4 mannosyltransferase,accession number AB019038,Smith-Waterman Score= 987.
  misc_feature (1)...(2918): n = a,t,c or g
tttcgtcggcctcatgcttggtcctgctggcgctgtgtctgctgctgccgctgctgctgctgggaggatggaagcgctggcgccgggggcgggcggtctcttcatgtagtagcggtggtgctgggcgacgtgggccgcagcccccgtatgcagtaccacgcgctgtcgttggccatgcacggcttctcggtgaccctcctggggttctgcaactccaaaccccatgatgagctcttgcagaacaacagaatccagattgtggggttgacagaacttcagaagtcttgcagttgggccccgagttttccagtacggagtcaaagttgtacttcaggctatgtacttgctgtggaagttgatgttggaaggagccaagtgcctatatctttctccagaaccccccacgtctgcctagcattgctgtctgctggttcgtgggctgcccttgtggaagcaagctcgtcattgactggcacaactatggctactccatcatgggtctggtgcatggccccaaccatcccctcgttctgctggccaagtggtgcacatccagcctccgtgtgcatgtccagctgctgcgtgtacttccggccttgggccattggctggctgtggccttcgccctgatagtttgttcactggcagtggtgacagcagcagcaaacagcttagttgagcaaatggagcagaatggtcaatggtacgagaagttctttgggcgcctgtcccacctgaacctgtgtgttaccaatgctatgcgagaagacctggcggataactggcacatcagggctgtgaccgtctacgacaagcccgcatctttctttaaagagacacctctggacctgcagcaccggctcttcatgaagctgggcagcatgcactctccgttcagggcccgggtttttttctgctccttcatctcagaacctgaggacccagccacagagcggttggccttcacagagcgggatgctgggagtaggctggtgacacttctccacgagcggccagctctgctggtcagcagcacaagctggacagaggacgaagacttctccatcctgctggcagctttagaaagcaaagggcctctgagggagtattatagccgcctcatccaccagaagcacttccagcacatccaggtctgcaccccctggctggagggccgagagactaccccctgcttctagggtcggcggacctgggtgtctgtctgcacacgtcctccaagtggcctggacctgcccatgaaggtggtggacatgtttgggtgctgtttgcctgtgtgtgctgtgaacttaaagtgtttacatgagctggtgaaacatgaagaaaatggcctggtctttgaggactcagaggaactggcagctcagctgcagatgcttttctcaaactttcctgatcctgcgggcaagctaaaccagttccggaagaacctgcgggagtcgcagcagctccgatgggatgagagctgggtgcagactgtgctccctttggttatggacacataactcctggggccagaggctattaaaaccccagggncccctgctgtccttcccgcagcttcttcttgggagtctcagggcaaaccctttcgagcagcccctcccagtggccagaagctgaaatgacagcagtggtactgcctggtaaaaagaattggttctgtgacccgggaagcttttggttggccttgatttcttctcttggaaggcttgggaaacgctttcctctcttcttctgttcttcacgccccatgcccctgctagcgtattactgttctgtgacttccctgtgacctctgcagaactccttcatcctgcgtttggtctccaggtagtcccctttctgccgtgttccctaccattttgattcctgttttgaaaaaagcccctgctgcacccgtaagccccaggggatgtggcagctgcagtgggcttggctttgttgggtgcttgggtgtgtccacgttgggggaacatcatacttgatacactacgtttttatttgcacaaagaaaatgctatttttggagccagaatttccatgtctgatttatggtgattctcttaagaaccagaactgctggcagaaagggggcacccacatgcttagatagccgatgtcttattagagggcagtttgtagttcctgatttggaaattaacattctccaaacattccagtccagtgaaagttttatcagctttcccatatgaaacctcttcccttgagagtgacttgattctcacaatcccattggagtcgtgtgtgagtcctacagtattaggttcagcattgccatctccaagtgctctttgtagggaaacagtttctggtcatgacaagcttccacttcccatctgatcccggcccggcctagctcggtggtgaacagctggcacgtctctgggttgcggacggtaaaggccacgtagacctcaggagcccgctggtgctcccnggcaggcagcccagcctccgcaggacccctgacccagtgaacacaatggccttcctgggcaatacagcacatcctacggtgaaagccttcaggttactgaaagggaccagcggacagttcccaggtcacgctgacctcagcagcagggcgaggccagagaggcagcggtcatatgagactattagatgccttttgaccatttgagccattagatggaaaggcaattacttgggtgaaaaaggagaacccttagtagagaaagctgcaaaagaccgaagcaaaagaaaaaaatctccagactcactggtgttccttacaaaaacagctctggttcttggcctatctagagggctttgaatgacacaaagcctgaccctgccatgaacttcatgtttcaggcatctgctgatttgtctgctggcttgcgaattccaccacg

SEQ ID NO: 18934 - DNA, 1841 bp, Homo sapiens
  SIMILAR (1393)..(770): 621254mologous to Homo sapiens hnRNP C2 protein,accession number M29063,Smith-Waterman Score=535.
  misc_feature (1)...(1841): n = a,t,c or g
ttttgtgttttaaaattcaaaaataaaaaaccatgggtttttttttctccatattcctggtttaataatgacttgtttattttgaggaaaaaaggtcccaaacatcaggctgttcacaaaaataacccacagtatcaactttagaaaacaaatcttaagactataacactaattatttttctagaggatgcatttgacattgccaactctcattcacaaaaatacattgttacatttgtgttgaactgccccacacagcacactaatgtgaggggggtaacacacatactttttacttaaaggtgtgttttaaaggctactccacctaatggagattgcctttgcagttaggggagccactactggactttatgtatgaatgaaaagaactgtactccctggcataacaagagattattttgggagacagtttggataaaaaccattacatccttttttaattggttaagtccttaaaggaggtatcaaaattaaaagcaaaaattacaggggtaagacttaacaaaactactatggagcgtcacagtgaagttgaaaatgtgactatgcgctgtgtgcatattgaattaatgaacatgggaaggacaaggatggggagaacagtgagcatgtgctgaagatactaggggagaggatctggtgaaaaatttgatcttagacaagcgcctaggtaaagaaataatgggataagatttctaaaccccactatgtgcttaagagtcattcctcgccattggcgctgttctccgtcatcctctccttcctcagcctctttttcatcatccttgatcaactccagctggtcatccccccgatcttcattatcattcattcatcccagtaggtccccctcctcagcagagtcatctgcacccccctcagactccatcttcacattagtctcatctttcttcacggagctgctgctctgctcctcttctgacttatcattcttcatctctactgcttgtttgctctgttccttttccattttttccaggttttcccagaagagaatccacttttttgttttatctggcgtcagctccttcttaatggcctgaaggtcatctcctttcaactttccagactttgaaagatccccgctgtccactcttagaattgaagccacttttgccccttttgtaaagtgtttcctgacacacgtgaccgttcgaggggcactacaacccgaagcaatagaaggaggaggaggttacacgtgctggggtaactgtacatcctatcataatagtcccgttgaaaagtcatagtccaagtcaaaaggggagcccgtaacatctcccgctggcagaatcgtttcaacacctggcttttccctcgggttncactttttggctcctgcaagcccaggttaaacatcctaaaaccctggcccagccaatcattctgccatccctctccctgctacagcaaccccgggcatttctctcattaacatactgaacgaaaggcaaagcccttatgaacagagcagcccacaattttgccatacttcgaaaagattgcctccacatcagatttcttgaccacaagagtgttgagattcccaatgaatacacgggagttcatggagcgaggatctgtcttgttggtaacgttgctggccatcgtgtttgatggtaaggtttctcacaaagccgaaaatgtagctgaagatcaaaaaaatctcacaagaaggggagggagaagagattcgattctgagtctcctactcccgggttctgcgtagagaagccgactgcttgctggaggtcggcaacgcggccacaaccgctcaagtcttcgtctcttccccc

SEQ ID NO: 18935 - DNA, 1492 bp, Homo sapiens
  SIMILAR (563)..(1090): 521254mologous to Homo sapiens C protein,accession number M16342,Smith-Waterman Score=326.
tgtgaagagacgaagactgagcggttgtggccgcgttgccgacctccagcagcagtcggcattctctaacgcagaaacccgggagtaggagactcagaatcgaatctcttctccctccctcttcttgtgagatttttttgatcttcagctacattttccggctttgtgagaaaccttaccatcaaacacgatcggccagcaacgttaccaacaagacagatcctcgctccatgaactccccgtgtattcattgggaatctcaacactcttgtgggtcaagaaatctgatgtggaggcaatcttttcgaagtaatggcaaaatttgtgggctgctctgttcataaagggctttgcctttccgttcaagtaatgttaatgagaagaaatgccccgggcttgctgtaacagggagaagaatggcagaatgattgcctgggccaggttttagatattaacctggctgcagagccaaaaagtgaacccgagaaaaaagcagtgtgaaacgatctgcagcggagatgtacggggtcagtaacagaacacccttctccgtcccctctacttcagctcctcttttgacttggactatgactttcaacgggactattatgataggatgtacagttacccagcacgtgtacctcctcctcctcctattgctcgggctgtagtgccctcgaaacgtcagcgtgtatcaggaaacacttccacgtagtggcccacgtggcttcaattctaaggagtggaacagcggggtatcttccaagttctggaaaaggtgaaagggagatgaccttcagggccattaaggaagagctgaccccagataaatcaaaaaggtggattctctcctggaaaacctggaaaaaattgaaaaagcgaccggggcaaacaagcagttagagatgaaggaatgattaagtcagaagaggagcagagcagcagctcccgtgaaggaaagatgaggactaatgtgaaagatggagtctgagggggggttccagatgactctgctgaaggagggggacctacctggatgaatgatgataatgtaaaatcggggggaatgaccagctgggagttgatccaaggatgatgaaaaagaggctgaggaaaggagaggatgacaagagacaagcgccaatggcggaggatgactcttaagcacatagtcgggcttaagaaatcctaatcccattattttctttacctaggcgcttggtctaagaacaaaatttttcaccaagatcctctcccctagtatcttcgagcacatgctcactggttctccccatcccttgtccttcccatgttcattaattcatattgccccgcgcctaagtcccattttcacttcctttgacgctcctagtagttttgttaagtcttaccctgtaatttttgcttttaattttgatacctctttatgacttaacaataaaaaggatgtatggtttttaaaaaaaaaaaaaaaaaaaaaagggcggccgct

SEQ ID NO: 18936 - DNA, 446 bp, Homo sapiens
  SIMILAR (292)..(56): 551254mologous to Homo sapiens Human secreted protein, SEQ ID NO: 5299,accession number G01218,Smith-Waterman Score=178.
  misc_feature (1)...(446): n = a,t,c or g
ttntcctcggttcaactttttggctctgcagccaggttaantatctaaaacctggcccagcaatcattctgccatccttcttcctgttacagcaagcccgggcatttctctcaattaacatactgaacgaaagcaaagcccttatgaacagagcagcccacaattttgccatacttcgaaaagattgcctccacattcagatttctttgaccacaagagtgttgagattcccaatgaatacacgggagttcatggagcgaggatctgtcttgttggtaacgttgctggccatcgtgtttgatggtaaggtttctcacaaagccgaaaacaagaaggggagggagaagagattcgattctgagtctcctactcccgggttctgcgtagagaagccgactgctgctggaggtcggcanacnggccacaaccgctcagtcttcgtctct

SEQ ID NO: 18937 - DNA, 462 bp, Homo sapiens
  SIMILAR (218)..(156): 571254mologous to Homo sapiens transcription factor 12,accession number AF271617,Smith-Waterman Score=65.
cccacgcgtccgcccacgcgtccgcccacgcgtccggaagagacgaagactgagcggttgtggccgcgttgccgacctccagcagcagtcggcttctctacgcagaacccgggagtaggagactcagaatcgaatctcttctccctccccttcttggtaagtggagagggcggacgcagggaaggcgctgggtttttcgggaagcgagagggggtgtgggagagaagatgtgggaatccttccccctaactaaccgggccctcatttattctgcttgttttgggggattaggttgaagccgggggcagttttataggcctcagcctctgtataggtttaacctggtgtcctctaggccacgatcgccagggaaaatggccttttttcgctcttcctgtgttaacggctgctttcctttcattttctacgaccgcgaggactacgggatcatgaaaatgaagg

SEQ ID NO: 18938 - DNA, 512 bp, Homo sapiens
  SIMILAR (3)..(485): 921254mologous to Homo sapiens C protein,accession number M16342,Smith-Waterman Score=751.
tggaggcaatcttttcgaagtatggcagaattgtgggctgctctgttcataagggctttgccttcgttcagtatgttaatgagagaaatgcccgggctgctgtagcaggagaggatggcagaatgattgctggccaggttttagatattaacctggctgcagagccaaaagtgaaccgaggaaaagcaggtgtgaaacggatctgcaagcggagatgtacgggctcctcttatgacttggactatgactttcaacgggactattatgataggatgtacagttacccagcacgtgtacctcctcctcctcctattgctcgggctgtagtgccctcgaaacgtcagcgtgtatcaggaaacacttcacgaaggggcaaaagtggcttcaattctaagagtggacagcggggatcttccaagtctggaaagttgaaaggagatgaccttcaggccattaagaaggagctgacgccagataaaacgaaaaagtggattctctcctggaaaacctgg

SEQ ID NO: 18939 - DNA, 2396 bp, Homo sapiens
  SIMILAR (1063)..(1632): 541254mologous to Homo sapiens C protein,accession number M16342,Smith-Waterman Score=378.
gtgaagagacgaagactgagcggttgtggccgcgttgccgacctccagcagcagtcggcttctctacgcagaacccgggagtaggagactcagaatcgaatctcttctccctccccttcttgggcagcaaggcgaaccccatccctactcactggagctcagctttgatttttaacctcccttccccacccttccagaacacacacattccattccaaaactgattttataaagacattttaaacataatgatgcaacttggtgtgcactacagcaaatgtacaggtgttttttttttaattgtttccaaaaccgggacctggatttaagatgtaatttttaaaatttctatttctattttttctgcagcagttgggttagaggaggaggagccttttagcctctcataaactgacctctctacttcctcgtgtatttttaagattgattgatgatgtggaaagggctttgcttgtctgctactgaaaactttatccttgcggtttttgtggaaactgcttttggaaagagaaaagaaatgaactttactgacttgacatttttgcacctcccgtttttctaatctgggctatttttatttttgtttttttacagtgagatttttttgatcttcagctacattttccggctttgtgagaaaccttaccatcaaacacgatcggccagcaacgttaccaacaagacagatcctcgctccatgaactccccgtgtattcattgggaatctcaacactcttgtgggtcaagaaatctgatgtggaggcaatcttttcgaagtaatggcaaaattgtggggctgctcttgtttcataaagggctttgcctttccgttcaagtaatgttaatgagaagaaatgccccgggcttgctgtagcgggaggagggtgggcagaattgatttgctgggccaggttttagatatttaacctgggcttgcagagccaaaaagtgaacccgagggaaaagccaggtgttgaaacgattctgccagcgggagatgtacggggtcagtaacagaacacccttctccgtcccctctacttcagctcctcttttgacttggactatgactttcaacgggactattatgataggatgtacagttacccagcacgtgtacctcctcctcctcctattgctcgggctgtagtgccctcgaaacgtcagcgtgtatcaggaaacacttcacgaaggggcaaaaagtggcttcaattctaaggagtggaacagcggggtatcttccaagttctggaaaaggtgaaagggagatgaccttcagggccattaaggaagagctgaccccagataaatcaaaaaggtggattctctcctggaaaacctggaaaaaattgaaaaagcgaccggggcaaacaagcagttagagatgaaggaatgataaagtcagaagaggagcagagcagcagctcccgtgaaggaaagatgaggactaatgtgaaagatggagtctgagggggggttccagatgactctgctgaggaggggggacctacctggatgaatgatgataatgtaaaatcggggggaatgaccagctgggagttgatccaaggatgatggaaaaagaggctgaggaaaggagaggatgacaagagacagggcccaatggcgaggaatgactcttaagcacatagtggggttttagaaatccttatccccaattatttctttaccctaggcgcttggtctaagatcaaattttttcacccagatcctctcccctaagtatcttcgagcacatgctcactggttctccccatcccttgtccttcccatgttcattaattcatattgccccgcgcctaagtcccattttcacttcctttgacgcctcctagtagttttgttaagtcttaccctgtaatttttgcttttaattttgatacctctttatgacttaacaataaaaaaggatgtatggtttttatcaactgtctccaaaataatctcttgttatgcagggagtacaagttcttttccattacacataaagtcaggaggtggttccccaaccgcaaaggccatctcaattaggtgagtagcctttaaaacacacctttaagtaaaaagtatgtgtgttacccccctcacattagtgtgctgtgtggggcagttcaacacaaatgtaacaatgtatttttgtgaatgagagttggcatgtcaaatgcatcctctagaaaaataattagtgttatagtcttaagatttgttttctaaagttgatactgtgggttatttttgtgaacagcctgatgtttgggaccttttttcctcaaaataaacaagtcattattaaaccaggaatatggagaaaaaaaaacccatggttttttatttttgaattttaaaacacaaaa

SEQ ID NO: 18940 - DNA, 1815 bp, Homo sapiens
  SIMILAR (216)..(998): 471254mologous to Homo sapiens 2,3 biphosphoglycerated mutase (AA 1 - 259),accession number X04327,Smith-Waterman Score=455.
  misc_feature (1)...(1815): n = a,t,c or g
aggggctagaaaagagcgtcgatgccggcgagatgaatagaggcctaggaggcgctggctctttggcggctcggaggagccgctgcttgctgctgctgctgctgctggtggcccctttgcaagatgtattgctgtccttgaatattagcccatttgaaaacgcctcggaagttcagccatcagtatgtccaagtacaaacttattatgttaagacaatggagagggtgcttggaataaggagaaccgtttttgtagctgggtggatcaagaaactcaacagcgaaggaatggaggaagctcggaactgtgggaagcaactcaaagcgttaaactttgagtttgatcttgtattcacatctgtccttaatcgggccattcccaccgcccggcttgatcctgggaagagctaggccaggaatgggtgcctgtggaaagctcctggcgtctaaatgagcgtcactaatggggccttgaatcggtctcaacagggagcagaatggcttttgaatcatggtgaaagaacaagtgaggctcctggagaagaagctacaatgtaacccccgcctcccattgaggaagtctcatccttacctaccaagaaatctacaaccgacccggaggtataaaagtatgcgatgtgcccttgggatcaactgccacggtcggaaagctttaaaggatgttctgggagagattccttccctattgggaatgaaaggattgctcccgaagtatttacgtgggcaaaaccattctgatatctgctcatgggaaataggcagtaggggcactcctaaaacacctgggaaggtatncttcaggattgaagacatccatcaacatttactctttcctactgggagtccccattcttctgggaattggatggaaaacctgcgtgctgttgggcctcactcaattcctgggtgaccaagaggcgatccaagcagccattaagaaagtagaagatcaaggaaaagtgaaacaagctaaaaaatagtctttctcaactgttggctaagaagaaatgcaaaagaagtggcataggagtgtgttatgggtgctgaactctctctctttttccccgattttccagagctaggctgtggagtaaagtccgcataggttacttagggaacctattgtgtcccaagataacgcttttaggatgcctcagtgcttatgtcatagccttatgagttagctttcttgctagcccccttagtcggtcacaacatagttacctagtggggcttaatgaaggtccataagtttctgagatgggagaagcaacaaagtagagatgacagttaaagggtatttatcattcaagaaattcattattgagtcaccaattgacaggcactattctaatccagtagtccacctttaatatttaataaaaatttttctgggataaccagtaagggatattgggataatatccccgtatgtatttattacctagtcctttccccctaggaaaagggatactttgataattaaggccagaggccccattagttgaggaaagtcacagattctattttctcccaagaaagcccaacaacccacccacccacaatgacagaaatgacaacaaggccctttaacttgtcttcctagtttagagacatcccttcatttgacatttagtagaattcctctttggccacaagaataaggcagcaaataaacaactatggctgttgaggttctcattttggtttgttttaattttttgaactttgggtacctgtaattagtttaaaaataaagttcctgataataaagtgactgaaaatggcatcccc

SEQ ID NO: 18941 - DNA, 721 bp, Homo sapiens
  SIMILAR (10)..(114): 941254mologous to Homo sapiens Acyl carrier protein, Mitochondrial (ACP) (5'partial),accession number AC002400,Smith- Waterman Score=157.
  misc_feature (1)...(721): n = a,t,c or g
agtgcatcctgggttggcgtagccatggcgtctcgtgtcctttcagcctatgtcagccgcctgcccgcgcgctttgcgccgtagccccgggtccggatgctggccgtggctcggcatcgtcagcaccgctctctgctccgaggggacccagacgaggctcgggactttgcagccggccttagtgctcgcgacaggttccgtggtaggagttacacatgttgtgccgccagtatagcgacatgcctcgcgtttgacgttagagggcatccagggaccgtgttcgtttagcgtagttgaaaactcttagtgacaaggttgaccccagagaagctttccagtaaattctccattttatgaaagacctgggcctagacagtttggaccccaagtggaagattatccatggccctggaagaccgaatttgggtttgaaattccctgatataggatgctgaaaagttaatggtntccaccaaggaaattggtagatttacattgccaggataagaaggatggtatatgaattaaagtatcagacccctttggctttgctgagagaggactcagatgatagtgacgaatgtctggcagtgaggacacattttggcattcttgctgaactctgacaggagtgattctgatggacttgtatttaaattgtatgtgttttactctttgaaaataaatctataaaaccaacaaaaaaaaaaaaaaaacaaaa

SEQ ID NO: 18942 - DNA, 684 bp, Homo sapiens
  SIMILAR (16)..(195): 981254mologous to Homo sapiens glutaredoxin 2,accession number AF132495,Smith-Waterman Score=292.
atccgggctctgaccatgatttggcgccgcgcgttgctggcggggacgcggctggtttggagcaggagcggctcggcaggctggcttgacagggcggcgggagctgcgggagctgcggcagctgcggcctctgggatggagagcaatacatcatcatctttggagaatttagcgacggcgcctgtgaaccagatcccaagaaacaatttctgataattgtgtggtgattttctcaaaaacatcctgttcttactgtacaatggcaaaaaaagcttttccatgacatggaatgttaacctataaagtggtggaactggacctgcttgaatatggaaacccagttccaagatgcttctttacaaaaatgactggttgaaagaactgttccaagaatatttgtcaatggtacttttattggaggtgcaactgacactcataggcttcacaaagaaggaaaattgctcccactagttcatcagtgttatttaaaaaaaaagtaaaaggaaagaatttcagtgatgtttatactaataagtttgctagtacagtgtcagttatctaaagtggtaatgcccgataatgtcttttaaatgttttgagggatgttttaaaatacatgcattgtcttcacgaagaagatgtaaaaataatgaacaataaattgcggtggaaacctcttcttaa

SEQ ID NO: 18943 - DNA, 1092 bp, Homo sapiens
  SIMILAR (1086)..(868): 531254mologous to Homo sapiens Human secreted protein encoded by gene No. 107,accession number Y27868,Smith-Waterman Score=168.
aagtcagaggccactgaagctttattcaggcgagtgacagatttacatcttcaattcttaagagtgtggaataaatttgaggaaagaagactggaagcaggaaaacattagggtgttcttggaataatcctcttgagaaaattgcctactctaagatggtagcagtaggtatggggaaagtgggcacacacaacataattagaaagtggtataaaaattttattttagatggggaaaggtagaaaatactaggttaagtataaagggatttctttacctatagtacttgtcagaaattttatggtgctgtttttgagtaaaagaaagtcacacagtaacacaaaatggcttccaaacatttgatttttttttttcttttttttagaagactttatgagacactagcattccacaggaaacactatgggagaaactgttctcccacaaaaataatctcttcttcctttctgttcttgcagctgtcaatatagatgaagcatcccaaatctgaaatctgaaatgctccaaaatatgaaactttttgagtgccaaatacaggatgtgacactcaggggaaaaggcccattggagcactgtgggatttccggacctgggatgctcaactggcaagcattaatgcaaatattccagaacccaaaaacacttctcaagccattttgaataagggatgctcaaaccctgtactttctgagttgtctcaccaactatattcaattttttaaggctgtcttgtcctgtccctttacacaatacatggtatttaagttttggttactttcagctcactgaaaagtgaaaggtgaaaaaggaagattcaccagaactttcacaagctttccctcaaaaaggccattgaaaaagattattctgagtcagggtcatctgttaaccaatataaaaggatccgacccacagataacgttgtaataaagcagtattaggccaggcgcggtggctcacacctgtaattccagcacctcggtaggccaaggtaggtggatcacttgaggtcaggagtttgagaccagcctggccaatgtggtgaaaccccatctctactaaaacctgtgc

SEQ ID NO: 18944 - DNA, 429 bp, Homo sapiens
  SIMILAR (248)..(427): 911254mologous to Homo sapiens Human 5' EST related polypeptide SEQ ID NO:1528,accession number Y65367,Smith-Waterman Score=271.
ctaacttccacaggtctgcgcccctgcaagagcctggctttgtttactttctgcacctccacagctgtggtgctcctgaaggcaggtgccatttcctttttctagaaggtgctcatcccctttgatctgcgctggcctcttcaccacctccttcaccagctgcagcactgagtctgtctgcagggtgctgagagcacagaccaggtcgacgagggtgtgctggacgtgtttgccacggggaccattgggcttgtgggtggcacccctggtggctgtgtacgctgtagccacgccgtttgtaacgccagcccttcgaaaagtctgtttgccgtttgtacctgcaactacgaagcagattgaaaatgttgtgaaaatgttgcgatgccgaagaggatcccttgtggacatcggtagtggggacggacgcat

SEQ ID NO: 18945 - DNA, 1509 bp, Homo sapiens
  SIMILAR (30)..(407): 581254mologous to Homo sapiens Human 5' EST related polypeptide SEQ ID NO:1528,accession number Y65367,Smith-Waterman Score=309.
  misc_feature (1)...(1509): n = a,t,c or g
tttttaaaaacgctgttggaaatctcgcgatggagggaggaggaggtatacccctagaaacacttaaagaagaaagtcagtcaagacatgttctacctgcaagttttgaagtcaacagtttgcagaaaagcaactgggggttcttacttactgggcttgtgggtggcaccctggtggctgtgtacgctgtagccacgccgttttgtaacgccagcccttcgaaaagtctgtttgccgtttgtacctgcaactacgaaggcagattgaaaatgttgtgaaaatgttgcgatgccgaaggagggatcccttgtgggacatcggtagtgggggacgggacggcattgttcataggcggctgcgaagaaagggtttcacagcagttgggtttatggaatttaaacccatgggctagttttgggtatttcccagatacccgcgcttggcgagaaggtgtgcatggatctgccaaattttatatttcagatttgtggaaggttactttttcgcagtactcgaacgttgttattttcggtgtgcctcagatgatgctgcagttggagaagaaacttgaacgtgaacttgaggatgatgcacgagttattgcttgccggttccctttcccacattggactccagaccacgtcacggggaaggggatagacacagtgtgggcatatgatgcaagcacttttagaggccgtgaaaagaggccctgtacatcgatgcatttccagctgcccattcaagcataaacttgactggggagtgtttttntctgaaatattgtagtcttccctgatcttgtagagacttacagctgtgtncccttagcaaaaggagcataattgtctttggtttggaatgagaaattactattactttccttaactgttggagaaaacaaacgaaggaaaaacaggtagatttaaaatctgcttttgatgctattttcttaaaaattgtacttactgcctttccatgcacctgggatgcatgaaaagatgaataagtgatggtcatggttatgggtagggaaaataagatgccaatagctccttcacattataaacaatatgggcttaatggcctcgataaggaggaantgattttttaaagacagtatatattaccaactgtttgtagtatcctattaactttgttcatacttaagttgtatctctttcactaaatctacttcagggccaaaattaattttctaaaggattcagagggggcgtttatattttataacatttattaggaaataatttgttccaccactagattactgtattttatggaatctaagctgtatatgtgtacatttgtatacatgtatgtgtaaatgtaagcctgacgtgggttcagattccagttttgtcatcagcaagaggcctcggacccatgacttactgcctctgagccttggctttctgtgtatctctgccactgcgataatggtacacataacagtggagtggggaccaatttctaaaactcatggcacct

SEQ ID NO: 18946 - DNA, 1591 bp, Homo sapiens
  SIMILAR (163)..(825): 581254mologous to Spalax ehrenbergi high mobility group protein,accession number AF078819,Smith-Waterman Score=550.
tgtggtggaattccggagagagtgaggaggctgcgtctggctcccgctctcacagccattgcagtacattgagctccatagagacagcgccggggcaacgtgagagccggacgggcacatgggcgactctgtgcctcgctgaggaaaaataactaaacatggggcaaaggagatcctaagaagccgagaggcaaaatgtcatcatatgcattttttgtgcaaacttgtcggggaggagcataagaagaagcacccagatgcttcagtcaacttctcagagtttttctaagaagtgctcagagaggtggaagaccatgtctgcttaaagaggaaaggaaaatttgaagatatggcaaaagcgggacaaggcccgttattgaaagagaaatgaaaacctatatccctccccaaaggggaagacaaaaaagaaagttcaaggattcccaattgcacccaagaaggcctccttcgggccttctttcctcttcttgctctgagtatcgcccaaaaatcaaaaggagaacatccttggcctgttccattggtgatgttgcgaagaaactggggagagatgtgggaattaacactgctgcagatggacaagcagcccttatgaaaagaagggctgcgaagctgaaggaaaaatacgaaaaggatattgcctgcatatcgagcctaaaggaaagcctgatgcagcaaaaaaagggagttgtcaaggctgaaaaaagcaagaaaaagaaggaagaggaggaagatgaggaagatgaagaggatgaggaggaggaggaagatgaagaagatgaagaagatgaagaagaagatgatggatgatgaataagttggtttctagcgcagttttttttttttcttgtctataaagcatttaaacgcccctgtaccacaactcactcccttttaaaggaaaaaaatggaaatgtaaggctgtgtaagatttgtttttaaactggtaccagtgtctttttttgtatagttaacacactaccgaattgtgtctttaggatagccctgtcctggtggtattttcaatagccactaaccttgcctgggtacagttatggggggttgtaaattggcatggaaatttaaagcaggttcttgttggtgcccagcccaaattagttatatatggggatggtagtttttttcatcttcagttgtctctgatgcagcttatacgaaataattgttgttctgttaactgaataccactctgtaattgcatcagagacaactgaagatgaaaaaagttgcagcgtgttttgttgacattctgaatgcttctaagtaaatacaattttttttattagtattgttgtccttttcataggtctgaaatttttcttcttgaggggaagctagttttttgttttggccctttttgattcacaggatttattacggggttttccttttcttatagtgggcaaaaaaaaagcttttgtttaccccccctgcttataatacggggggaaaggtaatttggaaaaagttttcttccatatgggaacatcaaaaatttgagtgagtaaaaaaatttcacttggcccctttacttttacaaactgaaaag

SEQ ID NO: 18947 - DNA, 421 bp, Homo sapiens
  misc_feature (1)...(421): n = a,t,c or g
ctctctccaagtccttcctttaatgtcaggtagtgcttcaacccaaacacaagcagtatacataccatagagaaagggacctgagggcatctgagtcatgcatggtgtggtacatacaaaccttggcccagcccaaaggagcagtcaagggcctggaagaaagatggtttgctctttccccctcctcctctctctttcctaccgggcttaaagtccgtggaagagaaagtttttaatcagtggaactgataaggcctcagggcgtnggagggtagatttggttgttcagtaatatcagcctgacctctacatctagacaaggaagtgaggagggtgattgctgggcattggtgtaggtttatgacggagcagcataagattttccgtgccctgtgaacacgtatacaaacattcatagccc

SEQ ID NO: 18948 - DNA, 1161 bp, Homo sapiens
  SIMILAR (451)..(1158): 971254mologous to Cloning vector pZC320 SopA,accession number U26464,Smith-Waterman Score=1206.
atgaagaccctgcccaacatctctgacctgtgtttgagagatgtgcccccagtccctaccctggctgacatcgcctggattgctgcggatgaagaggagacatatgcccgggtcaggagtgatacgcgccccctgaggcacacctggaaacccagccctctgattgtcatgcagcgcaatgcctctgttcccaacctgcgtgggtccgaggagaggcttctggccctgaagaagccagctctgccagccctaagccgcactactgagctgcaggacgagctgagccacttgcgcagccagattgcaaagatagtggcagctgatgcagagctgcagtggaatgggaaacagaggccaccccatggcaccagggagtgtgaagagaagaggatgaaggaagacttcactgattgctcctgctgctgcaagaagcacttgaggcagctggtgtgggagccccaaatcacccatcttcatattcatgcagaagacactctcctgcctttctatcttggggaaaaggacgatgtcacttatgcaataaagcccacttgctggccggggcttgacattattccttcctgtctggctctgcaccgtattgaaactgagttaatgggcaaatttgatgaaggtaaactgcccaccgatccacacctgatgctccgactggccattgaaactgttgctcatgactatgatgtcatagttattgacagcgcgcctaacctgggtatcggcacgattaatgtcgtatgtgctgctgatgtgctgattgttcccacgcctgctgagttgtttgactacacctccgcactgcagtttttcgatatgcttcgtgatctgctcaagaacgttgatcttaaagggttcgagcctgatgtacgtattttgcttaccaaatacagcaatagtaatggctctcagtccccgtggatggaggagcaaattcgggatgcctggggaagcatggttctaaaaaatgttgtacgtgaaacggatgaagttggtaaaggtcagatccggatgagaactgtttttgaacaggccattgatcaacgctcttcaactggtgcctggagaaatgctctttctatttgggaacctgtctgcaatgaaattttcgatcgtctgattaaaccacgctgggaagatagataa

SEQ ID NO: 18949 - DNA, 654 bp, Homo sapiens
  SIMILAR (103)..(321): 971254mologous to Homo sapiens HTRM clone 2019742 protein sequence,accession number Y73338,Smith-Waterman Score=374.
atgcgctggttctccagaggccaggcaaagagacaaaagattggtggtttggaagtacacccaccccccggcttgaaagaaaaaagccttaaggtgcattacaatgacatcaccgaggagacagaggtggaggtccctgagcttccatcagtccccctgctttgttctgccagccctgaatgttgcaaaccagaacacaaagctgcctgcagttcgtctgaagaggatgactgcgtctctttgtccaaggccagcagctttgcagacatgatgggtatcctgaaggactttcaccgaatgaaacagagtcaagatctggattttgccgatttcggaaccaccatcaaacaggattttcgcttggtggggcaaaccagcgtggaccgcttgctgcaactctctcagggccaggcggtgaagggcaatcagctgttgcccgtctcactggtgaaaagaaaaaccaccctggcgcccaatacgcaaaccgcctctccccgcgcgttggccgattcattaatgcagcggcacgacaggtttcccgactggaaagcgggcagtgagcgcaacgcaattaataaagtggaatactttcgggcatcgatggtacgggactcgggggatgtggaaaagataaaaatagagttacattggtag

SEQ ID NO: 18950 - DNA, 2220 bp, Homo sapiens
  SIMILAR (322)..(942): 611254mologous to Homo sapiens HTRM clone 2019742 protein sequence,accession number Y73338,Smith-Waterman Score=532.
acgccaagcttggcacgaggctggccggcccaaggtggaatgaggggccgtgaggtgagagagtccgggagcccgagcttgagatggcctgatatgaaggagtcacgacctcccgcctcccggagctgcccaggggctgccttgtccttcaagagcaggagctggttcaaatgtcaggaatggaagccactgtgaccatcccaatctggcaaaacaagccacatgggtgctgctccgaagtgtagtaagaagaattgggaccaacctacccttgaagccgtgtgcccgggcgtcctttgagaccctgcccaacatctctgacctgtgtttgaagagatgtgcccccagttccctaccctggttggacttggcttggatttcttgcggaatgaaaaggaagccaaaaggcccgggtccaggagtgatacgcgccccctgaggcacacctggaaacccagccctctgattgtcatgcagcgcaatgcctctgttcccaacctgcgtgggtccgaggagaggcttcttgccctgaagaagccagctctgccagccctaaagccgcactactgagctgcaggacgagctgagccactttgcgcaccaagatttgcaaagatagtggcaagctgatgcagcttcggcttcattaacgccagatttcttatctccaggaagttcaaatgtctcttctccctttaccttgttttggatcctcattccactctacaacttccttttgccattagtgacatcaccgaggagacagaggtggaggtccctgagcttccatcagtccccctgctttgttctgccagccctgaatgttgcaaaccagaacacaaagctgcctgcagttcgtctgaagaggatgactgcgtctctttgtccaaggccagcagctttgcaggacatgatgggtatcctgaagggacttttcaccggaatgaaacagagtcaagatctgaaccggagtttattgaaggaggaagaccctgctgtgcttatctctgaggtcctaaggaggaagtttgctctaaaggaagaagatatcagtagaaaaggaaattgacaaccctcagctctgcaaactcagtctcatgctcctggaataccttcaatagctgccttcctcaccgcagatgtttctgcctcttaaggatagatcttctgcaacagtcttgcttgacaagctaggagcttgggactgaaagagaagagctggattattatatttcccagactttcaaaccctaggcagaagctaaggcttgtgatttgacctgagacatttgtttcaggtaatcgtgtaggaatgaagtatcttagtttaaagggtaaggagagaagttgtttctggtttttccttggcccctgtgtgaaaatagggtcctaaatgactgactttcactgcattaggaccctataggctgggtctcacaagacactttgtggccccagctgttcactcactctcaggcagctttccttggcaggcaggagcaggggctgaggggaaggggctatgaatgttggaatacgttgttcaacagggccccggaaaatcttatgcctgcctccgtcataaacctacaccaaatgccccagccaatcaccctcctcacttcccttgtcttagatgtaagaggtccaggctgctgaaccagcccaacacatgggcttactgctgggaaagcctgggctgtttttttttcttaaacaccattttatattactgaacaaccaaatctaccctcccaacgccctgaggccttatcagttccactggattaaaaactttctcttccacggactttaagcccggtaggaaagagagaggaggagggggaaagagcaaaccatctttcttccaggcccttgacttgctcctttgggctgggccaaggtttgtatgtaccacaccatgcatgacttcagatgccctcaggtcccttttctctatggtatgtatacttgcttgtgtttgggttgaagcacttaccttgacattaaaggaaggacttggagagagaatgcaaaaaaaaaaaaaaaaaaaaacgtttgcggccgccgcagccggccccggcccttgggcagcttggcgggccgcacgggctgcgggaactcgtcggccaggcacacgaagtgcggcatcaccgcctggtaactggagcagatgcccatcagctcgccgggcttggcggccatggcgcctccggcgtc

SEQ ID NO: 18951 - DNA, 1413 bp, Homo sapiens
  SIMILAR (177)..(401): 361254mologous to Mus musculus proline-rich protein MP- 3,accession number M12100,Smith-Waterman Score=86.
atgcatgaaaagtcaaaggggaagatggagggttatcccactgagggctgtccatcattcagcctccaggcaaggctgcaactgaaatgcagcaaagacatggtgccatatgatggcaaagagctgcctccagggatccagatcaactactatgatcttagggccaagcttcgtgtccccctcctgctctgggccagcagaccccggcttcctcgtacacagtccagatccaaacgtatgctccatcctcacctcacccccgccagggtcccggacagggatcttcggaccctcgagggctcagaggtgccattccgaggggcaggcaaggacagggagtgtagcagcaaggcccccgctgccgtcctccatcctcccctgttctgccacacatcccccaactcagctgctgtggccacgatggcagggatcctgaggaagggcttggcatcttggagctcactctgctacatcatgcacacccctggtctccaaattcctggtgaaaggactcttccttcgccccatggagagttccctgcacactctgagcctcacagtcgagatcaaacaagccccatggccactaccaagcatgaggtccaaccacttccccaggcatctctctcccagccttcactggggatcgggtgtttggtggactggctgaggcagctcaggaccacacaggggtctctcaagatgccgcccaggattctacatgggaaagaccctgagatgcttctgcaagccttggctgctctgacctggggttccaactcccggccccccttgccaggccaaagagaggaagcctcccttcatggggaactgccccctgtgatccagggtcccttggccctcaaggcttccagaggagctgctgccatgccacttgctccccctgtggctggggaggcagctggccctgcatccagtcaccaatcactttccccttcacaggaccctactcccttacctggtgcagataggagggaaaaggaaaggggtggagaggagggctcgtcctggcctcagacaccccgactgaccactcacaccacctcaccaccacctgagaaacaacagcaaatcgaatctcctccaattcgtctctcctctttcaaaactggcttccacctggcctcctctgggcattcttatgcaatcaagcccaattcaaagaccaaggcagagaaagtggggcaggtgagggtgcctaggagccatacaatacgagaacagcgccagggaaagagacctggggaacatcacagacgaacagagagggacgccaagccacagggagaggaggaccaccaggcgactgtggtatcacagaagctgggtacagacagaaggttgatcaagaagcagagaacgtccgtgctgtcagccacagctgagtcgtga

SEQ ID NO: 18952 - DNA, 475 bp, Homo sapiens
  SIMILAR (257)..(370): 551254mologous to Homo sapiens dJ1186N24.3 (novel zinc finger protein),accession number AL049543,Smith-Waterman Score=104.
  misc_feature (1)...(475): n = a,t,c or g
gggtctgtgggttctggcaccaccttgaaccaactgggcttctggtcatcccctggcacctctcctttggagccaccttgtccctggctagacagtcacattttcccagtgccgttttggaaagatgttgcctttggagaaggcgtttgcctccccccaggagctccccagccccgccggatctgcccacgccggggtcagcagccggagttccagcaggaagaacccgagaccatccctgagaggacccctgctgaccctggagttctcccgcctgcgtttccgggaatttgtctacccaggaggctgcgggccccaccagaccctggcccggctgcatgagctgtgncgccagtggctgatgcctgaggcgcctccaaggagcagatgctggagctgctggtgctggagcagttcctggcatcctgcctgataaggtccggccctgggtggtggcacagtaccctgagagctg

SEQ ID NO: 18953 - DNA, 396 bp, Homo sapiens
  SIMILAR (390)..(28): 461254mologous to Homo sapiens KRAB zinc finger protein HFB101S,accession number AB029149,Smith-Waterman Score=238.
tcattcctctggcttccttacatctggctcttccaggacatcagcgaggccctccaccagggaggctgccttcttgcagctctcagggtactgtgccaccacccagggccggaccttatcaggcaggatgcccaggaactgctccagcaccagcagctccagcatctgctccttggagcgcgcctcaggcatcagccactggcggcacagctcatgcagccgggccagggtctggtggggcccgcagcctcccacctgctcgtgcccacccacctgctcggtgttggcagggccgtcctcttcggtctttgcttctctgaccctcctctgttccagaaacagggggtccggagaaagccaggcttgtaaaggccctgtctccaaatacagccccat

SEQ ID NO: 18954 - DNA, 1652 bp, Homo sapiens
  SIMILAR (1240)..(1178): 571254mologous to Homo sapiens Human CHD1 SCAN domain,accession number Y29925,Smith-Waterman Score=67.
tcaatgaaaagatcaccttatgtagcccaaggagtttagtctcctttggctcagacaagacaagatctttattaagtgttttcaacttattttgcgtcacaagcttcccagcaagaaatgtcttacattgcaaccagttctcacatttaagatgtatgggttaaaagtttcacaaaacaagtatttgcctttactacatgatgcattctggcctactttattctgcttcattgctgtgtaatgctggtgaccacttgctaaattgattttccccattttacctaaaatggggctggggaccccacgggtctgaaaaacccctgccttaaggctgcaaagcattttctggtggatctctggcgaggctactcccatataggggtaaacacacggcgaggggtaaactagggggaacaggcttctggcttttggcaggattaggaaggtggaggttggacattcacggccaggtacgggaaaggggcttaaacagctggacaaatttccaacttgagcaacccctgggggagcgcaaaacaggagggaatcggggcaagggtgacttgaagaaagcactggcagaatcacgcactttaaggcaactctacactgcacaatgtcaaataacctagcatggggcggcactaaatggctgcaggaaagccgagtcttcttccacatccggcggctcccctcggatgcgagcgctggcccagggtgtgtttacagagtggtgcccgacgggggatcgcaagggcgtccccagggggcgcctccgtaggcagctcaggcagcaccccgcgggggcggcctcctcgcaggcgcacccagcgctctcctgccgcctccgccttctggaacaagtgtgggacctggaggcctccaacaacggaggccaccgacaggacaggaagacagccccactgagcccgggttctggaaaccgcgcctttggaggtctcacctggccactagcttggccacaagatgcacgatgcaaggagagcctgccagagcgcaccctcctggagggaggggcccggctgccagcgaagagagacatcagcgaggccctccaccaggaggctgctttgcagctctcaggtactgtgccacacccaggccggacttatcaggcaggtgcccaggaactgctccagcaccagcagctccagcatctgctccttggacgcgcctcaggcatcagccactggcggcacagctcatgcagccgggccaggtctggtggggcccggcagcctcctggtagacaaattcccggaaacgcggcgggagaactccagatccggcgggctggggagctcctgggggaggcaaacgccttctccaaaggcaacatcttccaaaacggcactggaaaatgtgactgtctagccagggacaaggtggtccaaaggagaggtgccagggatgaccagatgcccagtgggctcagtactatggacatttggggctggatcatttttgttgtggaagtccatcctgtgcattataggatatttagcagcatccgtgctcctaggaacatctgccccctagtcagactgacaaccaaaatcatctcagatattgccaagtatcttctggaagtagaaacatccctggttaaaaatactgctctgtgggcttag

SEQ ID NO: 18955 - DNA, 1161 bp, Homo sapiens
  SIMILAR (1)..(546): 941254mologous to Homo sapiens p40,accession number U93567,Smith-Waterman Score=877.
atggagctgaaagccaaggctcgagaactacgtgaagaatgcagaagcctcaggagccgatgcgatcaactggaagaaagggtatcagtgatggaaaatgaaatgaatgaaatgaagcgagaagggaagtttagagaaaaaagaataaaaagaaacgaacaaagccttcaagaaatatgggactatgtgaaaagaccaaatctacatctgattggtgtacctgaaagtgacggggagaatggaaccaagttggaaaacactctgcaggatattatccaggagaacttccccaatctagcaaggcaggccaacattcagattcaggaaatacagagaacgccacaaagatactcctcgagaagagcaactccaagacacataattgtcagaatcaccaaagtggaaatgaaggaaaaaatgttaagggcagccagagagaaaggtcgggttccccacaaagggaagcccatcagactaacagcggatctctcgtcagaaactctacaagccagaagagagtgggggccaatattcaacattcttaaaagaattttcagctttccacagcgcgggggaacgggaggccgcaggatggtcaagctgacggcggagctgatcgagcaggcggcgcagtacaccagcgcggtgcgcgaccgggagctggacctccgggggtataaaattcccgtcattgaaaatctaggtgctacgttagaccagtttgatgctattgatttttctgacaatgagatcaggaaactggatggttttcctttgttgagaagactgaaaacgttgttagtgaacaaaacagaatatgccagtactggatttccagaaagtgaaactaaagagcgtcaggaagcagagaaaatgttcaagggcaaacggggtgcacagcttgcaaaggatattgccaggagaagcaaaacttttaatccaggtgctggtttgccaactgacaaaaagaaaggtgggccatctccaggggatgtagaagcaatcaagaatgctatagcaaatgcttcaactctggctgaagtggagaggctgaaggggttgctgcagtctggtcagatccctggcagagaacgcagattggggcccactgatgatggtgaagaagagatggaagaagacacagtcacaaacgggtcctga

SEQ ID NO: 18956 - DNA, 431 bp, Homo sapiens
  SIMILAR (2)..(298): 1001254mologous to Homo sapiens Human autoantigen U2- RNP,accession number W03715,Smith-Waterman Score=501.
caggaaactggatggttttcctttgttgagaagactgaaaacattgttagtgaacaacaacagaatatgccgtataggtgagggacttgatcaggctctgccctgtctgacagaactcattctcaccaataatagtctcgtggaactgggtgatctggaccctctggcatctctcaaatcgctgacttacctaagtatcctaagaaatccggtaaccaataagaagcattacagattgtatgtgatttataaagttccgcaagtcagagtactggatttccagaaagtgaaactaaaattttaatccaggtgctggtttgccaactgacaaaaagaaaggtgggccatctccaggggatgtagaagcaatcaagaatgccatagcaaatgcttcaactctggctgaagtggagaggctgaaggggttgctg

SEQ ID NO: 18957 - DNA, 584 bp, Homo sapiens
  SIMILAR (170)..(301): 661254mologous to Homo sapiens Human autoantigen U2- RNP,accession number W03715,Smith-Waterman Score=139.
cctgggatcccctccttggagctaggagaatgaactttcttcagggagctctaccaaagaaagaagaccactgtgtcttctcttaatttgaaattgctttttggtattttcaccagcccggagtactgtaggagagttcgcttccatgtcttctgaggaatgcatctaaatgcatgtggtattcctatttccattaactctgtgtgtggtgtcgctgtatgagcgtcaggaagcagagaaaatgttcaagggcaaacggggtgcacagcttgcaaaggatattgccaggagaagcaaaacgtaagacacggatatccaacttaactctacttcaccttcagaaacatgatctgatctgtctggcagttcgtctcctacaaaattaaccaaaaactctgacatattaatgtggtattaaatttgagtgcttatagtccatgtacatcaatggtccacacatcacaagaaatttctaccagcttagcagagcaaatatttcagtagtcagtcttcatgtgataccatgtacatcctattttctatataggaagatgaactggatggtgtttctgaaggagagagtt

SEQ ID NO: 18958 - DNA, 517 bp, Homo sapiens
attttgaaatctttgtgacccttttcctttgaaattgagcatcccttccagtacctgccaaagacagactagaccgtccctggacgataagctcctcaaaggcaggtgctgcttttgatctttttgtacctacttcagtgtgtaacaaacagtggccacagaacaaacacttgcatgctaagggaatggattctctaaaattgataactacttttgctttggtggtttcctttagggcccactgatgatggtgaagaagagatggaagaaagacacagtcacaaacgggtcctgagcagtgaggcagatgtataataataggccctcttggaacaagtcttgcttttcgaacatggtataatagccttgtttgtgttagcaaagtggaatctatcagcattgttgaaatgcttaagactgctgctgataattttgtaatataagttttgaaatctaaatgtcaattttctccaaattataaaaataaactcccctccctatgctaaaaaaaaaaaaa

SEQ ID NO: 18959 - DNA, 1155 bp, Homo sapiens
  SIMILAR (128)..(883): 571254mologous to Homo sapiens U2 snRNP-specific A' protein (AA 1-255),accession number X13482,Smith-Waterman Score=543.
  misc_feature (1)...(1155): n = a,t,c or g
atagattagcgattgcatcnggcccggaacccttggtcgacccacgcgtccggctggcgggaggccacgggctttccacagcgcgggggaacggcaggctgcacgatgggcaagctgacggcagaggctgatcgagcaggcggcgcagtacaccaacgcggtgcgcgaccgggagctggacctccgggggtataaaattcccgtcattgaaaatctaggtgctacgttagaccagtttgatgctattgatttttctgacaatgagatcaggaaactggatggttttcctttgttgagaagactgaaaacattgttagtggacaccaccagaataatgcggtataggtgagggacttgatcaggcttctgccctgtctgacagaacttattctcaccaataatagtctcgtggaactgggtgatctggaccctctggcatctctcaaatcggttgcttaccctaacatacctaagaaatccggtaacccataagaagcattacagattgtatgcgatttataaagctccgcacgtcagagtactggatttccagaatgtgaaactaaaaagagcgtcagaaagcagagaaaatgtccaagggcaaacggggtgcacagcttgcaaaggatattgcccaggagaagccaaaactttttaattcccaggtgctggtttgcccaactgaccaaaaaggaaaggtgggcccatcttccaggggatgtagaagcaatccaagaatgcccatagcaaaatgctttcaactctgggctgaaagtggagcggctgaaaggggtttgctgcaagtctgggtcagatcccctggcagagaacgcagatccggggcccactgatgatggtgaagaagagatgggaagaagacacaagtcaccaaacggggtcctgagcagtgaggccagatgtataataatagccccctcttggaacaagtcttgcttttcggaacatggtataatagccttgtttgtgttagccaagtggaattctatcagtcattgttgaaatgcttaagactgctgctgataattttgtaatataagttttgaaatctaaatgtcaattttctacaaattataaaaataaactccgactcactatgcaaaaaaaaaaaaaaaaaaaaaaaaaaaagtcgtatcg

SEQ ID NO: 18960 - DNA, 455 bp, Homo sapiens
  SIMILAR (195)..(323): 1001254mologous to Rattus norvegicus UFD1,accession number AF234601,Smith-Waterman Score=231.
gccatcaactataatgaaaagatctacgaactgcgtgtgatggagaccaaaccccgacaaggcagtgtccatcattgagtgtgacatgaacgtggactttgatgctcccctggctacaaagaacccgaaagacaagtccagcatgaggagtcgacagaaggtgaagccgaccacagtggctatgctggagagctggcttccgcgctttctctggatctggcaatagactggatggaaagaagaaaggggtagagcccagcccctccccaatcaagcctggagatattaaaagaggaattcccaattatgaatttaaacttggatgaagctggaggcagattcgtcgctttctctggagaaggacagtcattgcgtaaaaagggaagaaagccctaagtgaggactgttggctgattggaaaataataaaagaatcatttgcaacaaaaaaaaaaa

SEQ ID NO: 18961 - DNA, 1156 bp, Homo sapiens
  SIMILAR (79)..(1107): 1001254mologous to Homo sapiens ubiquitin fusion-degradation 1 like protein,accession number U64444,Smith-Waterman Score=1813.
ggcacgaggaagagcggtcggcggggtttcttcgttgcattgcctgagaggagcggagtctgccaggtggtgtccatcatgttctctttcaacatgttcgaccaccctattcccagggtcttccaaaaccgcttctccacacagtaccgctgcttctctgtgtccatgctagcatggcctaatgacaggtcagatgtggagaaaggagggaagataattatgccaccctcggccctggaccaactcagccgacttaacattacctatcccatgctgttcaaactgaccaataagaattcggaccgcatgacgcattgtggcgtgctggaatttgtggctgatgaaggcatctgctacctcccacactggatgatgcagaacttactcttggaagaagacggcctggtccagttggagaccgtcaaccttcaagtggccacctactccaagagtaagttctgctacctcccacactggatgatgcagaacttactcttggaagaaggcggcctggtccaggtggagagcgtcaaccttcaagtggccacctactccaaattccaacctcagagcgctgacttcctggacatcaccaaccccaaagccgtattagaaaacgcacttaggaactttgcctgtctgaccaccggggatgtgattgccattaactacaatgaaaagatctacgaactgcgtgtgatggagaccaaacccgacaaggcagtgtccattcatgagtgtgacatgaacgtggactttgatgctcccctgggctacaaagaacccgaaagacaagtccagcatgaggagtcgacagaaggtgaagccgaccacagtggctatgctggagagcttggcttccgcgctttctctggatctggcaatagactggatggaaagaagaaaggggtagagcccagcccctccccaatcaagcctggagatattaaaagaggaattcccaattatgaatttaaacttggtaagataactttcatcagaaattcacgtccccttgtcaaaaaggttgaagaggatgaagctggaggcagattcgtcgctttctctggagaaggacagtcattgcgtaaaaagggaagaaagccctaagtgaggactgttggctgattggaaaataataaaagtttcatttgca

SEQ ID NO: 18962 - DNA, 696 bp, Homo sapiens
  SIMILAR (334)..(693): 791254mologous to Homo sapiens ubiquitin fusion degradation 1 protein,accession number AJ239058,Smith-Waterman Score=470.
atggaacagtttcatcccaaaaccatccccaccaccctgtccgtggaaaatttgtcttccacgaaactggttcctggtgccaaaaagatatattgggttgggcccatcataggagctgtcctcgctggtggcctttatgagtatgtcttctgtccagatgttgaattcaaacgtcgttttaaagaagccttcagcaaagctgcccagcaaacaaaaggaagctacatggaggtggaggacaacaggagtcaggtagagacggatgacctgattctaaaacctggagtggtgcatgtgattgacgttgaccggggagaggagaagaaggggaaagaccaatctggagagttaggggagcctgttcctggtaaaaaggagggaacccgaaagaaagtccagcacgaggagttgacagaaggtgaagccgaccacagtggctatgctggagagctgggcttccgtgccttctccggctctggcaacagactggatggaaagaaagaaagcccctccccaatcaagcctggagacattaaaagaggaattcccaatcatgaatttaaacttggtaagacacctttcatcagaaatgcatgtccccttgtcaaaaagtttgaagaggatgaagctggaggcagattcgttgctttctctggagaaggacagtcgttgagtaaaaagggaagaaagccctaa

SEQ ID NO: 18963 - DNA, 1488 bp, Homo sapiens
  SIMILAR (534)..(1109): 501254mologous to Homo sapiens ubiquitin fusion-degradation 1 like protein,accession number U64444,Smith-Waterman Score=296.
ccggcttggcgcggcggcagcggcagcggcggctgggagagcggtcggcggggtttcttcgttgcattgccctgagaggagcggagtctgccaggtggtgtccatcatgttctctttcaacatgttcgaccaccctattcccagggtcttccaaaaccgcttctccacacagtacccgctgcttttctttgtccagtgctagcagggcctaatgacagggttcgattggggaaaaggaggggaagataattatgccacccctcggccctgggaccaaactcagccgactttaacattaccgtatcccaatgctgttcaaacctgaccaataagaattccggaccgcatggacgccattgtggcgttgctgggagtttgtgggcttgatgaggggcatctgcttacctcccacactgggatgatggcagaacttactctttgggaaggaaggcggcctgggtccagggtgggagaagcgtcaacctttcaagtgggccacttatttcaaatttccaacctcagagcccttgactttctgggacatcaccaaccccataagccgtttttgaaaaccgcacttaggaactttgccctgtcctgaccacccggggatgtgattggccatcaactataatgaaaagatcctacggaactgcgttgtgatggagacccaaaccccgacaaggccagtgtcccatcattgaagtgtgaaccattgaaccgtggaactttgattgcttccccctggggctaccaaagaaccccggaaagaccaagtccagccatgaggagtccgaacagaaggtgaaagccgaccccacagtggcctatgcctggaagagcctgggcttcccgcgcttttctcgtggatctgggcaatagacgtggatggaaagaagaaaggggtagagcccagccccttccccaatcaagccctggagatattaaaagaggaattccccaattatgaatttaaacttggtaagataactttcgatcgagaaattcacgtccccttgtcaaaaaggttgaagaggatgaagctggagggcagattcgtcgctttctctggagaaggacagtcattgcgtaaaaagggaagaaagccctaagtgaggactgttggctgattggaaaataataaaagaatcatttgcaacatcttggcttttagttactggcactgacagggacgagcctcatcagagaatactctgttacttaagatttatttagagttacctaagaattataagttgacttgaaagtggacagcagactttgtagtgtatgttgattgggaaagacaagagctgtccctgagggccctgtgtgggggtttaaaaaagggaaaaaatttaaagctgcctcctcacctcttcacgctttcagcttgaggggagctcccactgcctcagcaggagcaattctgcatccctaattctgtcaaaacctatgaaggtgactaaattgtctaacatgaaaaaa

SEQ ID NO: 18964 - DNA, 415 bp, Homo sapiens
  SIMILAR (146)..(382): 701254mologous to Coturnix coturnix cytoskeletal tropomyosin,accession number X54278,Smith-Waterman Score=271.
agcggaggaggcaggaaccggagcgcgacaggtagctgggtgggcaccatggctgggatcaccaccatcgaggcggtgaagcgcaagatccaggttctgcagcagcaggcagatgatgcagaggagcgagctgagcgcctccagcgagaagttgagggagaaaggcgggcccgggaacagaggtatgaaggttattgaaaaccgggccttaaaagatgaagaaaagatggaactccaggaaatccaactcaaagaagctaagcacattgcagaagaggcagataggaagtatgaagaggtggctcgtaagttggtgatcattgaaggagacttggaacgcacagaggaaccgagcttgagctggcaagagtctaagtgttcttgagctggaggaggagctgaagaatgtcaccac

SEQ ID NO: 18965 - DNA, 421 bp, Homo sapiens; identical to SEQ ID NO: 11561
  SIMILAR (1)..(177): 1001254mologous to Rattus norvegicus tropomyosin,accession number L24775,Smith-Waterman Score=296.

SEQ ID NO: 18966 - DNA, 388 bp, Homo sapiens
  SIMILAR (54)..(293): 1001254mologous to Homo sapiens cytoskeletal tropomyosin (AA 1-248),accession number X04588,Smith-Waterman Score=375.
cgccgagcggaggaggcaggaaccggagcgcgagcagtagctgggtgggcaccatggctgggatcaccaccatcgaggcggtgaagcgcaagatccaggttctgcagcagcaggcagatgatgcagaggagcgagctgagcgcctccagcgagaagttgagggagaaaggcgggcccgggaacaggctgaggctgaggtggcctccttgaaccgtaggatccagctggttgaagaagagctggaccgtgctcaggagcgcctggccactgccctgcaaaagctggaagaagctggttgaagaagagctggaccgtgctcaggagcgcctggccactgccctgcaaaagctggaagaagctgaaaaagctgctgatgagagtgagagag

SEQ ID NO: 18967 - DNA, 1335 bp, Homo sapiens
  SIMILAR (682)..(1332): 631254mologous to Homo sapiens Similar to tropomyosin 4,accession number BC000771,Smith-Waterman Score=664.
atgaatgctgggagacgtggattctggtgtttagctcagggagcttctgcacgacagaggaaagttggtggggaaatggaaaagtacagagacacctgggagagggagaagtggctcagaggagacgtggagggcaggtatgtaatgcaagaaagccaggcgagagtgacagaggtgcaaggaggcaaaagaggcagaaacagaaatgccagagaggcgtttacagagattgacaaacaaagagggagaagctgcaagaaagaagcaggagtggagaaatggacagagacaatgggaagggaaagaagagagaggaaagactggaacagtttggagagcttagaagaagacaggaagatgagagaaagtttggaacatgctagagacttgttaaattgttgtgaccaaaatgctgatcatcatatggacagtgaagtccaggctgaggtggtctcagaaggagatgaagaacttattgggaaatggagtaaagcatactgccataggtgtgagcaaaaagatgatctgaaatgggaacttatatttaaaagggaagcagagcataaaagtttggaaattttgcagcctgaccatgtggtagaaaagaaaaacccgggaggaggcaggaaccagagcacgagcagtagctgggtgggcactgtggctgagatcaccaccatcgaggcagtgaagtgcaagatccaggttctgcagcagcaggcagatgatgcagaggagcgagctgagcacctccagcgagaagttgagggagaaaggcaggcccgggaagaggctgaggctgaggtggcctccttgaaccgtaggatccagctggttgaagaagagctggaccatgctcaggagtacctggccactgccttgcaaaagctggaagaagcggaaaaagctgctgatgagagtgagagagaagctaagcacattgcagaagaggcagataggaagtatgaagaggtggctcataagttggtgatcattgaaggagacttggaaggcacggaggaacgagctgagctgggagagtcccgttgccaagagatggatgagcagattagactgatggaccagaacctgaagtgtctgagtgctgctgaagaaatgtactctcaaaaagaagacaaatatgaggaagagatcaagattcttactgataaactcaaggaggcagagaccagtgctgagtttgctgagagatcggtagccaagctggaaaagacaattgatgacttggaagataaactgaaacgcaccaaagaggagcacctctgtacacaaaggatgctggaccagactctgattgacctgaatgagatgtag

SEQ ID NO: 18968 - DNA, 630 bp, Homo sapiens
  SIMILAR (70)..(483): 1001254mologous to Homo sapiens skeletal muscle tropomyosin (AA 1-285),accession number X04201,Smith-Waterman Score=657.
  misc_feature (1)...(630): n = a,t,c or g
ccccttctttcttgccccagtctccagttctccagtgttcacaggtgagcctaccaacagccactgctcatgatggaggccatcaagaaaaagatgcagatgctgaagttagacaaggagaatgctctggatcgggcagagcaagctgaagctgagcagaagcaggcagaagaaagaagtaaacagctggaggatgagctggcagccatgcagaagaagctgaaagggacagaggatgagctggacaagtattctgaagctttgaaggatgcccaggagaagctggaactggcagagaagaaggctgctgatgctgaggctgaggtggcctccttgaaccgtaggatccagctggttgaagaagagctggaccgtgctcaggagcgcctggccactgccctgcaaaagctggaagaagctgaaaaagctgctgatgagagtgagagaggtatgaaggttattgaaaaccgggccttaaaagatgnnnnnnnnnnnnnnnnngggggccgttttaaaggatcaagttttacttcccggggcgggcaaggagaaaatttttttttggggccccctaaatccatttccggggccggggtttaacaacgtcgggaggggaaaaacccgggggtc

SEQ ID NO: 18969 - DNA, 2586 bp, Homo sapiens
  SIMILAR (248)..(1027): 541254mologous to Homo sapiens Similar to tropomyosin 4,accession number BC000771,Smith-Waterman Score=499.
  misc_feature (1)...(2586): n = a,t,c or g
ggcacgaggagtgacggtgccaccgcggcgcgtgagtttcgccctgtcttgtattaagtctgctcttccaggttcctggcgcttctgtacctgggacttgggatccccacaaacctggaaattctcagccgtcttccttcactcagagcaaattgagacgaccccgtgagaggccgtggagaggagtctgcaatgccgagtggaggaaggaggaaccggagtgtgagcagttagctgggtgggcaccatggctgggatcaccaccatcgaggcggtgaagcgcaagatccaggttctgcagcagcaggcagatgatgcagaggagcgagcttgagcgctcccagcgagagtttagggaagaaaggcgggcccgggaaccaggcctgaggctgaggtggcctccttgaacccgtaggatccagcgtggttgaagaagagcttggaccgtgctcaggagcgccttggccactgcccctgcaaaaagctttgaagaagctgaaaaaagcttgctgatgagagtgagagaaggtattgaaggttatttgaaaacccgggccttaaaaagattgaaggaaaagattggaacttccagggaaatcccaacttcaaagaagcctaagcaccattgccggaaagaggcagattaggaagtatgaagaggtgggctcgtaagttgggtgatcatttgaaggaagacttggaacgcacagagggaacgagctggagctggcagagtcccgttgctgagagatcgatgagcagatcagactgatcgaccagaacctgcagtgtctgagtgcagctgaagataagtactctcaaaaagaagacaaatggtgaggaagagatgaagattcttactgataatctcaaggaggcagagacccatgctgagttggctgagagatcagtagccaagctggaaaagacaattgatgacttggaagataaactgaaatgcaccaaagaggaacacctctgtacacaaaggatgctggaccagactctgcttgacctgaatgagatgtagaatgccccagtcccaccctgctgctgctccttcctctgaccctgactctgcctgaggccagcctgcccgaagctggacctttaactgagggctgatctttaactgggaaggctgctttctccctttcaccaccccctcctttccctgtgtcttttttcgcccaaactgtctcttgccttcttcccgggagaaatccagctggggntagaggctggagcacctttgggaaacaacattttaaggggaatgttgaggcacaatggcattaatgtttttaaaaaggcatgttgttgatgtacacattttgtaaattacctttttttgttggttttgtaggcaaccatttgtaaaaacattcccaaataattccacagtcctggaaggcaggcaatcgaaatcccctttcttaactttttggaaggtgacttttcaccttaaatgcatattccccctnttcccatagaggagaggaaaaggtgtaggcctggcttaccgagagccaaacagagccaaggggagactccggctgtgggaaacctcattgttctgtacaaagtactagctaaaccagaaaggtgattccagggaggagttagccaaacaacaacaaaaacaaaaaatgttgctgtttcaagtttttcagcttttaagatatctytyggataatgttatttctatttttttatttttttcattagaagttaccaaattaagatgggtaagacctctgagacccaaaattttgtcccatctctaccccctcacaactggcttacagaatggatcatggtcccccttatggttgagggtgacccacttaattggctttcctggcctccttgaaaagaaaagaaaagaaagaagactgtggtttttggccactggatttagcccatgtggaaactccatctccatcaccccttttctggggtttggaagctggctgttcttctaggaaggtggccatctcaattggtggctttgtatccagtccagtgctgggagaaaatcttcgaatagccttatgtaccaaaacctttttaaattttatattatttttgaaaactttggctttggggtttgtgggcaccctgggccaaccccagtctgggctgtgacaagcctctggcagtccctgggggcttgggcagttttgttggatcttttaagtttccttccctaccccagtcccccatttttctgggtaaggggttctaggggaggtcgtgttaggtgtacaatcctgcagcttattggcttaaaatgtactctccttttatgtggtctctttggggccgattgggaggaagaggaattcaatagtgcaactggttttgatactgaatattgacaagtgtccttttgaaataaagaaccagtccctccnnnnnnnnnnnnngggggggccctttaaagggaacaaattttaattcccgggggtgggaaagaaaaattttttttaagggggccccaaaattaaattccggggccggggtttaaaaaccggggagggggaaaaacccgggggtaccccaaaaaaatcccttttgaaaaaa

SEQ ID NO: 18970 - DNA, 2048 bp, Homo sapiens
  SIMILAR (62)..(862): 1001254mologous to Homo sapiens MSX-2,accession number D89377,Smith-Waterman Score=1386.
gtcgccgctgccgggttgccagcggagtcgcgcgtcgggagctacgtagggcagagaagtcatggcttctccgtccaaaggcaatgacttgttttcgcccgacgaggagggcccagcagtggtggccggaccaggcccggggcctgggggcgccgagggggccgcggaggagcgccgcgtcaaggtctccagcctgcccttcagcgtggaggcgctcatgtccgacaagaagccgcccaaggaggcgtccccgctgccggccgaaagcgcctcggccggggccaccctgcggccactgctgctgtcggggcacggcgctcgggaagcgcacagccccgggccgctggtgaagcccttcgagaccgcctcggtcaagtcggaaaattcagaagatggagcggcgtggatgcaggaacccggccgatattcgccgccgccaagacatacgagccctaccacctgcaccctgaggaaacacaagaccaatcggaagccgcgcacgccctttaccacatcccagctcctcgccctggagcgcaagttccgtcagaaacagtacctctccattgcagagcgtgcagagttctccagctctctgaacctcacagagacccaggtcaaaatctggttccagaaccgaagggccaaggcgaaaagactgcaggaggcagaactggaaaagctgaaaatggctgcaaaacctatgctgccctccagcttcagtctccctttccccatcagctcgcccctgcaggcagcgtccatatatggagcatcctacccgttccatagacctgtgcttcccatcccgcctgtgggactctatgccacgccagtgggatatggcatgtaccacctgtcctaaggaagaccagatcaatagactccatgatggatgcttgtttcaaagggtttcctctccctctccacgaaggcagtaccagccagtactcctgctctgctaaccctgcgtgcaccaccctaagcggctaggctgacagggccacacgacatagctgaaatttcgttctgtaggcggaggcaccaagccctgttttcttggtgtaatcttccagatgcccccttttcctttcacaaagattggctctgatggtttttatgtataaatatatatatataataaaatataatacatttttatacagcagacgtaaaaattcaaattattttaaaaggcaaaatttatatacatatgtgctttttttctatatctcaccttcccaaaagacactgtgtaagtccatttgttgtatttcttaaagagggagacaaattatttgcaaaaatgtgctaaagtcaatgatttttaccgggattattgacttctgcttggaaaaacaaaagaaaacagacacaatgcagcagccagaaaatattagatatggagagattatcaaagtgaaggggaccacatcatatttctgcattttacttgcattaaaagaaacctctttatatacagttgttcctatctctcccgccccaccacacacatatttttaaagtttttcctttttaagaatatttttgtaagaccaatacctgggatgaagaatcctgagactgcctggaggtgaggtagaaaaattagaaatacttcctaattctcaaggctgttggtaactttatttcagataattggagagtaaaatgttaaaacctgttgagaggaattgatggtttctgagaaatactaggtacattcatcctcacagattgcaaaggtgatttgggtgggggtttagtaattttctgcttaaaaaatgagtatcttgtaaccattacctatatgctaaatattcttgaacaattagtagatccagaaagaaaaaaaaaatatgctttctctgtgtgtgtacctgttgtatgtcaaacaggccattaaggtccctgggatttcaccttcctgtccatctctcccctccctccggtatacctttatccctttgaaagggggttgtacaatttggtatattttattggaggggtatctcttattctggattaaataaggatttgtttattgc

SEQ ID NO: 18971 - DNA, 1017 bp, Homo sapiens
  SIMILAR (616)..(828): 921254mologous to Homo sapiens SF2p33,accession number M69040,Smith-Waterman Score=359.
atgtgggatgctgagttggagtatatatggtctcctgaaggacattgtctcacccctgcaaggtgttgcgaccgagctggcactgtaactagatcttcaaaaggccattccgcctttctatcaagccagctgcttcggtatgatggagaacatgaaggccatggccctgggcccctcctgtcagtgcctgtggggcctgtggacactgaagcagatgtctgtgtgtcagtgtctctgtgtaggggagctcacggggctcatgacctatgtccccagctagcgtgttcctcagtgggtcatgcctgtatctatatctatacctggcccttcaccccattcctcatggacaaggctgtgtccatcagctacacagtcatgacccccatgctcaaccccatgatctacaccctgagaaaccaggacatgaaagcagccatgaggagattaggcaagtgcctagtaatttgcagggagttaaactttaaagtccagggcagttcccaagatggttgggacctctgggtctgtggccaggatcggaaaaaacaggtctttccccgtccagtctgcttggtgggaaggcctgttctcgagtccgcgcttttcgtcaccgccatgtcgggaggtggtgtgattcgtggccccgcagggaacaacgattgccgcatctacgtgggtaacttacctccagacatccgaaccaaggacattgaggacgtgttctacaaatacggcgctatccgcgacatcgacctcaagaatcgccgcgggggaccgcccttcgccttcgttgagttcgaggacccgcggagactgagctctgcaatcagggccaagagagaagagccatttctgttcacaggaactagtggacatggcatctctgctcaccagaaggctagtgttggggctcacaccctgcaagaggcctcaggaaagttagcagaacctcctcgatcctctttgggagtggggaagactgagagcaaagatgtcatcaagtgcaaaacaaaataa

SEQ ID NO: 18972 - DNA, 1653 bp, Homo sapiens
  SIMILAR (919)..(1650): 781254mologous to Homo sapiens MSX-2,accession number D89377,Smith-Waterman Score=958.
atggggtttcaccacgttggccaggctgctctcgaactcctgacctcagggttttcacagacccaagagctccagaaattcctgttccttctgttcctgttagtctatgttaccaccattgtgggaaacctccttatcatggtcacagtgacttttgactgccggctccacacacccatgtattttctgctccgaaatctagctctcatagacctctgctattccacagtcacctctccaaagatgctggtggacttcctccatgagaccaagacgatctcctaccagggctgcatggcccagatcttcttcttccaccttttgggaggtgggactgtcttttttctctcagtcatggcctatgaccgctacatagccatctcccagcccctccggtatgtcaccatcatgaacactcaattgtgtgtgggcctggtagtagccgcctgggtggggggctttgtccactccattgtccaactggctctgatacttccactgcccttctgtggccccaatatcctagataacttctactgtgatgttccccaagtactgagacttgcctgcactgatacctccctcctggagttcctcatgatctccaacagtgggctgctagttatcatctggttcctcctccttctgatctcttatactgtcatcctggtgatgctgaggtcccactcgggaaaggcaaggaggaaggcagcttccacctgcaccacccacatcatcgtggtgtccatgatcttcattccctgtatctatatctatacctggcccttcaccccattcctcatggacaaggctgtgtccatcagctacacagtcatgacccccatgctcaaccccatgatctacaccctgagaaaccaggacatgaaagcagccatgaggagattaggcaagtgcctaaaggggccagcggtggcggtcgggccaggtccggggcctggggacgccgaggcggccgcggaggagcgccgcgtcaaggtctccagcctgccctacagtgtggatgcgctcgtgtcggacaagaagccgcccaaggaggcatccccagtgccggccaaaagcgcctcttccggggccaccctgcggctactgctgctgccggggcacggcgctcgggaagcgcacagccccgggccgctgatcaagcccttcgagaccgcctcggtcaagtgggaaaactccctaagacggagcggcgtggatgcaggaaccctgctgataattcgccgccgccaagacacaaaacacaagaccaatccgaagccgcgcacagcctttaccacgtcccagctcctcgctctggagggcaagttgctccagaaacagtacctctccattgcagagggtgcggacttctccagctctccgaacctcacggagactcaggtcaaaatcttgttccagaaccgaagggccaagacgaaaagactgcaggagtcagaactggaaaagctgaaaatggctgcaaaacctatgctaccctccagcttcagtctccctttccccatcagctcgcccctgcaggcagcgtccatatacgcagcatcctacccgttccatagacctgtgcttcccatcccgcccgtgggactctatgccacgccagtgggatatggcatgtaccacctgtcctaa

SEQ ID NO: 18973 - DNA, 2226 bp, Homo sapiens
  SIMILAR (62)..(688): 781254mologous to Homo sapiens MSX-2,accession number D89377,Smith-Waterman Score=776.
gtcgccgctgccgggttgccagcggagtcgcgcgtcgggagctacgtagggcagagaagtcatggcttctccgtccaaaggcaatgacttgttttcgcccgacgaggagggcccagcagtggtggccggaccaggcccggggcctgggggcgccgagggggccgcggaggagcgccgcgtcaaggtctccagcctgcccttcagcgtggaggcgctcatgtccgacaagaagccgcccaaggaggcgtccccgctgccggccgaaagcgcctcggccggggccaccctgcggccactgctgctgtcggggcacggcgctcgggaagcgcacagccccgggccgctggtgaagcccttcgagaccgcctcggtcaagtcggaaaattcagaagatggagcggcgtggatgcaggaacccggccgatattcgccgccgccaagtgagtgcgcgccggggcaggagtaggaggacatacgagccctaccacctgcaccctgaggaaacacaagaccaatcggaagccgcgcacgccctttaccatttttttagctcctcgccctggagcgcaagttccgtcggaaacagtacctctccattgcagagcgtgcagagttctccagctctctgaacctcacagagacccaggtcaacaatctggttccagaaccgaaggcccaaggcgaaaagacctgcaggaggcagaactggaaaagctgaaaatggctgcaaaacctatgctgccctccagcttcagtctccctttccccatcagctcgcccctgcaggcagcgtccatatatggagcatcctacccgttccatagacctgtgcttcccatcccgcctgtgggactctatgccacgccagtgggatatggcatgtaaccacctgtcctaaggaaggaccagattcaattaggacttccatggatgggatgcttgttttcaaagggtttcctctccctctccaagaaggcaggaccagccaatactcctgctctgctaaccctgcgtgcaccacccctaagcggctaggctgacagggccacacgacatagctgaaatttcgttctgtaggcggaggcaccaagccctgttttcttggtgtaatcttccagatgcccccttttcctttcacaaagattggctctgatggtttttatgtataaatatatatatataataaaatataatacatttttatacagcagacgtaaaaattcaaattattttaaaaggcaaaatttatatacatatgtgctttttttgtatatctcaccttcccaaaagacactgtgtaagtccatttgttgtattttcttaaagagggagacaaattatttgcaaaatgtgctaaagtcaatgatttttacgggattattgacttctgcttatggaaaacaaagaaacagacacagtgcacacagaaaatattagatatggagagattattcaaagtgaaggggacacatcatatttctgcattttacttgcattaaaagaaacctctttatatactacagttgttcctatctctccccccgccccccaccgccccaccacacacatatttttaaagtttttccttttttaagaatatttttgtaagaccaatacctgggatgagaagaatcctgagactgcctggaggtgaggtagaaaattagaaatacttcctaattcttctcaaggctgttggtaactttatttcagataattggagagtaaaatgttaaaacctgttgagaggaattgatggtttctgagaaatactaggtacattcatcctcacagattgcaaaggtgatttgggtgggggtttagtaattttctgcttaaaaaatgagtatcttgtaaccattacctatatgctaaatattcttgaacaattagtagatccagaaagaaaaaaaaaatatgctttctctgtgtgtgtacctgttgtatgtcctaaacttattagaaaattttatatacttttttacatgttgggggggcagaaggtaaagccatgttttgacttggtgaaaatggggttgtcaaacagcccattaagctccctggtatttcaccttcctgtccatctctcccctccctccggtatacctttatccctttgaaagggtgcttgtacaatttgatatattttattgaagagttatctcttattctgaattaaattaagcatttgttttattgcagtaaagtttgtccaaactcacaatt

SEQ ID NO: 18974 - DNA, 914 bp, Homo sapiens
  SIMILAR (388)..(852): 451254mologous to Homo sapiens S19 ribosomal protein,accession number M81757,Smith-Waterman Score=229.
atggagactgaggctctaatgcctggcctaggggtcgctgtggctggggcacaggtaaccttgggatttctggccctggagacccagctgccctttactggacacaagaggatccttcgcctctttttcagcagcccccgggatcccccccacgtcccctccaaaggtttgaagcggaaatggggcgcgcggcggggacgaactttcgccctgagagaggcggagcctcagcgtctaccctcgctctcgcgagctttcggaactctcgcgagaccctacgcccgacttgtgcgcccgggaaaccccgtcgttccctttcccctggctggcagcgcggaggccgcacgagccgcggccacgtgcgagcggcaggcccggacatgcccgatgcctggagttactgtaaaagacgtgaaccagcaggagttcgtcagagctctggcagccttcctcaaaaagtcttaggtccgggaagctgaaagtccccgaatgggtggatacccgtcaagctggccaagcacaaagagcttgctcccgtacgatgagaactggttctaccacgcgagctgcttccacagcgcaggcaccatgtaccatccggggtggcgctgggggtgggctccatgaccaagatctatgggggacgtcagagaaacaggcgtcatgcccaagccacttcagcccgaggctccaagagttgtggcccgccgggttcctccaaagccctggaggggttgaaaaatggtggaaaaagggaccaagaattgcgggccgcaaaacttgacaccttcaagggacaaaagagattttgggacagaattcgccggacaggtggcagctgccaacaaggaggcattagaacaaatccattgctttgggttaattaaattggctcattcgtaaaaaaaaaaaaa

SEQ ID NO: 18975 - DNA, 673 bp, Homo sapiens
  SIMILAR (150)..(494): 441254mologous to Homo sapiens S19 ribosomal protein,accession number M81757,Smith-Waterman Score=127.
  misc_feature (1)...(673): n = a,t,c or g
gcagggccggacgccgaagcctcagagcgcgtgcctgagggccccgaggcgcccggcgcgggcccgtcccgccccctagagccgcggccacgtgcgagcggcaggcccggacatggccgatgccttggagttactgtaaaaagacgtgagaccagcaggaggttcgtcatgagctctgggcagcctttctctcaaaaagtcttaggtccgggtaagctgaanggtccccgaatggttgggataccgttcaagctggccaagcacaaaagagcttgctcccgtacgatgagaagctggttctaccacgccgagcttgcttccacagcgcaggcaccatgtaccatccggggtcggcgctgggggtgggctccatgaccaagatctatggggggacgtcagacgaaacggcgtcaatgcccaagccactttcagcccgaggcttccaagaagtntgggcccgccgggttcctccaaagccctgggaggggcttgaaaatgggtggaaaaagggaccaagaattgcgggccgcaaaacttgacaccttcaagggacaaaagagattttgggacagaattcgccggaacaggttggcagttgcctacaaggaggcattagaacaaaccatggctggggttaataaattgcctcaattcgtaaaaaaaaaaaaaaaaa

SEQ ID NO: 18976 - DNA, 587 bp, Homo sapiens
  SIMILAR (425)..(15): 961254mologous to Homo sapiens Human normal ovarian tissue derived protein 33,accession number Y59756,Smith-Waterman Score= 701.
catcctgtccggttttttgtacatagagggccccatgtgatttctccttggaagtggtgagccagtggtacgagctggtggtgtttacagcaagcatggagatctatggctctgctgtggcagataaactggacaatagcagaagcattcttaagaggagatattacagacagcactgcactttggagttgggcagctacatcaaggacctctctgtggtccacagtgacctctccagcattgtgatcctggataactccccaggggcttacaggagccatccagacaatgccatccccatcaaatcctggttcagtgaccccagcgacacagcccttctcaacctgctcccaatgctggatgccctcaggttcaccgctgatgttcgttccgtgctgagccgaaaccttcaccaacatcggctctgactgggacacaggcggaagcctaggagagccgaatcagtgtttgtgaagaggcaggactggccagagtgacagacatacggtgatccaggaggctcaaagagaagccaagtcagctttgttgtgatttgattttttttaaaaaactcttgtacaaaactg

SEQ ID NO: 18977 - DNA, 1469 bp, Homo sapiens
  SIMILAR (23)..(667): 741254mologous to Homo sapiens Human normal ovarian tissue derived protein 34,accession number Y59757,Smith-Waterman Score= 727.
gtggaattcggcggagctgggccgcgggggccccggggccggcggtgccggggtcatcgggatgatgcggacgcagtgtctgctggggctgcgcacgttcgtggccttcgccgccaagctctggagcttcttcatttaccttctgcggaggcagatccgcacggtaattcagtaccaaactgttcgatatgatatcctccccttatctcctgtgtcccggaatcggctagcccaggtgaagaggaagatcctggtgctggatctggatgagacacttattcactcccaccatgatggggtcctgaggcccacagtccggcctggtacgcctcctgacttcatcctcaaggtggtaatagacaaacatcctgtccggttttttgtacataagaggccccatgtggatttcttcctgggaagtgggtgagccagtggtacgagctggtggtgttttacagcaagcatgggagatctatggtctctgctgtgggcagattaaactgggacaatagcagaagcattctttaaggagggagatatttacagacagcactgcactttggagttggggcagctacatcaaggaccctctcttgtggttccacagtgacctctccaggaattgtgatcctgggataactccccaggggcttacaggagccatccagggtacgggggaaggtgacaatgccatccccatcaaatcctgggtttcagtgaccccagcgaacacagccattctcaacctgctcccaatgctggatgccctcaggttcaccgctgatgttcgttccgtgctgagccgaaaccttcaccaacatcggctctggtgacaagctgctccccctccacctgagttggggtgggggggaaagggagggcgagcccttgggatgccgtctgatgccctgtccaaatgtgaggactgcctgggcaggagtctgcccctcccaccccgtctctgcccctggggagccatacactccacttgggagtctggatggacacatgggcccaggggctctgaaagcagcctcactccttaacttcgtgttcacactcccatggaaacccccagactgggacacaggcgggaagcctaggagagccggaatcaggggttggtgaagaggcaggactggccaggagtgacagacatacgggtgatcccaggaggctcaaagagaagccaagtcagctttgttgtgatttgattttttttaaaaaaactcttgtaccaaacttgatctaaattcttcactcctgctccaaagggctgggctgtgggtgggatactggggatttttgggccactgggattttccctaaatttgtccccccctttactctccctctatttttctcgtccttagacgtccctcagacgctgtaaccaggctttgtgtcttttttcccttttctctcttttaccccatgcattacaactttgaaaccaaaaaaaaaaaaaa

SEQ ID NO: 18978 - DNA, 400 bp, Homo sapiens
  SIMILAR (329)..(400): 451254mologous to Mus musculus precursor (AA -23 to 57),accession number X06342,Smith-Waterman Score=60.
  misc_feature (1)...(400): n = a,t,c or g
acaagagcaggcccatattcacccacctcatccaggccttataaaagaagaggcttatatgagatcaaatggctgcctttccccacaagattatatttttcctggaatgctctactttgacacatgtggctttctcagagggaggcaggagggcccaagtcagagaagatgtgacaatggaagcagaagttagaatggtgcagtaaaannnnnnnnnnnnnnnnnnnnnnnnnnnnnnnnnnnnnnnnnnnnnncaggaattttcaataaacgtgacttcactaggtggcctaagccccgatgtaaaatgtatatcccactggaccctgattacaatgcagactgccccaatgtgacagcacctgtttgtgcctcanatggccacactttccagaatgag

SEQ ID NO: 18979 - DNA, 438 bp, Homo sapiens
  misc_feature (1)...(438): n = a,t,c or g
catcgaccgccctgcgattgagaccgtattcccgggccgacccacgcgtgcggtgacaagagcaggcccatattcagccacctcatccttgccttatcaaataagagtcttatatgagatcaaatggctgcctttccccacaagattatatttttcctggaatgctctactttgacacatgtggctttctcaaagggaggcaggagggcccaagtcagagaagatgtgacaatggaagcagaagttagaatggtgcagtaaaannnnnnnnnnnnnnnnnnnnnnnnnnnnnnnnnnnnnnnnnnnnnncaggaattttcaataaacgtgacttcactaggtggcctaagccccgatgtaaaatgtatatcccactggaccctgattacaatgcagactgccccaatgtgacagcacctgtttgtgcctcaaatggcc

SEQ ID NO: 18980 - DNA, 945 bp, Homo sapiens
  SIMILAR (181)..(897): 651254mologous to Homo sapiens p40,accession number U93569,Smith-Waterman Score=745.
atggccgaatacgaacagctctggctgcagctctcagtgagaccaacacagaagttgcacctggaacatcagcaagacagaaacgttcactcccctggaaagggggctgaagccagggagccaagtggtcttgctcagcagatcccaaccccacagagcccagcaagaaggtgggtaataacaaactcctctgaggtaaaggagcatgttctaacccaatgcaagaaagctaagaaccttgaaaaaaggttagaggaattgctaactagaataaacagtttagagaagaacataaatgacccagtggagctgaaaaacacagcacgagaacttcgtgaagcatacacaagtatcaatagccaaactgatcaagtggaaaaaagtgacagggagaatgcaaccaagttggaaaacacacttcaggatattatcctggagaacttccccaacctaacaagacaggccaatattcaaattcaggaaatacagagaacaccacaaagatactcctcgagaagagcaactccaagacacataattgtcagattcaccaaggtcgaaatgaaggaaaaaatgttaagagcagccagagagaaaggtatggttacccacaaagggaaggccatcagactaacagtggatctctctgtggaaatgctacaagccagaagagagtgggggacaatatttaatattcttaaagaaaagtattttcaacgacgaatttcatgtgaagccaaactaagcttcataagggaaggagaaataaactcctttacagacaagcaattgctgagggattttgtcaccaccaggcctgccttagaagaactcctgaaggaaccactaaatatggaaaggaaaaatcactaccagccactgcaaaacaaaccaaaatgtaaagaccatcagtactatgaagaaactgcatcaactattgggtga

SEQ ID NO: 18981 - DNA, 675 bp, Homo sapiens
  SIMILAR (152)..(343): 601254mologous to Homo sapiens Human secreted protein sequence encoded by gene 11 SEQ ID NO:72,accession number B24447,Smith-Waterman Score=187.
atggaagaaatagaagatgcaattaagaaacaaatggaggatttgctggcaagatggccaaataggaacagctccaggctgcagctcccaaccaagagattccctctggtgcctacgccaccaaggtcctgggttttaagcacaaaactgggtggccgtttgggcagacaccgagctagctgcaggagttttttttctataccccggtggcacctggaatgtcagcaagacagaaccattcactcccctggaaagggggctgaagcccagggagccaagtggtcttttctcagcaggtcccaaccccatggagcccagcaagctaagatccactggctggaaattcttcactaccagcacagcagtctgaagtcaacctgggacacttaggcttgatgggggcaggggcatccactcttcactgatgcctgagtaggcggttttctcctcacagtgtaaataaagccgctgggaagtttggagctggcagagcccactgcagtgtggcaaagctgctgtagccagactgcctctctagattcctcctctctgggcatctctgaaagaaaggcagcagtcccagtcagggccttatagataaaactcccatctccctgggacggagcacctgggggaaggggcagctatgtgtgtagtttcagaagatgtaaatgt

SEQ ID NO: 18982 - DNA, 779 bp, Homo sapiens
  SIMILAR (364)..(546): 361254mologous to Rattus norvegicus monitor peptide precursor,accession number M22162,Smith-Waterman Score=107.
atgaaaagaatgaatgaaggtgtagatccccaagatccacaaccagaaatcacaagtacagaacctccaggtctgtctcttcctgctggaacaggacacatcagaggggttggttccggagagggatcaaactcagaaacagccattaaaactcctggaacagcagctcttctcaaggctagttgtgacagactcctggaacagcagctcttctcaaggctagttgtgacatccaaagtgacaagagcaggcccatattcagccacctcatccagcaagaatttcaagccagtggatcttagcttgctgggctctgtggggatgggacctgctgagcaagaccacttggctccctggcttcagccccctttccagccccgatgtaaaatgtatatcccactggaccctgattacaatgcagactgccccaatgtgacagcacctgtttgtgcctcaaatggccacactttccagaatgagtgtttcttttgtgttgaacagagggaatttcattatcgtataaaatttgaaaaatatggaaaatgtgattaatgggtaccagagtaactacacttgcttattctttttctacttaattcagaatagtatttcttttagagtgtgagaatgtaaattaaataacatccctatgctggacttaaatgtcgaacaaaatgagagacaaaaatgaaggaatcaaactgacaagaaccaaatatcacatttgttacaaataaacaacaaaaaagcccaaaaaaaaaaaaaaaaaaaaaaaaaaa

SEQ ID NO: 18983 - DNA, 410 bp, Homo sapiens
aaaaagtagtgtaagttctgtccatgattctttacctagtgaatgggaaagtaatagaaacaattttcttcttaaaaaggaaggtttgttattgcactgacttttacaacctgacatagtaatttagaaaaatcatgtagtaaaatctgtaaaattaaaatataaaagtctggtttgtaaacatcagttggccaagtctattcagagtccttcatgatagtggaatggaatgaataattaattcactaccttatttatttgctgtcataatacagaaaaaacatttatccactgtggaaagagaccctgaagagaatgtggcaaaggcatagagaacaagttggatcttttgaaaaagttaatgatatcaaaatacttttccatcactggtaaaccaagctaggtcaagt

SEQ ID NO: 18984 - DNA, 613 bp, Homo sapiens
  SIMILAR (220)..(71): 301254mologous to Homo sapiens Human breast tumour-associated protein 74,accession number Y48613,Smith-Waterman Score=77.
  misc_feature (1)...(613): n = a,t,c or g
ataaantatcactcccactgagcccgggatataactcatggactacagatacatgaggttcctacctgtcaaacaatgctttaaatattttttctgggaaaaaaggaaaaaacacaatatatgagaagatgcaaaggaaaggcagaaatgtgaatttatgcatctagttccacaatttaaaataaatatcaaactgacaatataaagctaagtgacaatgacttaaccattgggcaccaaacaggcaatacaactgctcactgtaatacataatgctcttcaggagtttccagcagatggccatcacaacaatactgtcataatacagaaaaaacatttatccactgtggaaagagaccctgaagagaatgtggcaaaggcatagagaaaaagttggatcttttgaaaaagttaatgatatcaaaatacttttccatcactggtaaaccaagctaggtcaagtatatgtcccaaagcagcactgaattcagagtaagaggttggcagaaaagtttggaaaactgcagtttttaaaaattggcaatttctccatgcttaataaaactatcagaagaggtataatgtttgttcgtttgtggaatgttgactgctt

SEQ ID NO: 18985 - DNA, 639 bp, Homo sapiens
  SIMILAR (160)..(516): 531254mologous to Homo sapiens HDCMB45P,accession number AF068294,Smith-Waterman Score=278.
atgctccagcgggcgtgcccggccgcggagggggacccccggagcgtcgtcccttcccggagcggggccgcggcagcgctcaccgtcttcgtggtgaagggggagcttcagcgggttctccagcagggacctgagcacgccgtagggaggcgggataaagatgaacaaaggaagtgctttcctgagatggaatctactcctagtgatgatgctgtgttcattgttgaaacgccagcaaaggatttagaatattacataaacttagttcgtatagcagtggcaggctttgagaggatcgactccaattttgaaagaggttctactgtgagtaaaatgctatcaaataacaccgcgtgctacagaaaaatgtttcctgaaacgaagagtcaattgatgcagccaacttcattgtcgtgttattttaagaagactgccacaaccaccccaagcttcagtaatcaccaccctgatcgattagtagccaccaacattaagtcaagacccatcataagtaaaagtggcccactaaaggctcaggagtttccagcagatggccatcacaacaatactgtcataatacagaaaaaacatttatccactgtggaaagagaccctgaagagaatgtggcaaaggcatag

SEQ ID NO: 18986 - DNA, 352 bp, Homo sapiens
  SIMILAR (164)..(247): 501254mologous to Homo sapiens Human secreted protein HYACI76, SEQ ID NO:133,accession number Y86218,Smith-Waterman Score =67.
aatttgcatagccaaatgctatggaaccaaagaataagatgactcacatctgtttaacttgaactcttatgcaaaaatcctaatcgtgtcgcaacacgggaccagttactgtgtctatcgggtcatttgggaatgggcaggatactggagctgggaggctaatggggtccagagctgcataatggggatcggatgttggtactcctcccagggagctctcaggacagctgtttgtcgtgggctcccaagtgcctaggccatgccttacgactgctgcacttaccatttgtcatatgatggcacttgactacatatggctttagaaataaaataaccctcaaaactaaaaaaa

SEQ ID NO: 18987 - DNA, 748 bp, Homo sapiens
  SIMILAR (5)..(220): 371254mologous to Homo sapiens putative p150,accession number U93570,Smith-Waterman Score=107.
atataaaaataccatcacagactactacgaacacctctatgcacacaaactagaaaatctagaagaaatgaataaaagaagagctagtaccatctgtactgaaactattccaaaaaaactgaggaggagggactcctccttaactcattctatgagagccaggagactgagtgtggacgtgaaacctcaggacaggtcacggggtccatctgaatgcactatattcagggcaggtgtcccagagggaacaagaggggccttgtggctgcctcacttccaaacagaaagtgacccaggctccaagcctgcaatcacgcttcttgttattcatccagatgaattgcaaatttatgtccgcacaaaaacctgcacagatgttcatagcagctttattcataattgccaaaacttagaagcaaccaagatatccttcatgtttgataacaagcacctgacgcgtggcgtgatgccagcctccccagggcgctttggtctggaaacagctgtgagtaatctggagcacccagagcagaaagctttatcagtcagcctgccccaaaagctgctgcgaaaactatctgctggtgcagtcatgcctccaactgccctatttttagtgaaacgcactttccagggctgtgcttctgatgaaggagcaagccgacttggtcttaagacatacatagtcagtgacaaccaagccacttccactcgtctgcctgatttagggttttctgcaggtttatga

SEQ ID NO: 18988 - DNA, 1544 bp, Homo sapiens
  SIMILAR (1111)..(1173): 711254mologous to Homo sapiens ORF 3,accession number M69297,Smith-Waterman Score=76.
ggcacgagttttttacattaagcaaaataatggttactaataagtttcttaatttagcagtctgaaacacaattagatatacaattttggtctgcagtgggaagggggctggtaatctgaatctgattttcagatagctctgtttttttggccaacatgctccaatttactgcagtctccgccactccctattgtcctacactaggcctgcttcactcatttgttgcctacctggctctcataggtatcttgagtttgtacttcttttactaaagcatcaccggctccatgaagacctcaaccactgccccattggcagcaggtctggcagagatgtcagatcccagacaactcaggaacagcatgtcattgccatgccattcccactcaggaaactcgagcctcttcattcagggttgtatagccacagctgctgttcacggtacctggcaggctggttggctcttgccacaggcggggcagccaggagccctcctgctatttccatccttcagcctcaggagccatcagtcactcccagtgatactcagagagcctgtggaaggagcactgaggcgtttgagagcaaagagcagaaagccagcgtcagagtggaaacaaccgtgtccttcagctgttccatcaaggtcgatgggggcctcctagaacctaaaagagcagatacagggtggcatgggcatcactgccgccctgcatccataacacctgctggctgggtaccagccaggtatcttctctacgtatttttcagcagacaatgtgtactttctatggtctgtggtccacagtataccaggggagagattcctggtgctgtactgaaggaagaatgcctgccctccttgctcacagggaggtttgatttgagtggcagagccaggagactgagtgtggacgtgaaacctcaggacaggtcacggggtccatctgaatgcactatattcagggcaggtgtcccagagggaacaagaggggtcttgtggctgcctcacttccaaacagaaagtgacccaggctccaagcctgcaatcacgcttcttgttattcatccagatgaattgcaaatttatgtccgcacaaaaacctgcacagatgttcatagcagctttattcataattgccaaaacttagaagcaaccaagatatccttcagcaaataccttacttctctaaagcctgtttctctcgtctttaaaatggaaataacagtatatcagtctcataagattcgctgctgcctggaacagtgtaagaactcaataaatggtagttttgagggttattttatttctaaagccatatgtagtcaagtgccatcatatgacaaatgtgcccaacaccaaatagtggaagcagaaagaaatgtcaatggctgcaagggcacggggggaaccatcactgctatatgccttccactggaagtgagactggaagggtatcaggctggatttgttgacacctttgatgattctgtaggaggctttgccaatgtcttatattttgaaattcatggcaagacataa

SEQ ID NO: 18989 - DNA, 509 bp, Homo sapiens; identical to SEQ ID NO: 7578
  SIMILAR (3)..(203): 1001254mologous to Homo sapiens PGP 9.5 (AA 1-212),accession number X04741,Smith-Waterman Score=355.

SEQ ID NO: 18990 - DNA, 1213 bp, Homo sapiens
  SIMILAR (136)..(771): 461254mologous to Rattus norvegicus ubiquitin carboxyl- terminal hydrolase PGP9.5,accession number D10699,Smith-Waterman Score=326.
  misc_feature (1)...(1213): n = a,t,c or g
atgcagctcaagccgatggagatcaaccccgaggtgagcgccaggtgcaccgctacccggagagcgcgaggccgagggagggggagccgagtcgctgatcggttcggttttgcctttttctttgcatttgcctttcagatgctgaacaaagtgctgtctccggctgggggtcgccggccagtggcgcttcgtggacgtgcctggggctggaagaggagtctctgggctcggtgccagcgcctgccctgcgcgctgcctgcctgcctgtttcccctcacggcccaagcatgagaactttaaggaaaaagcagattgaagagcctgaagggacaagaagttagtcctaaagtgtacttcatgaagcagaccattgggaattcctgtggcacaatcggacttattcacgcagtggcccaataatccaagacaaacttgggatttgaaggatggatcagttcttgaaacagttttctttctgaaacaaaaaaaaatgttcccctgaaagacagagcaaaatgcttttgaaaagaattgaggccatacaagcagccccatgaatgccgtggaacaaggaaaggccaatgtcgggtagatgacaagggtgaatttccatttttattctggttaaccaaccgtggatgggccaccttctatgaacttggatggaccgaatgccttttccccgtggacccatggcccccagtncagggggacaccctgcttgaaggacgcttcccaaggtcttgcaggagaatttcaccgaggcgtgagcaaaggagaagtcccgcttcttctgcccgtggcttctcctgcaaaggcagccttaatgctctgtggggagggacttggctgatttcccccctctcccctcaacatgaaaatatattacccccccatgccagtctaaaatgcttcagtacttgtgaaacacaggctgttcttctgttctgccagacacgcccttcccctcagccacaccccaggcacttaagcacaagcagagtgcacagctgtccactgggccattgtggtgtgagcttcagatggtgaagcattctccccagtgtatgtcttgtatccgattatctaacgcctttaaatggctactttggtttctgtctgtaagttaagaccttggatgcgcgtttaattgtttgtcctcaaaaggaataaaactttttctgctgataagataaaaaaaaaaaaaaaaaaa

SEQ ID NO: 18991 - DNA, 450 bp, Homo sapiens
  SIMILAR (84)..(449): 591254mologous to Homo sapiens ECSIT,accession number AF243044,Smith-Waterman Score=309.
  misc_feature (1)...(450): n = a,t,c or g
tatggcagcnccagcaacaagacagagctggcctggagtccgcggctggccngnangtaggtgattgtctgacaagcagaggcatgagctgggtccaggccaccctactggcccgaggctctgtagggcctggggaggcacctgcggggcgccctcacaggaacctccatctctcaggtccctcgcctggctccctcggggcctccactgcagcgcantccnatnagctctgaacagtccctggttcccagcccaccggaaccccggcagaggcgcctggtggggaacgggacaaggcgagcttcctgcagacggtgcagaaatttgcggacacaagcgtggtaaanggnggccacattgacttcatctacctggccctgcgcaagatgcgggagtatggtgtcgagcgggacctggctgtgtacaaccagctgctcaacatcttcccca

SEQ ID NO: 18992 - DNA, 430 bp, Homo sapiens
  SIMILAR (87)..(428): 941254mologous to Homo sapiens ECSIT,accession number AF243044,Smith-Waterman Score=559.
  misc_feature (1)...(430): n = a,t,c or g
atatggcagcgcccaccaacaagacagagctggcctggagtccgcggctggccgcgtgagtaggtgattgtctgacaagcacaggcatgagctgggtccaggccaccctactggcccgaggcctctgtagggcctggggaggcacctgcggggccgccctcacaggaacctccatctttcaggtccctcgccggctccctcggggcctgcactgcagcgcatctgcccatagctctgaacagtccctggttcccagcccaccggaaccccggcagaggcccaccaaagctctggtgccctcataagacctgtttgagcaggcgcctggtggggaacgggacaaggcgagcttcctgcagacggtgcagaaatttgcggagcacagcgtgcgtaagcggngccacattgacttcatctacctggccctgcn

SEQ ID NO: 18993 - DNA, 1377 bp, Homo sapiens
  SIMILAR (1069)..(1338): 1001254mologous to Escherichia coli glutamine synthetase (AA 1-470),accession number X05173,Smith-Waterman Score=479.
atggaggagtccatcaggaacctggagcaagagatttcttttgactttggccccaacggggagtttgcttacctgtacagccagtgctacgagctcaccaccaacgagtgcgtcccaggaatgcaggggcccccactggcaggcacttggggctcatggattggccccgaccacgacaagttcagtgccatgaagtatgagcaaggcacgggttgctggcagggccccaaccgctccaccaccgtgagtgcctgcaaggcaggggagctggggcgggaagacccaggcctggcccagccgaaccctcttgagcacccgtgtgcccatccccaggtgcgcctcctgtgcgggaaagagaccatggtgaccagcaccacagagcccagtcgaaggcggcgacgcaacgtgaactgcctgaagaacgtggtgatctggtacgaggaccacaagcaccgctgcccgtacgagccgcacctggcggagctagaccccacttttggcctgtacaccacggccgtgtggcagtgcgaagctggccaccgctacttccaggacctgcattcgcccctgaagcccctcagcgactcagaccctgacagtgacaaaggttcctttgcccaaagactcaacaggtgcagcagatcccccccagccccacatcgtagggcacagggcatgtatgtctccacaccaggaatccagagtcccgatcagcaggccgccctggcccgccacaatccagcccggcctgtctttgttgagggccccttctccctgtggctccgcaacaagtgtgtgtattaccacatcctcagagctgacttgctgcccccggaggagagggaagtggaagagacgccggaggagtggaacctctactacccgatgcagctggacctggagtatgtgaggagtggctgggacaactacgagtttgacatcaatgaaggtaaagaacagcacgtcactatccctgctcatcaggtgaatgctgaattcttcgaagaaggcaaaatgtttgacggctcctcgattggcggctggaaaggcattaacgagtccgacatgcgcgccgaagattacctgcgttccactggcattgccgacaccgtactgttcgggccagaacctgaattcttcctgttcgatgacatccgtttcggatcatctatctccggttcccacgttgctatcgacgatatcgaaggcgcatggaactcctccacccaatacgaaggtggtaacaaaggtcaccgtccggcagtgaaaggcggttacttcccggttccaccggtagactcggctcaggatattcgttctgaaatgtgtctggtgatgggactgcaggacagcagattcattaaatgggggttctag

SEQ ID NO: 18994 - DNA, 2558 bp, Homo sapiens
  SIMILAR (2537)..(2094): 951254mologous to Homo sapiens huc,accession number L26405,Smith-Waterman Score=701.
  misc_feature (1)...(2558): n = a,t,c or g
tttttttttttttgcgcacaaccaacagcgctcccgccccgtttttatttgaattcggagaaccaaaggggcctggaaattccggggggggcccccccggccaaccgctggaagcccgagatcctggggaggggatgccatactgctagagatgagggaagagagccccaagcaggaaaaccattgttttgctgtacactcaaagggcatctcatgccttcagtccaccgcctcctcgggccacagcccgtgccctcgcgccggctcagcctagctctggccctgctgctgtcgcttgcaggttgtcgtcttcttcctggtgggtcctcgggcaggggcgggctcctccagccctgcagaaggatgtctggaagctccccgggttggacccggcgaagcgggaagaccacgggggattttgggccaaggtttggggttggtctcctgcaggccctggaatccacttaagccatcgtcgcctggtcatgagcacccgccatgcacatggccnaagacagggccttcctccacttcattgatgtcaaactcgtagttgtcccagccactcctcacatactccaggtccagctgcatcggggtagtagaggttccactcctccggcgtctcttccacttccctctcctccgggggcagcaagtcagcttttgaggatgtggtaatacacacacttgttgcggagccacagggagaaggggccctcaacaaagacaggccgggctggattgtggcgggccagggcggcctgctgatcgggactctggattcctggtgtggagacatacatgccctgtgccctacgatgtggggctgggggggatctgctgcacctgttgagtctttgggcaaaggaacctcccccaggaagccccacctgcccactcggctcccacagcaccccgggcttctccatctcagaaccactggctcttaaggaaactgttatctggtagatggtgaccctggcactaaggtcaggctccatgtgccgcaggccaaacatggccagctccacagggtcctggggcaggtcccggggcactgggaaggggttgacgttcatgaatcgagggaaccacagcttcaggcgcaccaacttgagcatggggtagcttttgcgtccaaagatctgaatcagcaggaactccgtctccttgttgggcatcacacctgtgaacagctttgaaaccggctgccaggattctgggtctcttgggggaaaaaggcagacgcggattccaaatcctgcccggttgccgacttgcggcgtgacctctcgcgaggtcatcccttcatccccccacccatactgaccaaaaaacttgtccttggaagtggcaaggggcagggcgatgcgggtgttgtattcgggcagccttccctctaagctggcgaggaactcgcggttagcgatgtggcacagcatctcctgcacgtcgtggccctggagctgcgcctgcagtttcagcagcttttcctccacgaggcccagcaggtttggcacatagttatctgcctggggatccagctcctttcccgcgaagcggccgtcctccacagtgatgtggatcagcttgctggccaggtgctccaggctgtccttggccacttgcatcgcccgcaaggcgcgctccagctggtccttggcctcggcgtgccgccgctcctccttcttgagacgctcctgcgcctcggcttgcagtttctgctggctcaccagcgtggcctcccccgagtacttgaggtcttccagctcccgctgcagttgttgcttctcctgcttcagcctcaccaacgtctgctcgttctcgctcttgagcgtctccaactgcgcgaaggtgtcgccctgggccaggaaccgccgcaccaacgagtgcgtctcgtcagtgccagtggcgtccttgaccttgccaaagatcacctccatctggtacatgctccagcgctgccgcagctcctcctccttggcatgcaggctgtcctggatggtgtcgtcggactgtagcagcaggtgctcgcggtgggtctgctcgtgggttgaggtcagagccagggtcagctggtggacagcgctcttgacgccgtaggccatgttgagcaaattgtccagccggaaacgctgggtctgatggtgtatggggcctgcgtaacgccgggcggatgactggtagaggtgggtgagcagcgcctgccccgtcttctgacttgggttgttcgcgaacttgactgtgatgggctcagctgcgcccagcggcttctgcccattcagtcctttgatagcctcttcggcctcaatcctcttgtcaaagcggatgaatcccacaccccgagagacacctgtgacctggtccaccaggatgcgggacgtgatgatgcggccgtactgggagaagagctgctccatctctttctggctcatggtcttggggagcccgctgacgtacaggttagcatcccggatggatgctgaactgggtctggcataggacaccatgttggccaggatggtcttgacctcttgaccttgtgatccgctcat

SEQ ID NO: 18995 - DNA, 1649 bp, Homo sapiens
  SIMILAR (226)..(1083): 731254mologous to Homo sapiens ECSIT,accession number AF243044,Smith-Waterman Score=973.
  misc_feature (1)...(1649): n = a,t,c or g
agggggatttgagaccatagtccatgtgcaggaattcgcgcccagcaacaagacagagctggcctggagtccgcggctggccgcgtgagtaggtgattgtctgacaagcagaggcatgagctgggtccaggccaccctactggcccgaggcctctgtagggcctggggaggcacctgcggggccgccctgcacaggaacctccatctctcaggtccctcgccggnctccctcggggcctccactgcagcgcagctgcccatagctctgaacagtccctggttcccagcccaccggaaccccggcagagggcccaccaaggctcttggtgccctttgagggacctgttttggggcagggcgctgggttgggggaacggggacaagggcgagctttcctgcagacggttgcagaaatttgcggacgactagcgtgcgtaaacgggggccacattggatttattttacttggccctgcgcaaaatgcgggaagtatggtgtcgagcggggaacctggctgtgtacaaccagctgctcaacatcttccccaaggaggtcttccggcctcgcaacatcatccagcgcatcttcgtccactaccctcggcagcaggagtgtgggattgctgtcctggagcagatggagaaccacggtgtgatgcccaacaaggagacggagttcctgctgattcaaatctttggacgcaaaagctaccccatgctcaagttggtgcgcctgaagctgtggttccctcgattcatgaacgtcaaccccttcccagtgccccgggacctgccccaggaccctgtggagctggccatgtttggcctgcggcacatggagcctgaccttagtgccagggtcaccatctaccaggttcctttgcccaaagactcaacaggtgcaagcaagatcccccccaagccccacatcgtaggaatccaagaagtcccgatcaagcaaggccgcccttggcccgccacaatccaagcccggcctgtcttttgttgagggccccttctccctgtggctccgcaacaaagtgtgtgtatttaccacatcctcagaagctgacttgctgcccccggaggagagggtgagggcttaaagcaaagcatgtgttggggctggggagtgggctggcactaccctgagggtgcatgggagaggctggaggagggagaccgagagagccctggcctctgaccccgcctgcactccccaccttggagtaggaagtggaagagacgccggaggagtggaacctctactacccgatgcagctggacctggagtatgtgaggagtggctgggacaactacgagtttgacatcaatgaagtggaggaaggccctgtcttcgccatgtgcatggcgggtgctcatgaccagggcgacgatggctaagtggatccaggggcctgcaggagaccaacccaaccctgggcccagattccccgtggtctttccgccttcgccgggtccacccggaagctccagacatcctctgcagggctggaggaaccgccccttgcccgaggaccaccaaggaagaagacgacaacctgcagcgacagagcagggcccagagctagtctgagccggcgcgagggcacggtctgtggcccgaggaggcggtggactgaaggcatg

SEQ ID NO: 18996 - DNA, 2876 bp, Homo sapiens
  SIMILAR (67)..(756): 981254mologous to Homo sapiens alpha-centractin,accession number X82206,Smith-Waterman Score=1181.
gaattcggggcgctacggcggacccggctgggcagttccttccccagaaggagagattcctctgccatggagtcctacgatgtgatcgccaaccagcctgtcgtgatcgacaacggatccggtgtgattaaagctggttttgctggtgatcagatccccaaatactgctttccaaactatgtgggccgacccaagcacgttcgtgtcatggcaggagcccttgaaggcgacatcttcattggccccaaagctgaggagcaccgagggctgctttcaatccgctatcccatggagcatggcatcgtcaaggattggaacgacatggaacgcatttggcaatatgtctattctaaggaccagctgcagactttctcagaggagcatcctgtgctcctgactgaggcgcctttaaacccacgaaaaaaccgggaacgagctgccgaagttttcttcgagaccttcaatgtgcccgctcttttcatctccatgcaagctgtactcagcctttacgctacaggcaggaccacaggggtggtgctggattctggggatggagtcacccatgctgtgcccatctatgagggctttgccatgccccactccatcatgcgcatcgacatcgcgggccgggacgtctctcgcttcctgcgcctctacctgcgtaaggagggctacgacttccactcatcctctgagtttgagattgtcaaggccataaaagaaagagcctgttacctaatccataaacccccaaaaggatgagacgctagagacagagaaagctcagtactacctgcctgatggcacgcaccattgagactggtccttcccgattccgggcccctgagttgctcttcaggccagatttgattggagaggagagtgaaggcatccacgaggtcctggtgttcgccattcagaagtcagacatggacctgcggcgcacgcttttctctaacattgtcctctcaggaggctctaccctgttcaaaggttttggtgacaggctcctttgttatagtgaagaaactagctccaaaagatgggaggatcaggatatctgcacctcaggagagactgtattccacgtggattgggggctccatccttgcctccctggacacctttaagaagatgtgggtctccaaaaaggaatatgaggaagacggtgcccgatccatccacagaaaaaccttctaatgtcgggacatcatcttcacctctctctgaagttaactccactttaaaactcgctttcttgagtcggagtgtttgcgaggaactgcctgtgggggagcgcgttgcgtgaatatagagtgagtgcgcacaaagcgaaggccgtgggggcccgtgggacccctgggcccagaaaggacgatgaactacccgcagtggtgatgatgcctgaggcctggggttgaccactaactggctcctgacagggaagagcgctggcagaggctgtgctccctcctcaggtgcgctctggctggctgtgggggactggctgtgggggactccgtttactaccacagggagacagagggaggtaagccatcccccgggacaccttgctgctgaccatcctaggctgggctggccccaccctcacccccacccccagggtgccctgaggccccaggcagctgctgcctccactatcgatgcctcctgactgcacactgaggactgggactggggttgagttctgtctggttttgttgccattttggtttgggaggctggaaaagcaccccaagaagctattacagagactggagtcaggagagagcaggaggccctcatgttcaccagggaacaggaccacaccggccactgaaggagggcaggagcagtcctccctctgaatggctgcagagttaatgttcccagcccagtcccctttcgggggccttgggagagtttaaggcacctgctggttccaggacctcgctttccatctgttcttgttgcaatgccatcttcaaaccgttttatttattgaagtgtttgttcagttaggggctggagagagggagcttgctgcctcctgccttgctacactaatgtttacagcacctaagcttagcctccagggccccacctctcccagctgatggtgagctgacagtgtccacaggttccaggaccatttgagattggaagctacactcaaagacactcccaccaggctctttctcccttttcctcttctcactgccctggaatcaacaggctggttgctggttagattttctgaaacaggaggtaaaatttttctttggcagaggcccctaagcaagggaggggtgttggagagccagtgcccttaagactggagaaagctgcaatttaccaagttgccttttgccactgtagctgaccaggggactaggttgtagaggtgggaaggcccctctgggctgatcttgtgccattcttgaccttggacctgcttggttaaggagggagtgggccagaccagagtgccaggagctaatggagccaggcctgacacctaggagtggtccaaaggccttcagcctagatggtgcaaagctggggccagcctgttttcaccggcaccctcacctgtgacaccaagacccaccccaatcccagacttcacacagtattctcccccacgccgtcctatgaccaaaggcccctgccaggtgtgggtccacagcagcaggtatgtgtgaaagcaacgtagcgccccgcggactgcagtgcgcttaaccaactcacctcccttctcttagcccaagcctgtccctcgcacagcctcgcacaaaccacattgcctggtggggcccagtgtactgaaataaagtcgttccgatagacacgtcaaaaaaaaaaaacccgaattc

SEQ ID NO: 18997 - DNA, 3291 bp, Homo sapiens
  SIMILAR (1570)..(3288): 1001254mologous to Homo sapiens p130=E1A-associated cyclin- binding protein,accession number S67171,Smith-Waterman Score=2959.
atgccgtcgggaggtgaccagtcgccaccgcccccgcctccccctccggcggcggcagcctcggatgaggaggaggaggacgacggcgaggcggaagacgccgcgccgcctgccgagtcgcccacccctcagatccagcagcggttcgacgagctgtgcagccgcctcaacatggacgaggcggcgcgggccgaggcctgggacagctaccgcagcatgagcgaaagctacacgctggaggatcaggactgtggctacctcgagggctttttggtcaccccgggcattgcacaggactcctgttgttgttgcgatccgggtgtgttaggtcgcagccttcggacagggcttgcagatgagaaaaatggccattctagccacttaatcgaattttttaataagatgaagaagtgggaagacatggcaaatctacccccacatttcagagaacgtactgagagattagaaagaaacttcactgtttctgctgtaatttttaagaaatatgaacccatttttcaggacatctttaaataccctcaagaggagcaacctcgtcagcagcgaggaaggaaacagcggcgacagccctgtactgtgtctgaaattttccatttttgttgggtgctttttatatatgcaaaaggtaatttccccatgattagtgatgatttggtcaattcttatcacctgctgctgtgtgctttggacttagtttatggaaatgcacttcagtgttctaatcgtaaagaacttgtgaaccctaattttaaaggcttatctgaagattttcatgctaaagattctaaaccttcctctgaccccccttgtatcattgagaaactgtgttccttacatgatggcctagttttggaagcaaaggggataaaggaacatttctggaaaccctatattaggaaactttatgaaaaaaagctccttaagggaaaagaagaaaatctcactgggtttctagaacctgggaactttggagagagttttaaagccatcaataaggcctatgaggagtatgttttatctgttgggaatttagatgagcggatatttcttggagaggatgctgaggaggaaattgggactctctcaaggtgtctgaacgctggttcaggaacagagactgctgaaagggtgcagatgaaaaacatcttacagcagcattttgacaagtccaaagcacttagaatctccacaccactaactggtgttaggtacattaaggagaatagcccttgtgtgactccagtttctacagctacgcatagcttgagtcgtcttcacaccatgctgacaggcctcaggaatgcaccaagtgagaaactggaacagattctcaggacatgttccagagatccaacccaggctattgctaacagactgaaagaaatgtttgaaatatattctcagcatttccagccagacgaggatttcagtaattgtgctaaagaaattgccagcaaacattttcgttttgcggagatgctttactataaagtattagaatctgttattgagcaggaacaaaaaagactaggagacatggatttatctgtgatagaagtattcattagagcagaagatggcctttgtagagaggtggtaaaacaccttaatcagattgaagaacagatcttagatcatttggcatggaaaccagagtctccactctgggaaaaaattagagacaatgaaaacagagttcctacatgtgaagaggtcatgccacctcagaacctggaaagggcagatgaaatttgcattgctggctcccctttgactcccagaagggtgactgaagttcgtgctgatactggaggacttggaaggagcataacatctccaaccacattatacgataggtacagctccccaccagccagcactaccagaaggcggctatttgttgagaatgatagcccctctgatggagggacgcctgggcgcatgcccccacagcccctagtcaatgctgtccctgtgcagaatgtatctggggagactgtttctgtcacaccagttcctggacagactttggtcaccatggcaaccgccactgtcacagccaacaatgggcaaacggtaaccattcctgtgcaaggtattgccaatgaaaatggagggataacattcttccctgtccaagtcaatgttggggggcaggcacaagctgtgacaggctccatccagcccctcagtgctcaggccctggctggaagtctgagctctcaacaggtgacaggaacaactttgcaagtccctggtcaagtggccattcaacagatttccccaggtggccaacagcagaagcaaggccagtctgtaaccagcagtagtaatagacccaggaagaccagctctttatcgcttttctttagaaaggtataccatttagcagctgtccgccttcgggatctctgtgccaaactagatatttcagatgaattgaggaaaaaaatctggacctgctttgaattctccataattcagtgtcctgaacttatgatggacagacatctggaccagttattaatgtgtgccatttatgtgatggcaaaggtcacaaaagaagataagtccttccagaacattatgcgttgttataggactcagccgcaggcccggagccaggtgtatagaagtgttttgataaaagggaaaagaaaaagaagaaattctggcagcagtgatagcagaagccatcagaattctccaacagaactaaacaaagatagaaccagtagagactccagtccagttatgaggtcaagcagcaccttgccagttccacagcccagcagtgctcctcccacacctactcgcctcacaggtgccaacagtgacatggaagaagaggagaggggagacctcattcagttctacaacaacatctacatcaaacagattaagacatttgccatgaagtactcacaggcaaatatggatgctcctccactctctccctatccatttgtaagaacaggctcccctcgccgaatacagttgtctcaaaatcatcctgtctacatttccccacataaaaatgaaacaatgctttctcctcgagaaaagattttctattacttcagcaacagtccttcaaagagactgagagaaattaatagtatgatacgcacaggagaaactcctactaaaaagagaggaattcttttggaagatggaagtgaatcacctgcaaaaagaatttgcccagaaaatcattctgccttattacgccgtctccaagatgtagctaatgaccgtggttcccactga

SEQ ID NO: 18998 - DNA, 6795 bp, Homo sapiens
  SIMILAR (186)..(1916): 801254mologous to Homo sapiens p130=E1A-associated cyclin- binding protein,accession number S67171,Smith-Waterman Score=2259.
  misc_feature (1)...(6795): n = a,t,c or g
gggcgggcgcttcgccgtttgaatggctgcgggcccgggccctcacctcacctgaggtccggccgcccaggggtgcgctatgccgtcgggaggtgaccagtcgccaccgcccccgcctccccctccggcggcggcagcctcggatgaggaggaggaggacgacggcgaggcggaagacgccgcgcccgcctgccgagtcgcccacccctcagatccagcagcggttcgacgagctgtgcagccgcctcaacatggacgaggcggcgcgggccgaggcctgggacagctaccgcagcatgagcgaaagctacacgctggagggaaatgatcttcattggttagcatgtgccttatatgtggcttgcagaaaatctgttccaactgtaagcaaagggacagtggaaggaaactatgtatctttaactagaatcctgaaatgttcagagcagagcttaatcgaattttttaataagatgaagaagtgggaagacatggcaaatctacccccacatttcagagaacgtactgagagattagaaagaaacttcactgtttctgctgtaatttttaagaaatatgaacccatttttcaggacatctttaaataccctcaagaggagcaacctcgtcagcagcgaggaaggaaacagcggcgacagccctgtactgtgtcctgaaatttttccattttttgttgggtgctttttatatgtgcaaaaggtaatttcccccattgattaagtgatgatttggtcaattcttatcacctgctgctgggtgctttggacttagtttatggaaatgcacttcagtgttctaatcgtaaagaacttgtgaaccctaattttaaaggcttatctgaagattttcatgctaaagattctaaaccttcctctgaccccccttgtatcattgagaaactgtgttccttacatgatggcctagttttggaagcaaaggggataaaggaacatttctggaaaccctatattaggaaactttatgaaaaaaagctccttaagggaaaagaagaaaatctcactgggtttctagaacctgggaactttggagagagttttaaagccatcaataaggcctatgaggagtatgttttatctgttgggaatttagatgagcggatatttcttggagaggatgctgaggaggaaattgggactctctcaaggtgtctgaacgctggttcaggaacagagactgctgaaagggtgcagatgaaaaacatcttacagcagcattttgacaagtccaaagcacttagaatctccacaccactaactggtgttaggtacattaaggagaatagcccttgtgtgactccagtttctacagctacgcatagcttgagtcgtcttcacaccatgctgacagggcctcaggaatgcaccaagtgagaaactggaacagattctcaggacatgttccagagatccaacccaggctattgctaacagactgaaagaaatgtttgaaatatattctccagcatttccagccagacgaggatttcagtaattgtgctaaagaaattgccagcaaacattttccgttttgcggagatgctttactataaagtattagaatctgttattgagcaggaccaaaaaagactaggagacatggggtttatctggtattctggaacaagatgcgttccacagatctctcttggcctgcatgccttgaggtcgtcactttttcttataagcctcctgggaattttccatttattactgaaatatttgatgtgcctctttatcatttttataaggtgatagaagtattcattagagcagaagatggcctttgtaagagaggtggtaaaacaccttaatcagattgaagaacagatcttagatcatttggcatggaaaccagagtctccactctggggaaaaaattagagacaatgaaaacagagttcctacatgtgaagaggtcatgccacctcagaacctggaaagggcagatgaaatttgcattgctggctcccctttgactcccagaagggtgactgaagttcgtgctgatactggaggacttgggaaggagcataacatctccaaccacattattacgatagggtacagctccccaccagccaggcactaccaggaagggcggctatttgttgagaatgatagcccctctgatggagggacgcctgggcgcatgcccccacagcccctagtcaatgctgtccctgtgcagaatgtatctggggagactgtttctgtcacaccagttcctggacagactttggtcaccattgcgacccggcatgtgccacagccaacaatggcaaaacggtaaccattcctgtgcaaggtattgccaatgaaaatggagggataacattcttccctgttccaagtcaatgttgggggggcaggcacaagctgtgacaggctccatccagcccctcagtgctcaggccctggctggaagtctgagctctcaacaggtgacaggaacaactttgcaagtccctggtccaagtgggcccattcaaacagattttcccccaggtggcccaacagccagnaagcaaggcccagtcctgtaacccagcagtaagtaaatagaccccaggaagacccagctctttatcgccttttcctttagaaaggtataccatttagcagctgtccgccttcgggatctctgtgcccaaactagatatttcagatgaattgaggaaaaaaatctggacctgctttgaattctccataattcagtgtcctgaacttatgatggacagacatctggaccagttattaatgtgtgccatttatgtgatggcaaaggtcacaaaagaagataagtcctttccagaacattatgcgttgttataggacttccancggcaggccccggagcccaggtgtatagaagtgttttgataaaagggaaaagaaaaagaagaaattctggcagcagtgatagcagaagccatcagaattctccaacagaactaaacaaagatagaaccagtagagactccagtccagttatgaggtcaagcagcaccttgccagttccacagcccagcagtgctcctcccacacctactcgcctcacaggtgccaacagtgacatggaagaagaggagaggggagacctcattcagttctacaccaagcattctacatcaaacagattaagacatttgccatgaagtactcacaggcaaatatggatgctcctccactctctccctatccatttgtaagaacaggctcccctcgccgaatacagttgtctcaaaatcatcctgtctacatttccccacataaaaatgaaacaaatgctttctcctcgagaaaagattttcttattacttcagcaacagtccttcaaaagagacttgagaggaaattaatagtattgatacgcacaggagaaactcctactaaaaagagaggaattcttttggaagatggaagtgaatcacctgcaaaaagaatttgcccagaaaatcattctgccttattacgccgtctccaagatgtagctaatgaccgtggttcccactgaggttagtctcttgtattaaactcttcacaaaatctgtttagcagcagcctttaatgcatctagattatggagcttttttccttaatccagctgatgagttacagcctgttagtaacatgaggggacattttggtgagaaatgggacttaactccttccagtgtccttaggaacattttaattcatcccaactgtctgtttcttccctaccattcagtggattactgtccaggctgctttaggaatccaaacttgggatttttgactctgggcaaagctttttaggaaatactgcaagaaaatgatgtggtacccccaaacgtgagccatagggaggctttctgttggacgtactcccaacagaagaactgtgtttccaagttcaatcctaccctgttttgtggtcagctgtagtcctcataaaaagcaaaacaaaaattaggtattttgtcctaaaacacctggttaggagtgtgtgatttttttgcattcctgacaaaggagagcacacccacggtttggaggtcctaggtcatatagccctcgtctcccgttccctttgtgcacatcttccctctccccattcggtgtggtgcagtgtgaaaagtccttgattgtttgggtgtgcaatagtctgagcgaacctgtataagtggaggcactttagggctggtaaaatgcatgattttgtaacccacattttgctgtatatttggtggatagcactttctaacaatggggaacttttattaaattccaaaacttccaggctaaacatccaatattttctttaatgcttttatatttttttaaaatgttaaaacccctatagccaccttttgggaatgttttaaattctccagttttttgttatatagggatcaaccagctaagaaaagattttaagtcaagttgaattgaggggattaatatgaaaacttatgacctcttcctttaggagggagttatctaaaagaaatgtctattaaggtgatatatttaaaaatatttttgggtgttcctggcagttttaaaaaaattggttggagaatttaggtttttattagtaccatagtaccatttatacaaattagaaaatgttatttaaacagctggaattatcgtatacatatctttattaatcactattgttccagcagttttcaagtcaaattaataatcttattagggagaaaattcaattgtaaattgaatcagtataaacgaaagttactaggtaacttcatattgctgagagaaatatggaacttacattgttcaattagaatagtgttctgcaaaaatatttataaaacttctcaagatactgctacgtgtaattttatatgaagataagtgtatttttcaataaagcatttataaattagcctttggttgggttatattgagaaaagggtagtttcctgcataaatggcaaagaacaatcatttattggtttattttgtctctactaaacacattagtcatttatcatttaaatacccggacttcattagaaaccgttgtaacactttttctccctcctgccataaaaatacagtaagtaagtaatttgcttaaaaaaaaacaacacaacactagggaacaagtgttctggtttcttctcactggaactaaaggacatttctcagtggatttcagtttgtaaatcaggtaagagagtgcagggctacaaatcagtggcagggctggaaggactgaggattcaaatgatcttcccacttaaaaggtggctgagctatggggacctggctctctctatacctctccctttcctaacatatatacaactgaaaccactgatttataaactattaagtagtgctgaattctgtctgctctattagtttaaatgaatgcaacttaccttaaggcattatattcagaaaattacttacttaagcctcaaggtcccccaataattttggagtactgaactagataaccacccgagagacacttctgacagaagtaatgcattacttagagacaggtttcccaaaccctgctgttagaacctatgcatacatggaaaacactggcagtcaagtcattgttcacacagttttacctcttcaggcagtcctctgccattggtcagcttgaactaggccagagtctagcaggaaaagtgcatggtgcaccagattcaccatctcttaagtcgccactgttttctcttctttactgaaaggctgtactgagccaggctttacccatgacaggccagcaacatgaacacttttattgtgctgttcttcaggcttctttttctgagtcagcatcttttctctggcttcatcatgtacagaggaattccatggagaaaagttaattgcataggggtcttctattataggttggtcaaacaagcgagcagtgcacgctataacactgtcaacaactttacttttaaaaagctgaatatctttttcatacagtactgcagcttgtgggttcagggggctcgctgtatcaatcttgtagaaaactctccttgcatacattaatgcctgccaaatatgattatggttccgcctccattttgcaaatgctctcttcacatgcagctcacctgaggtggggatcaaactaacgggtgaaaagaacgggaaatatcgaacacccaaccgtggacagtcacccatctggatagttatccagggatgtaaactgtaatacttaaatacgcccatccttggtaaagtcccatgccgtatgaatattactccaaaccacattaatgcagagcgataagatggctgcacatagacgcctggtagcttctgcttcacaaccaaggtaaattctgcaaagaagagagtattcccaggtagaagggtccataggacgcatgcgtgcccatttgttgactgtgctgctggggcaggagatgtaggcttagttatgggcaaagcatttttgggaatagaaggcagctgtttctttggtgcagttcgtggaggactggttttcacgtcccctgttaatgtcttctcttcaccttcagatcgtttgcgtacagagcttgtagacatgctccagaaagggttcataacgtgtattccaaacaaagaaagtcagtggtgtatcatccaaatcttctgtcttcggcattcactttaccccagtgccttcaatgcagagctcctggctgccaagcgccgccgcggcccgacagcatctcccaccgcagcgccagccctgcccctgcttgat

SEQ ID NO: 18999 - DNA, 1400 bp, Homo sapiens
  SIMILAR (1400)..(1089): 671254mologous to Homo sapiens ASPIC,accession number AJ276171,Smith-Waterman Score=348.
ggacggagaaggagattctggtggaggaagaggattggggggggcgggggcgggatggcaatgccagcagaggccccttggatggcctccagctttaatggcttcctcagcctcccaccgggctggctgctgctaccaccaccatctgatcgcaatccccccttgcagccgtcatcaaggcctccactgtgtgtcaggatgtggatgaatgccttcacccccttaattagtttattcttctgggcatccctggtgagctcgggagccaggaggctgcacccaatccagccacagccttgcagagagcaggcacccatgccagcacctggagctgcccgctctgcagtagcagccagcatgtctgactgcacagtggctgggccctgcactggctcacacaccccttgccactccacatctgactcgcagtctcccttggaggcgtgggatccagcctggtggtatgagctgagcgcagctgtgcccagtgcagaatgagccctcggaaaggtcattgattgttgctgttgctgctgctgctgctgttgctgttttgctgctgttattgccactactgttgttgctattgttgttgctgctgctgttgctgctgttgctgttgttgttgctgctgttgttgctgctgttgctgctgctgttgttgttgctgctgctattgctgttgtcgctgctattgctgctgttgttgctgctattgctgctgttgttgctgctgtcgctgctgctgttgttgctgctgtcgctgctgctgttgacactactgttgttgctgttgctgctgttttgctgctgttgttgccgctactgttgctgttgtcgctaccgtcgttgctactgtttttgctgttgctgctgctgctgttattgctattgttgttgttagcgtacagcacatgcatggccttcaatgaataagtctcagtgtgtgctgccattatctgtaaagtgccattaggcagattggctgtgaccacaggctgccctggctttggttgaggtggctgctgggaagattgcatgtttccagccaaaggcccttccatcagactagagcagtggttctccaccacggcgattttgctgccctctggccctggggacttttggcaatatctggggacacttttggttgtcacaaccagggaagaggtgcttctagaatctggtgggtagaggcacaggatgctgcccgccacgacgatctcaaagtccccatcatggtccacatcagtaactgccacaccatagttgagctgggtgggattactgtcatagtcaggaggcagaactgagttggtgactgcagtgaacatgggttcagcccgctgggacccctcagtgatgggcagaaaccagagcagcagcaggaacggtaacat

SEQ ID NO: 19000 - DNA, 980 bp, Homo sapiens
  SIMILAR (272)..(730): 431254mologous to Homo sapiens Human secreted protein, SEQ ID NO: 7912,accession number G03831,Smith-Waterman Score=192.
ggcacgagggacgccaccgccgaggaaaaccgtgtactattagccatggtcaaccccaccgtgttcttcgacattgccgtcgacggcgagcccttgggccgcgtctcctttgaggtaaggggcctggataccaagaagtgactgctcatctaatccataaagctatgttaacagattggaggtagtagcattttcattacaagtgactaaaagaacagctgtttacccctgatcgtgcagcagtgcttgctgttccttagaattttgccttctgtttgcagacagggtcccaaaggccagccagaaaattttcgttgctctgagccactggagagaaaggattttggttataaggggttccctgctttcacagattatttcccagggttttatgtgtcaaggggtggtgactttcacaccgccataaatggcactgggtggcaagtccattctatggggagaaaatttgaaagatgagaacttcatccctaaagcatacggggtcctggcatctttgtccatggcaaatgctggaccctaacacaaatggttccccagtttttttaacatcttgcactgcccaagactgcagtggttggatggcaagcaatgtggtgtttggcacaagtgaaagaaggcatgaatattgtggaggccatggagcgctctttgggtcccaggatgggcaagacctagcaataagttcaccattgctgactgtggacaactccgaataaagtttgaccttgtgttttatctttaaccaccaagatcattcccttctgtagcttcaaggagagcacccctccaccccatttgctcgcaagtatcctagaatctttgtgctctcgcttgcagttcccttttgggttccatgttttccttggttcccttcccatgcctaggtggattaaaaagttcccctttatgattattgaaataaaaactaaataacaattgtcaaaaaaaaaaaaaaaaaa

SEQ ID NO: 19001 - DNA, 240 bp, Homo sapiens
  SIMILAR (65)..(6): 951254mologous to Homo sapiens Neuron-associated protein,accession number B01372,Smith-Waterman Score=98.
ggatccggttgcagtgagccgagattgtgccactgcactccagcctgggcaacaagagcaaaactctgtcccccttgttgatttcttcatttaactgcattcagagattacagtttgtctcttgtgatgcatattgattgtgcttatagggctcagaacatcatttctttgaaaatggtacctatatacctcataggagctgccatgatcctctggaggccagggctgaggatttcttgg

SEQ ID NO: 19002 - DNA, 1647 bp, Homo sapiens
  SIMILAR (1015)..(1215): 1001254mologous to Homo sapiens Protein of clone CI480_9,accession number W57899,Smith-Waterman Score=366.
atgaagcctaaactgatgtaccaggagctgaaggtgcctgcagaggagcccgccaatgagctgcccatgaatgagattgaggcgtggaaggctgcgggaaaagtgctggtggaaagcattcctgagggcctggacttccccaatgcctccacggggaacccttccaccagccaggcctggctgggcctgctcgccggtgcgcacagcagcctggacatcgcctccttctactggaccctcaccaacaatgacacccacacgcaggagccctctgcccagcagttttgtagccgaattattttagtcaccggctatcgtggtaatgaactgcacgaacgttatgcgaaccagagcaatatcactattattcacaacccagattatgcgcagggtttactaacatccgtcaaggccgcagtacccgcagtgcaaacagaacattgttttctcacccacggtgacatgccaaccctcaccatcgatatttttagaaaaatctggtcgttacgaaatgatggcgcaatactgccactccataatggcatccccggccatccgattttagtgtcaaaaccatgcctgatgcaggcaatccaacgacccaatgtcaccaatatgcgtcaggcactccttatgggagatcattattccgtcgaaatagaaaatgcagaaataattttagatattgatactccggacgactttattacagcgaaggaaagacaagagtctgggccctggaagctcgaagacgtcgcggcacccggaggcaatggagggcggggctcggcaggcgccggcagctggacgtccaggttcccttcccccacccgcctgtgcccctgtgcgcatgccctgagggagagcggggtgaggggggtggctcgtcccctggacgggcggagccctctggggattgtagtgcgtgctcgacgtcaattcgtgtacctggcggctgttggcccccgtttcccagaagcccctgggccaaattggggcgttcctggatgctctgtcaaggagctgggcgtggtcatgtacaactgcagctgcctggctcgagacctgaccaagatctttgaggcctactggttcctgggccaggcaggcagctccatcccatcaacttggccccggttctatgacacccgctacaaccaagagacaccaatggagatctgcctcaatggaacccctgctctggcctacctggcgttcaaaacaggagagaaaccctatgtgtgtgccgagtgtgggaaagcctttagtggcagttcaaatctcagtaagcaccagaaaactcataccggagaaaagccctacatttgttctgaatgtgggaagacctttcgacagaagtcagagttgattacacatcacagaattcatactggagagaaaccttatgagtgcagtgactgtgggaagtctttcactaaaaaatcacagctccaagtgcatcagcgaattcacactggagagaagccttacgtgtgtgctgagtgtgggaaggcctttagcaacaggtccaatttgaataaacatcagacaacacacactggagacaaaccctacaagtgtggcatctgtgggaaaggcttcgttcagaaatcagtgttcagtgttcatcagagcagccacgcttga

SEQ ID NO: 19003 - DNA, 632 bp, Homo sapiens
  SIMILAR (6)..(323): 301254mologous to Leishmania tarentolae A 'c' was inserted after nt 369 (=nt 10459 in genomic sequence (M10126)) to correct -1 frameshift probably due to gel compression,accession number L07545,Smith-Waterman Score=96.
tttttttttttttttttccttttcatttagatttttttattcatttgcatgagataaattattttctaaaattattttttagtacagttttgctatatacccagagctcctgatatatatataccatttttattgtttttgagatattttacaattttagttttgactttggctttggagtgggttgctgagaacatagcagttgtttcactaatccccagtaaaaaccctactaggctattggttttccttcctactcttcaatgcagttagttaacatatttggacttctgaatctattttcaataatttccagttctttcaggcatcaaggttaacactcataggagctgccatgatcctctggagccaggcgctgaggatttcttgaggtgaggtccaattagctgggcatggccacactgggtctcaaccctttttctgtagggtgtctgaagccttggcagtcatctggtgaactcaagcagagctgctctgaagagatgggctggagtctagaggaaaatctggcccaggggctccccagagacacccagaaacctcaaagatttatcggtattggaatatgaaaatactcctgacaccagcggcaaaaaagccttggaagacca

SEQ ID NO: 19004 - DNA, 3524 bp, Homo sapiens
  SIMILAR (622)..(2601): 521254mologous to Homo sapiens zinc finger protein 268,accession number AF317549,Smith-Waterman Score=1841.
  misc_feature (1)...(3524): n = a,t,c or g
taatgttgccgctggtgtcaggagtattttcatattccaatatcgataaatctttgaggtttctgggcgtctctggggagcccctgggccagattttcctctagactccagcccatctcttcagagcagctctgcttgagttcacagatgactgtcaagcttcagacaccctacagaaaaagggttgagacccagggtggccatgccagctaattggaccttacctcagaaatcctcagtcctggctccagaggatcatggcagctcctatgagggatcagcgtccttcacggatgcggctatcgatttcagccgaggggaatggcggcacctggacccttctcagagaaacctgtaccgggatgtgatgctggagacctacagacacctgctctcagtagctggacccagacctttatcatttcccatgaacagggtatcaagttcctaaaccagaggtggtcatgttggagcaaggaaaggaaccatgggcactgcagggtgagaggccacgtcacagctgcccagtgtgacttatttggaaatggcttgaagcataatttagatctacacattcatgatagaaacgatgcttcaaagaatgttaagaagagtactaactatggtaaaatgtctttctatacttactgtgaatgtactccaacaggagagaaattatgggaccataatcaacatagaaaaatcatcggttataaaccagcttcctctcaagatcaaaaaatttattctggggaaaaatcctatgagtgtgctgaatttggaaagagcttcacctggaagtcacagttcaaggtacatctgaaagttcctacaggagaaaaactctatgtatgtattgaatgtgggagggcttttgtacagaagccagaattcatcacacatcagaaaacccatatgagagagaagccctataagtgcaatgaatgtggaaaatccttttttcaagtatcgtctcttttcaggcatcacagaattcataccggagaaaaactatatgaatgtagtgaatgtgggaaaggtttcccttataactcagatctcagtatacatgagaaaattcatactggagagagacaccatgaatgcactgactgtggcaaagcgttcacacaaaagtccacactcaagattcatcagaaaatccatacaggcgagagatcctacatctgtattgaatgcgggcaggccttcatccagaaaacacaattgattgcacaccgaagaattcatagtggagaaaaaccatatgaatgcaataactgtggcaaatccttcatttccaagtcacaacttcaggtacatcaacgtgttcacacaagagtgaagccctatatatgtaccgaatatgggaaggtcttcagcaataattccaacctcattacacatgagaagattcaaagtagagagaaatcttccatatgtactgagtgtgggaaggcctttacctacaggtcagagttgattattcatcagagaattcacactggagagaaaccttatgaatgcagtgactgtgggagagccttcactcagaagtcagcactcacagtgcatcagagaattcatacaggagaaaaatcgtatatatgcatgaaatgtggactggccttcatccggaaggcacacttgattacacatcaaataattcatactggagagaaaccttataaatgtggtcactgtgggaaattgtttacttccaagtcacaactccatgttcataaacgaattcacacagggagaaaagccctatatgtgcaataaatgtgggaaggcattcaccaaccggtcaaatctcattacacatcagaaaactcatacaggaggagaaaatcttgtatatgttccaaatgtggaaaggccttcacccagaggtcagacttgattacacatcagagaatccatactggggagaagccttatgaatgcaatacttgtggaaaagcctttactcagaagtcaaatcttaatatacatcagaaaattcacactggagagagacagtatgaatgccacgaatgtgggaaagccttcaaccagaaatcaatactcattgttcatcagaaaattcatacaggagagaaaccctatgtatgcactgagtgtggaagagctttcatccgcaagtcaaactttattactcatcaaagaattcatactggagagaagccttatgaatgcagtgactgtgggaagtcctttacctccaagtctcaaatgactgcagcactgagcctgttcactcaggatagaaaccctatgtgtagtgccgagtgcgggaaggcctttagtggcaggtcaaatctcagtaagcaccagaaaactcataccggagaaaagccctacatttgttctgaatgtgggaagacctttcgacagaagtctgagttgattacacatcacagaattcatactggagagaaaccttatgagtgcagtgactgtgggaagtctttcactaaaaaatcacagctccaagtgcatcagcgaattcacactggagagaagccttacgtgtgtgctgagtgtgggaaggcctttagcaacaggtccaatttgaataaacatcagacaacacacactgggagacaaacccctacaagtgtgggcatctgtggggaaaggctttcgtttcaggaaattcagtgtttcagttgtttcttcagaggcagccacggttttgaggaggaaacagtgtgagaaaacccccctgagggttggggtcctgattgtaccacctgttgccaccncatgccagccagaaaaatatgtatattattgtaaatagaaatgaccccacatcagaatgtccaccacatggcctgttcctggagagggccctctgagaaggcacctgaatgaggcgagggaccccttccctacattgtcacccatcccccagtaaaccttgggtcattattcatactgacaaggaaccgagtcaatttggtgaataggaaaagccttctcatgaaaactacaatagaatactgttaccaaattcttcataagaaagatcatattatgggaatgataatcctgtttactgtggattaggtatagtgccaacagtttgaatggtaagacaacataatacgtagttattttgatagtgatgaatcctaagttatgtgagttgttcgttgtggaacacattgtgtaacagactcctgggtgtttttctttctcattcgaatctaccacagttggtcatatccaaccctcattcagtatttctatcaagaaagagatgctacaaaaaaaaaaaagaaaaaacctttatgtatacagacgtaaacctcagaatgtatgttgagtccccactgtcatctaccaagacttgcacccccctcattatctaccatgactgtctctcagcctcacgggccctcagcactttgtgttttgacccccagcaccgtgtcttgtgaactcccatcaccttcaagaaagcttccgaggtaagaattttatggtcatctgggacaacttaaatctccctt

SEQ ID NO: 19005 - DNA, 484 bp, Homo sapiens
  SIMILAR (33)..(170): 951254mologous to Homo sapiens dJ343K2.2.3 (ribophorin II (PUTATIVE partial isoform 3)),accession number AL031659,Smith- Waterman Score=221.
  misc_feature (1)...(484): n = a,t,c or g
ctgatcctctcgccgttgcttctgctcttcgctctgctatgctgggactcatgtatgtctactggactcagctcaacatgttccagaccttgaagtacctggccatcttgggcagtgtgacgtttctggctggcaatcggatgctggcccagcaggcagtcaagagaacagcacattagttccagaagaaagatggaaattctgaaaactgaatgtcaagaaaaggaggtcagganccattcccagtatgagaagaaaaatggaaaaaaaaaanctttatttaaaaaagaaaaaagtccagattgtagttatacttttgcttgtttttcagtttccccaacacacagcagatacctggtgagctcagatagtctctttctctgacactgtgtaagaagctgtgaatattcctaacttacccagatgttgcttttgaaaagttgaaatgtgtaattgttttggaataaagagggtaacaatagga

SEQ ID NO: 19006 - DNA, 433 bp, Homo sapiens
  SIMILAR (262)..(432): 961254mologous to Homo sapiens Human secreted protein, SEQ ID NO: 4272,accession number G00191,Smith-Waterman Score=279.
cccacgcgtccggcaaggccctgtgagcgttaggactgggatcccggccgcggctgctggaagcgtcgaagctcaccggggccgcggacactgacctgtgcttagaactcatcctggcccgcaaagcctgccgcgagtccctggcgtgccctgtggcgggctcttggagccactttcccgagcggaagtcagtccgcggctcggactccggcgggacctgctcggaggaatggcgccgtcgggttcaagcacgtgtcttccatgttggccctgacaatcatagccagcacctgggctctgacgcccactcactacctcaccaagcatgacgtggagagactaaaagcctcgctggatcgccctttcacaaatttggaatctgccttctactccatcgtgggactcagcagccttggtgctcaggtgccagatg

SEQ ID NO: 19007 - DNA, 706 bp, Homo sapiens
  SIMILAR (196)..(639): 731254mologous to Homo sapiens ribophorin II,accession number AJ237734,Smith-Waterman Score=451.
tcagcatcttttcacatgggagtgttgtaccgaagttttgcaaacatttcatcctggtgtctggggattagagggggatgagcatgtgcgaggcggaggtgactttggcagctgctccgcattctgtctttgccatgcctgccacaaattgccaagacctgttctaaaactctgtgtctgccaattctttcttagatctctatttcaaatgagaccaaagatctgcttctggcagctgtcagtgaggactcatctgttacccagatctaccatgcagttgcagctctaagtggctttggccttcccttggcatcccaagaagcactcagtgcccttactgctcgtctcagcaaggaggagactgtgctggcaacagtccaggctctgcagacagcatcccacctgtcccagcaggctgacctgaggagcatcgtggaggagattgaggaccttgttgctcgcctgggatgaactcgggggcgtgtatctccagtttcgaagaaggactgggaaacaacagcgttatttgtgggctgccacctacaagcttcatggatcatgtggggactgagccatccattaaggaggatcaggtcatccagctgatgaaccgcgatcttcagcaagaagaactttgaagtccctctccgaagccttcagcgtgggcctctgcagctgctgtgctctcgcataatcgctaccacgt

SEQ ID NO: 19008 - DNA, 2535 bp, Homo sapiens
  SIMILAR (281)..(2149): 501254mologous to Homo sapiens ribophorin II,accession number AJ237734,Smith-Waterman Score=1076.
  misc_feature (1)...(2535): n = a,t,c or g
tggtgtcgcaaggctgctggaagcgtcgaagctcagcggggccgcggacactgacctgtgcttagaactcatcctggcccgcagagcctgccgcgagtccctggcgtcccctgtggcgggctcttggagccatcgcccgcgggaggttactagtcgccgctcgagagccggccaggcgggatccccttcccctgcgggacaggggcatgggcacaagctctggatcatcattgggactgtgtatagcaccttggaagagtgtagagtgtactgaatggttgtttccccccaaggttcaagcactgtcttcctgttggccctgacaatcatagccagcacctgggctctgacgcccactcactacctcaccaagcatgacgtggagagactaaaagcctcgctggatcgccctttcacaaaacgcctttgcttttcctggttcactacatgtgtcaccacttaacattgacttttccccactgtgtagaaagcatgtacctacatcagatctaagtctttgccatgcctgccacaaattgccaagacctgttctaaaactctgtgtctgccaattctttcttagatctctatttcaaatgagaccaaagatctgcttctggcagctgtcagtgaggactcatctgttacccagatctaccatgcagttgcagctctaagtggctttggccaagtacgggaaggggtgagtggatgaaacaagacttgccattcattggggttctactctttaccttccagaacagttgacagtggttcgtgcatctcatttctgctgttacttgacatccagcatatttctgttttgttatggcaggaccttgttgctcgcctggatgaactcgggggcgtgtatctccagtttgaagaaggactggaaacctctacagcagtggccctcccaccttcccagcagaggaagagaaacagctgcatttcgcatttctttcaggatcaggtcatccagctgatgaacgcgatcttcagcaagaagaactttgagtccctctccgaagccttcagcgtggcctctgcagctgctgtgctctcgcataatcggcaccccagaaacaaaattctctgctcctgtagcctttgttgtaacaaataattttttatttatttccagttgcaagtcaccaatgttctgtctcagcctctgactcaggccactgttatagctcctgtttgttatatccatgactttcctacctgagttcttgctaagcccattgtcattcttaacagggatgtttttgaactaaatttcatgaacgtcaaattttatatctgcatgtgaattcctgaacacccaccaattgacctggcaactgtcttctctattttcctctagctcagagtcaagatctccactgatatattttctgcctgttctcagagatatactgatcctctctgaagactaactctatatgcctctttcagggtgacatacccagccaaagccaagggcacattcatcgcagacagggattcaatgttaggcccagggagaatcttgaaattatcagatgaaagattgtattattcttccatctagacatttgtccgactccataaccagaagactggccaggaagtggtgtttgttgccgagccagacaacaagaacgtgtacaagtttgaactggatacctctgaaagaaagattgaatttgactctgcgaatattatctattgagtttcacccacttctctgcccctgtgcttttacagactgtccttatttttctaggctgatgtggtcatcaaccccggtatacatggctgcccctactgggaagggcacattcttaagtcttcttggtgtgtctttcggcagcacctgttccgcgagcctgagaagagttggcatggcttgtgttgcttcccttttaagttctaatgcctttttaatttatttctccccatcattcagtggatcctaactttcctcaaccgcagggcatcattatgtttcatttaattggatgtcatgacacctcttcttgcagctatgctgggactcatgtatgtctactggactcagctcaacatgttccagaccttgaagtccctggccatcttgggccantgtgacgtttctggcctggcaatccggatgctggccccagcaggcagtcaaggaggatcgctgcagagcagagcagtagattggcaaaatataggacactacgaacagcacattagttccagaagaaagatggaaattcttgaaaactgaatgtcaagaaaaggagtcaagaacaattcacagtatgagaagaaaaatggaaaaaaaaaactttatttaaaaaaagaaaaaagtccagattgtagttatacttttgcttgtttttcagtttccccaacacacagcgagatacctggggagctcagatagtctctttctctgacactgtcgagagacgctgtgaatattcctaacttacccagatgttgcttttgaaaagttgaaatgtgtaattgttttggaataaagagggtaacaatagg

SEQ ID NO: 19009 - DNA, 879 bp, Homo sapiens
  SIMILAR (3)..(383): 421254mologous to Homo sapiens dJ343K2.2.2 (ribophorin II (PUTATIVE partial isoform 2)),accession number AL031659,Smith- Waterman Score=160.
tccctaggaaagaagctccctcgacgttcttgtcccagaccttttcactccaaaacaggaaattcagccacctgttcccgcgagcctgagaagagggccccccaccgtggttgtccaatacattcactgccctgatcctctcgcccgttgcttctgctcttcgctctgtggatccggattggtgcccaatgtctccaacttcacttttggcctccctagcacgattaattttccactggggaccatgctgctatgctgggacctccatgtatgtttactgaactcaggctcaaccatgttcccagacccttgaagtcccctggcccatcttgggccagtgtgaccgtttcctggctggccaatccggaatgctggcccaacgcacggcagtccaagagaaccagcacaattagttcccagaagaaagatggaaattcctgaaaactgaatgtcaggaaaaaggagtcaagaacaattccccagtatgagaagaaaaatggaaaaaaaaaaaactgtatttaaaaaagaaaaaagtcccagattgtagttatatttttgccttggtttttcagtttccccgaacacacagcagatacctggtgagactcagatagtctctttctcctgacactgtgtaagaagctgtgaatattcctaacttacccagatggttgctttttgaaaaagttgaaatgtgtaattgttttgggattaaaggagggtaacaaataggaacaaaaaaaaatttaaaaaatgggggccctctttaaaggataccttcagggggcccactttcccctgggtatgccaaaccaatcttactccctttttcgaggcttatttacacgacgagactgtgcccctactcacaaacgcggg

SEQ ID NO: 19010 - DNA, 679 bp, Homo sapiens
  SIMILAR (8)..(409): 381254mologous to Homo sapiens ribosomal protein L23a,accession number U02032,Smith-Waterman Score=114.
cggccgcgtcgacccgaaagcgaagaaggaagctcctgcccctccgtaaagcttgaagccaaaggcgtaggcctttaaagggccaagaaaggcagtgttgaaaaggtgtcccacagcccacaaaaagctggaagatcccgcacgtcgaccccacctttccgggcgggccgaaagacaactgcggactcccggagaccagcccccaaaatcatcctccggaagagccgcgtcccaggaggaaacaagcttgacccactatgcgtatcatcaagtttcccgctgaccactgatctgcctctgccgtgaagaagatagaagacaaccaacacactttgtgttcattgtggatggttaaaagccaacaagcaccacgattaaacagggctgtgaaagaagcttgtatgacatttgatgtgggccaaggtcaacacccctggattcggcctgattggagagaagaaggcatattgttcgacttggctcctggattacgatggctttgggatgtttgccaaccaaaattggggatcaatctaaacttgagtccagcttgcctaatttctgaatatatatatatatatatatatccttttcaccatatacatgcctgtctgttcatttctggttgggctgggaaggcacacacacacactgacatgacaggggctttggcaagact

SEQ ID NO: 19011 - DNA, 1144 bp, Homo sapiens
  SIMILAR (237)..(797): 401254mologous to Homo sapiens bA371L19.2 (novel protein similar to 40S ribosomal protein S10 (RPS10)),accession number AL118502,Smith-Waterman Score=148.
  misc_feature (1)...(1144): n = a,t,c or g
tttctgaggcgttcgagctccatcggctcccatccgggctatcctgccgtcttatcggctgcttctcccacaggatgcgggcagggggcctctctcccactccccacacagggatttctgagtagcgacaggggctggaggcttattttatggggtagggggccgctggtaggcgaagattgcccgagggagagggggaggatgaagccagtgcgtggcggagacttgccagatgtttgatgcctaagaagaaccggattgccatttatgaaactcctttttaaggaagggagtcatggtggccaagaaggatgtccacatgccctaagcacccggagcatggcagaagtcaagaatgtgccccaacccttcatggtcatgaaaggccatgcaggtctctcaagtccccgaggcctacgtgaaaggaaccagttttgccctggagacatttcctaactggtacccttacccaatgaggggtatcccagtattctccgtggattacccttcatcttgcccccgggagatttgtgccctgcccacccctacggcccgtagcccgtcccaggaggatgggcaggccttcggcctaaaaaggtcttgggaggggttgaggcgacctggcgaggatttcacaagaggggggaagtttgacagaggttaccttacaagacggagtgcttgttgccaacttggtgcccgacaagaaaagccgaggctgggggcttgggtcaagcaacccgaatttccagtttagaggcaggatttgtgttgtggacgtggtcaagccacctcagtagtaaaatttggagagagattctttttgcatttgaattaaactttacagccaaaacgccttatggggggccccctttaaggagcccacttttatccccccggggtggccgacgaaaaatttttttataggggccccaaaaataaatcccggggccccgttttaaaaccgctgggagggggaaaacccgggggtacccacatttaatccccttgggacaagaattnaaacagnntntgtnaaccctatttacttcttaattgtactttgcgcatttggaggaaaaacccgcctggggagctacacactcacatgaaaactgtgcaaacgagtactaggcttgactct

SEQ ID NO: 19012 - DNA, 1226 bp, Homo sapiens
  SIMILAR (550)..(753): 471254mologous to Homo sapiens adrenal gland protein AD- 001,accession number AF110774,Smith-Waterman Score=99.
tcagtgcggtggaattccccacgcctcgttggcagtgggtgctggacctgcgacgcaactacaaatggggcggagctttcggcactggagcagctaatttgcatataggaatgaggtgcggctcggcttccatgggcctaatttacagatagggcggtatttctgccccttaaccgaaagtgggatacagaggacgacggtgttaggcgcctgtgtaggagtaaaatgtgtttattttgcattcaacgagagctcctgcattgcagctattttgcatatgatttgcatcttacgaagaatttgtggcaaaaaaaagctgggcgtgcgccgtaggaacctcctgctgagacgcttccggtagcggcgcgtgacccgacaggtctttcacctacctacctcagctcccacaaacacgagaagttccagcaagttcgccactttccggttcttctgggttatccaatagcatcgagtggagcatccccggaagtgaggcagcggaggacgacctttttccggttccggcctggcgagagtttgtgcggcgacatgaaactgcttacccacaatctgctgagctcgcatgtacccgccggcggcagtcttcccttttcgggcgggatggtgggccggggtccagtgcttgcctaaactcctccgccctgcaggccaccgagggtcggtatctgccctgtggaaatcaacccccaacttcgtgggcgcgtaatgataccctaaaagtggaagtggtcgggcgttccctggaagccggccccgataaacttgccgtctgaatcccaggtgcccgaaaggggccgggttgaggggatatgagggagaatgaggagttttcttgaggaccatggcaccaccttgcttgctgggaggttggaagtgattaggagggcacccttgcaggtccccggaaatcttggacgttatttttccccattcaagccgcggggatcccccaacatgcttgctgagtgaaagaggaaacttgagaatttgattgtgccaaggcgccaagtttttccttgttaatgactgtgaaatatattgttgatctatacccggttttccgaaattctgccgtgtgtaatccccaacccttgacccaattgacaccaaacacaagtgttttttgaagctccggtattatatatttttttcctcattaaaaggtttaaaaccaaaaaaaaaaaaaaaaaaaaaaaaagtcgacg

SEQ ID NO: 19013 - DNA, 422 bp, Homo sapiens
  SIMILAR (1)..(174): 1001254mologous to Homo sapiens ribosomal protein S20,accession number L06498,Smith-Waterman Score=298.
  misc_feature (1)...(422): n = a,t,c or g
agaatcactacaagaaaaactccttgtggtgaaggttctaagacgtgggatcgtttccagatgagaattcacaagcgactcattgacttgcacagtccttctgagattgttaagcagattacttccatcagtattgagccaggagttgaggtggaagtcaccattgcagatgcttaagtcaactattttaataaattgatgaccagttgttnnnnnnnnnnnnnnnnnnnnnnnnnnnggggggggccgttttaaaggatccttgggggggccaaagtttacgggggctgggaaggtaatatttttttccttttggggggccgtattaaaacctacctgggaattttgggaaaggacccttattttgggggggggacttattgggccaacctccctacagaattttaaggctttagggaaaa

SEQ ID NO: 19014 - DNA, 383 bp, Homo sapiens
  SIMILAR (370)..(257): 1001254mologous to Homo sapiens ribosomal protein S13,accession number X79239,Smith-Waterman Score=192.
  misc_feature (1)...(383): n = a,t,c or g
ntttatattttccctaaagcctttaatttctgtagggaggttggcccaatatgtcccccccccaaagtaagggtcctttccaaaaattcccaggtaggttttaattcggccccccataaggaaaaaactatttccttgccagccccggtaaactttggcccccccaagggtcctttaaaacggccccccccnnnnnnnnnnnnnnnnnnnnnnagttaaacaatcattttattgcttgagtacacagacaaatttatgcgaccagggcagaggctgtagatgattcatatttccaattgggagggaggactcgcttggtcttataatatcgagccaaacggtgaatccggctctctattagaatcagacggcggacgcgtggg

SEQ ID NO: 19015 - DNA, 2187 bp, Homo sapiens
  SIMILAR (1629)..(517): 841254mologous to Salmonella typhi putative IS10 transposase,accession number AF223162,Smith-Waterman Score=1600.
tcaatgctgtagtgagttatgatggtgccattgcattccagccccaataacagagcaagtctctttgccaagactaaagacaaatggttcatttctatcatgactggaatcaaacttctttccatttgacaattttcctttgtaatggacataaactttgtctccaatcatcggcgtttcctcaccattccccactcttttgacaatctttaatactcccctgtcttttttggaggtaatatcctctccctgctcagcaacagtggctgtggggctttcttcattgttcttggcaccttcatcagtagtcattgtcgaagaacaaatcacaccaatgcagcgatcaacgccttctcgttcttcagtgctgaaaaaatcctcttcggtaagaacatgagtacattgctcatcagcataggtcggaaatacatgctcaatgcaatccgggtgttttaaaccaagctgatcggcaagctcgaaagcacgacggtattgttcagatcctggccgtccaagaaagaggcttctggtcagcacagtagcattgctgaggctgagatcaggtgaaagggccagcagccaggtgcagagccgcaggagaccgaggtctgagagctgagggagctgcagctgggcacacagcaagtccatcttttttctgagcatgaacgcccgcaccccacatgtagtctgaagcattagggcgattagcagcatgatatcaaaacgctttgagctgctcgttcggctatggcgtaagcctagtccgtaggcaggacttttcaagtctcggagggtttcttcaatctgcattcgcttcgaatagatattaacaagttgttggggtgttcgaatttcaacaggtaagttagttgctagaacccatggctcctttgccgacgctgagtagattttaggtgacgggtggtgacaatgagtccgtgtcgagcgctgattttttcggcctttagagcgagatttatacaatagaatttggcatgagattggattgcttttagtcagcctcttatagcctaaagtctttgagtgactagatgacatatcatgtaagttgctgataggtttccagttttccgctcctaggtctgcatattgtacttttcctcttactcgacttaaccagtaccaacccagcttctcaacggatttataccatggcactttaaagccagcatcactgacaatgagcggtgtggtgttactcggtagaatgctcgcaaggtcggctagaaattggtcatgagctttctttgaacattgctctgaaagcgggaacgctttctcataaagagtaacagaacgaccgtgtagtgcgactgaagctcgcaataccataagtcgtttttgctcacgaatatcagaccagtcaacaagtacaatgggcatcgtattgcccgaacagataaagctagcatgccaacggtatacagcgagtcgctctttgtggaggtgacgattacctaacaatcggtcgattcgtttgatgttatgttttgttctcgctttggttggcaggttacggccaagttcggtaagagtgagagttttacagtcaagtaatgcgtggcaagccaacgttaagcccagcattagaacctgtgcatctggctccagggactccatcttcacaaggcaacacagtaactctgtttgagcaggacctgggtagaggacagcagaaggggaagtcgcaccgaggcaaagtgttaatgagaaggggacagtgatggagttgggtaacggtgagtacgggtgcaggtagcgagtggcaactgtgcggaggaccgctccgggctcgaggccctctgtggttctggttgtctgtatgcatgtctgctctgtccgtcggtcctgctcctcactccgagtactgtatgtaaacctccgaagatccggagttatacaagtaccccagaatagctccagacggccgtcaggcccctgcacgaccggctcctcccggcacagggcctcgagcaagcgaccccagtcgaagggctcccagccgcggctgcccagcgcccggagcacccccaggccgcgccgcgccccctcaggccccgcctgcagcgcctgcagcaggaggcgggcgggggcctccagctgcgcccagggcgccggctccacgccctcagccccagggagccccgcgtccggtgtcgccat

SEQ ID NO: 19016 - DNA, 471 bp, Homo sapiens
  SIMILAR (90)..(155): 501254mologous to Gallus gallus neuron-glia adhesion molecule,accession number U31086,Smith-Waterman Score=49.
ggccgcactagtgaatatcccgggtcgacgatttcgtggcgtgagaagccatgaggtgagttggtcctgaaagccctatccgcgttcatccgcgccttcaggtgccccgccgagggttcggatcctgtaggccgcgccgcggacccttgcgccacctgcgccgcggggcatttctcaaggcgggtcggcctgcgggtcgcccttcctaccaggtccgatcactgagagcctccctcttccaccggggcttgggtctgggtctgagctcccgtcgctctacttggtgtccggaatctacgggggagtccgccgtgggccgcccgcccgtctcgaagcctagacctcggaggcttccaggcagtccgagcgtgtggactccgcggccctgagcgccctgtcgcttctctcccgcagcagcaaagtctctcgcgacaccctgtacgaggcgggcgagatccaatcactgatggg

SEQ ID NO: 19017 - DNA, 2447 bp, Homo sapiens
  SIMILAR (2353)..(1490): 561254mologous to Homo sapiens fanconi anemia protein E,accession number AF265210,Smith-Waterman Score=657.
  misc_feature (1)...(2447): n = a,t,c or g
ccagccccggggaaaaaaattttcaaaaatcaaaccccggaagcaaaactttcaagcagccagcgtatgcaggttgttttcccccttttaccctttaaaattttattttttccctaaaggctttaaatttttgtagggaggttggcccaatatgtcccccccccaaaataagggttctttccaaaaattcccaagtaggtttttattcgcccccccttaaggaaaaaaatttaaacttgccaagccggggtaaacttgggcccccccaagggttctttaaaacggcccccccnnnnnnnnnnnnnnnnnngaactggtaatagaattgtattcaaatgatgaccttaatattaggcgctgggggcttgccccatgggtgctccttggaaataataaggcccggacatttctgcccagtttttccttggagcaatgacacccaagaaggttgacagcccaggtgaatgttatacacaagctcatcggtctgtcatcattcacgtgaccaacagctacagcccngacagtaacaccttcttcatttgggaacttggattgggggaccttnaccatcatccactttgggccaccatcgttttccgttgtgtgtgaggcaggggaaggggaacttttcctgccttattttaaaccttgggccgaaggattccgtggaattctgctttgatcagaagaactctgaggggccaaaaacggcattcatacttccttgggccagcttccttgacccagttttttaatccctggttgagtttttttcaggcgccttcgatgtaccatgtgggggggaaatccacggccttagcctcgtcacagtgctgctggtcccccaaggacacacaccagagaacttagggcggggagtggacttaagcctgcgttttgggggacagcaccaacaggttacgcctagccctgggtcccaagggccggtgaagggtcccgtctccaggaaccttcgagagaggaggggggttaagcacccgccggccctcgccacccgcgccgtgccccagggtcggcctttgctgctgcgggagagaagcgacagggcgctcagggccgcggagtccacacgctcggactgcctggaagcctccgaggtctaggcttcgagacgggcgggcggcccacggcggactcccccgtagattccggacaccaagtagagcagcccctttttacagagcttctccattaagacactgaacttctcaggggtcatctccacctgcacacattgggagatggagcagtaatcacaagaaaggcttgggctcttcattcagccagtcctgctgcaaagcagaggccctagtgaaaaatgcctggcctcccacccaagcctgagtatctatctgctgctttgagcaggacctgggtagaggacagcagaaggggaagtctggggggaaatggcagaagacagcagaaagcagggaggcggtaacagaatgcccagcctgttacagagcagccaggtgcagagccgcaggagaccgaggtctgagagctgagggagctgcagctgggcacacagcaagtccatctgcttacagagtgcggggggagagaggacaccgggacatgcactctgcctctgctaggctgtctcaccctggggagacaaatctcatgttagggctggcagagccctcagtgacaagtcactgaagccacccctttcgccagtcttaactgccatgacaggctggtccttaataggagatgcacttcctccatctgccagggattccagtgacttatgttcgggtctctccttctcatgatcttcttcctcttcccaacaccgtaatcttttggggaccctcttcccctcaggactggcagcctcttcctctgagtcctttctgcgtttcccaggctgctgggagtccctgttctcctcttcttcagggtctggagcctggggggatttcaacctcctgccccccaggcccagccccctacatagactttggagctgtctctggtgctgggcaatctgcagcacagagaggagcccactttccggcagcgatggccgaacggccatcagcagggacatcaggttcctctggcatatccggggcaatcgcagcaacagtggtttcctgggtagcagagggagagcaagcagttaagtgtttggctgaagggagcacaaggcagactgggcagcccagtcgaagggctcccagccgcggctgcccagcgcccggagcacccccaggccgcgccgcgccccctcaggccccgcctgcagcgcctgcagcaggaggcgggcgggggcctccagctgcgcccagggcgccggctccacgccctcagccccagggagccccgcgtccggtgtcgccatgccggggcacgggtgccgcgccgccccctactctggtgtggggcctcagctcagaggctgaggggaa

SEQ ID NO: 19018 - DNA, 1243 bp, Homo sapiens
  SIMILAR (209)..(514): 491254mologous to Homo sapiens SMT3B protein,accession number X99585,Smith-Waterman Score=161.
  misc_feature (1)...(1243): n = a,t,c or g
atgggaggctccggcggctcgtgctcgcgcacgcagggtggaggcagggagcgcacgacgtgcgcgcaccctctgccctggtccatcgctgccgcgctccttcttctgcagctcctggtgctgcttgtgtgcctcgtttggtgcggacctgcgtacctcttyttgtgaagcggcactaaagggagactccggcggctcgccatggcccgacgaaaagcccaaggaaggagtcaagactgagaacaacgatcatattaatttgaaggtggacggggcagrgatggttactgtggtgacagtttaagattaaggaggcatacaaccactttagtaaacttaattgaaagcctatttgtgaaccgacaggggattgtcaatgaggcagatcagattccggatttgaccgggcaacccaatcaactgaaaacagacacacctgcaccagttgggaaatgggaggattgaagattacaatttgatgtgtttccaacaagcaagaccgggaggtgtctacttgaaaaagggaacctgcttcttttactccaagaactctgtttctttttaaaggacccaagattacatttcttcaattaggaaaacttgcaatttgggttccacccacatccctgacttacttaccctattagttttctcttattcttttcatttccccctttcccccattccctttatttgttacataaagtaactgggtatatgtggcaccaagccatattggcattttttttttttttttttaactaaacagcccaatgggtaggtttggattgaccatccaagtgggagacccgggatgggggaaaaattactgattctgtgaaaaatacccccctttctccatttagtggccatgttccattcagcccttaaacctttatattccgagtaagttattttgctctcactgttttaacaaccacaacaaaacaacaacaacaacataaaaatccttgcatacccttgttcaattggatgaattttaatgtttttcaatttatcattgttaaaaccccnggggccaaantttttataacttttttggtacggtagctgttaccnatgtagggcaatctcgtctttaagtagggattaaattactcnctaaaacaaaaaagaatcctagawcactwctcccttcaagtcaaagcgtcttggttgtttaaataaacttcttgtttaaaaaaaaaaaaaaaaaaaaaaaaaaaacctcgagggggggccc

SEQ ID NO: 19019 - DNA, 500 bp, Homo sapiens
  SIMILAR (99)..(494): 441254mologous to Arabidopsis thaliana F23N19.9,accession number AC007190,Smith-Waterman Score=290.
  misc_feature (1)...(500): n = a,t,c or g
aactggataaccctcgcaangnccnnaacttgagtacactgggaagngncgnggaattctctgcggccagcggaccgggcgcctggggcactgaccactactgcctggagctgctgcggaaacgggattatgaaggttatttatgctccctgctgctccctgcagaatcccgaagctctgtttttgcactgacggcctttaatgtggaactggctcaggttaaagactcagtctctgagaaaacaattggactgatgcgaatgcagttctggaaaaaaactgtggaagatatatactgtgacaatccaccacatcagcctgtggccattgaactatggaaggctgttaaaagacataatctgactaaaagatggcttatgaaaatcgtcgatgaaagagaaaaaaatctggatgacaaagcatatcgtaatatcaaggaactggaaaattatgctgaaaacacacagagctctcttctttacttaacactagaaatattg

SEQ ID NO: 19020 - DNA, 658 bp, Homo sapiens
  SIMILAR (413)..(520): 881254mologous to Homo sapiens Human secreted protein, SEQ ID NO: 5327,accession number G01246,Smith-Waterman Score=178.
attatgaaggttatttatgctccctgctgctccctgcagaatcccgaagctctgtttttgcactgagggcctttaatgtggaactggctcaggctggttaaagactcagtctctgagaaaacaattggactgatgcgaatgcagttttggaaaaaaactgtggaagatatatactgtgacaatccaccacatcagcctgtggccattgaactatggaaggtctgcacaccagcagaggcaggcccagtttctgggccccagattgacttcacagagccccagtaaagatggaaagccagaaccccccaactggggattgagaagaaaaagtggatgggaagctgctgttaaaagacataatctgactaaaagatggcttatgaaaatcgtcgatgaaagaagtctcactcttgtcgcccaggctggagtacaatggcacgaccttggctcactacaacctccacctcccgggttcaagtgattctcctgcctcagcttcctgagtagctgggattacaggaaaaaaatctggatgacaaagcatatcgtaatatcaaggaactggaagattatgctggaacacacagagctctcttcttatttacactagaatattggtataaggatcttcatgcagatcatgctgcaagtcatattg

SEQ ID NO: 19021 - DNA, 516 bp, Homo sapiens
  SIMILAR (51)..(173): 581254mologous to Arabidopsis thaliana F23N19.9,accession number AC007190,Smith-Waterman Score=124.
ggcggagcgtggctgcggccagcggaccgggcgcctggggcactgaccactactgcctggagctgctgcggaaacgggattatgaaggttatttatgctccctgctgctccctgcagaatcccgaagctctgtttttgcactgagggcctttaatgtggaactggctcaggctggttaaaaactcaccctctgagaaaacaattggactgatgcgaatgcagttttggaaaaaaactgtggaagatatatactgtgacaatccaccacatcagcctgaggccattgaactatggaagtgattgccaaaagagggtttctgtaacaggagccacccacagacctgacagtggtacacctcttctcatgtctgcacaccagcagaggcaggcccagttttcttggccccacattgacttcacagagccccagtaaagatggaaagccagaaccccccagctgtggattgagaataaaaagtggatgggaaactgcttgttaaagacattatctgacta

SEQ ID NO: 19022 - DNA, 485 bp, Homo sapiens
tgccctgagctgtgtctctgtctaggtacacagttcatgagtgaaggagctcctggagtcatgaataatggaagtccagattggtcaagtaacttgtcccagccccagcccatgcatctggtatgtggttggacaggtttctaactcattacgtaacatcaagaacattttaaactgctttgagacatttgtgaattaagatctcaataaatagtcctccctggcaccagctccatccacattaaatgagacttgaaaatttctttgaatggatattagtttagaaggagctaagttattagttggcctcacattcctcagttgggccctgggcccagcatgccacttctcctggttattatggttcacatctgaggtaacccatcgggaaactggatgggacaacaaactaaaaatgttttagtttggacctgtccaaaaccaagagaataaaaacaaaatggatagtcaagatgaaaaaaaaa

SEQ ID NO: 19023 - DNA, 2745 bp, Homo sapiens
  SIMILAR (145)..(810): 241254mologous to Leishmania major proteophosphoglycan,accession number AJ243460,Smith-Waterman Score= 114.
atgccccctttgctgcctcctggccactgcctgacaaccacagaagctgtcaccactttgttcctaaggttgtgttccctggtaataactcttatcttttctgaacaagagtggggctttaggacatggagagtcggggagaagacagcgacgtcgaatgagagcggcacaggtcgaagggacagtagactaacgacctgcccagtccaggcctctccagatggtcccctggcttctgcatccctctttcacctcctttttcctcaaccaagacaaaccactcctgtccagtctatcagggcctccccactgaaaccagagtcctctgggcctcggtgtgactcagcggcttctagggcaggggaccttgccacagatggcattgctgtggcctctcctctggaagctgcctggcctgcagcttcacctagctacagcccccaggccaagccccaggaagtttatctccaagatctctctccagaaatgtcatttccagctgctttctctgaatccagtgctaatgtctcctccgtgaagtctgctcaactgccccaggcaaatccaaaggctctaggctctgtgctcccatcaaatgaggcacattcatttctgcacacattacttaggctagagggcgctgaagagacactgcagaagacatacagtttgcttcctggttccagtgtgttcactgggagcatggctgcttctccagtgtccagctcttgcaacactgacagctcctctagcacctggctccttcagtaccagcagcttaccagggcacctccctcagtgtgggaaaccactgatgaggtaggtgtgttttgggtggagaaggaaaggcagggtagaagagagcggaatccagccaggcagcccccaatggaagaatattcaactctagctcaacgtggggaagagggaatatggaaagaatccagagtggacaagggcagcctcacattaggaccccatccaatgggcatatctgtcactttccagcacaccaggactctagggcgccaggatgggcatagctgtggcagagccatgaggtttgcaggcagtgcctcaagcatcacagcagctgcagtgcaggcacctggctgtggacaacctcatgggggtggcgagcaggtggcccaaggtgccagggccagcatggcatccgcagggtcagctagtcttcagtgctgccaagaagagtttatgagctgcctctcctctgctaccaggaaacagcctgatgggttggcattacctgtcgctatcctcacagcccgattaaagtcccctgttttggccatgggtagacaggacgttattctggattctcaccataacccaggctggtctagaggcagttatgagaacatagcctatagatgcaaggaagtttgtcgctcttcctgttgctggggccagcaggatgggctggggaattcctgcaccccaacagctgcgtccccagctcagtacctggacaacatgaatccacccccatcgtcaataagcgtctttcagagctgccagctccctctggggaaagccctttccactcgttctttgaggcccaaagctgattctggtctaattataactgtattcccagcaggcacaggagcactgaggacccttcttgacctcctggatcagaaaggcagaggaaatgctgggcagaagtcaagaataaggaaacctttcgcagaagccctctggaagaatgccccctttcgtgcttccttggtcctaatgggtcacatgtctattcctaagccagtccctggcaagaagaatggaacgaccacctttggcttccactatgaggattcgctctctggggtgggaacatccatacacttatgtcaaggagaacagatacctgttgggaaggaggaaagagggacaagcgttgggcaggcaacccaaggaccctgcagcagtctccgtgacaacttctcttcctggtgcctctgcgactctgatcattttttcttggtgtcctctttctctgaagtgcatgggttggagcctcatcatgtctctcctgctgcatcacagcagcctctcaccggccactttacacagccaccagaacaatatttccaaaccacaggtcacattatgcccctccttacccacatcccccagcttctgaagacatccactggaccttccatgagcaggagaggagaaggtgatgtgaccacgggggcagagactgcgaccacagccaagaaacgctgcagccgtcagaggctggaagacatggattctcccctagagcctccagagggagcgcagcctgccagcaccttgatttcagccagtgacactgattgtggacttccagccttcggaactgtaagagaagaaatgcctgctgttataagccaccaggtttacagtaatatgttacaggagccacaggaaactaagtcaggggttcagcctcctgcagaggaaccaggtacagccattgccattgcagctgcagccccacagaaatggcctaaccccccagggaaggcccctaaaggaaagcgccctgaaagagtggctttccaatgtttacacagagattgcatggaatttacaccaaacttcagggactcgctctgtctgaacaacctgggaggaggagtcagggtgtggcagggtgagggaagtagccaggaccctccacatgctgcccctgctccctcatcccatgaccctgataattggcatcagaagtga

SEQ ID NO: 19024 - DNA, 2574 bp, Homo sapiens
  SIMILAR (334)..(474): 531254mologous to Arabidopsis thaliana F23N19.9,accession number AC007190,Smith-Waterman Score=130.
atgcagaggaccacagcgacacctggctcttctttgagcggcgtccagaggctgccttcccgcgactcaaaggagcataggggaacctgcaggggcgtggccggggcgtactgcgcgccgacggcggggggtcgaagggcacgcagtgccggcgtcatggcggcctccgcgcacggctctgtctgggggccgttgcggcttggcatccccggcctgtgctgccgccggccgcctctgggtctgtacgcgcgcatgcggcggctgcccgggccggaggtgtctgggcggagcgtggctgcggccagcggaccgggcgcctggggcactgaccactactgcctggagctgctgcggaaacgggattatgaaggttatttatgctccctgctgctccctgcagaatcccgaagctctgtttttgcactgagggcctttaatgtggaactggctcaggctgtagagggcgctgaagagacactgcagaagacatacagtttgcttcctggttccagtgtgttcactgggagcatggctgcttctccagtgtccagctcttgcaacactgacagctcctctagcacctggctccttcagtaccagcagcttaccagggcacctccctcagtgtgggaaaccactgatgaggtaggtgtgttttgggtggagaaggaaaggcagggtagaagagagcggaatccagccaggcagcccccaatggaagaatattcaactctagctcaacgtggggaagagggaatatggaaagaatccagagtggacaagggcagcctcacattaggaccccatccaatgggcatatctgtcactttccagcacaccaggactctagggcgccaggatgggcatagctgtggcagagccatgaggtttgcaggcagtgcctcaagcatcacagcagctgcagtgcaggcacctggctgtggacaacctcatgggggtggcgagcaggtggcccaaggtgccagggccagcatggcatccgcagggtcagctagtcttcagtgctgccaagaagagtttatgagctgcctctcctctgctaccaggaaacagcctgatgggttggcattacctgtcgctatcctcacagcccgattaaagtcccctgttttggccatgggtagacaggacgttattctggattctcaccataacccaggctggtctagaggcagttatgagaacatagcctatagatgcaaggaagtttgtcgctcttcctgttgctggttctatttgtgggaaagtttggttgcaaaagctaaatcctacgacagtggcttttggcatccccagaggaaaaaacggggagacccgctttggcctcaggaagcgcagaaacactgtcctggctgcgcgcgcaagggcgagaacctaggggacccgcctaaagcgccgttggggctgagcaccgaactcgcacagctccgggcagcgacccgcgatgcggcatccttccgtccggtcggagccctcctagccctcagcgcgtctattcctagcttcggtccccgcaaccatataagcaatgacaccctcgccgactcgcctgccagcttggccgcctccctgcagagggctgacgcttctccagaagttgtaagaaaaggagggaaagcaggccaacctcgaggatctccccagccttggcgttcaggtgctgaggagatcgtcgaggttggcctgcttcccctcactcctcgggccttgctcttcccccaggtgcccactgccctccctgctgtgtaccactttcttgctgcctgtgaaggtatttgtcctcactcttgtgctgctccttcaatgatagaactttgggactttctcatccagcagcaccagcctgaaaaagcagtggcttgcaccaccacacacatacctggtctcaggatctcagccctaaacaagcacagggcgtggggtggtacagatgatgatgtagctgcttctgagatgcccctgggcgctgctggagctgagccctgggactggaatgacttttgcccgctgccctcaaaattcccacaggccacaccgctaccacctcttggggtgcaggtccctgaagccctcagggaagctgcaaaggttactggggtcggctctggggcaacagctgacctcttagctcccactgcaggcgtaggaacctccaggacagcctgtgggggtggtacacagttcatgagtgaaggagctcctggagtcatgaataatggaagtccagattggtcaagtacacagttcatgagtgaaggagctcctggagtcatgaataatggaagtccagattggtcaagtaacttgtcccagccccagcccatgcatctgctgtacttaacaacctggtttcttgaacgtcccatgtgttgcccagacaccacagctttgacacagactcttccagttccatctttctcatatccagtttgtacttcacacatcagacagaatccccatttacatttcctgagagcccccagcccacattatactacagcatgttcattcgaaccacaaagatttttggagcagcaacaggatctactttag

SEQ ID NO: 19025 - DNA, 466 bp, Homo sapiens
  SIMILAR (370)..(92): 961254mologous to Homo sapiens HDCMD11P,accession number AF068296,Smith-Waterman Score=449.
  misc_feature (1)...(466): n = a,t,c or g
nttaacattttcaatnttatatcaaattagatactgatcacatatatcataaaattaataaatcaagcagatttttctactccataattcatgtcacatttaatagtctcttcacggattctttgtactgagaaatggaattttcattttcctcctcatttttaagactaacaacagactttttgtactcttcaatttctttagtaccaaggagctcttctttatttatttccatatttttctcagcagctttcatctggagaagcgtttccaggatatttctttctgatgagctattttcccatatatactcttccatgtctgcttcagtcttacttttttcccattcttcagtattgcaggctaggtgtcgggaccggagtggccgagtagacggcagtggagaatgcacgcagagtccttgccctcgactgcagagacagccatgctgggagccggcggncgc

SEQ ID NO: 19026 - DNA, 911 bp, Homo sapiens
atgaaatattaacgtaaattataacttttcctgaactgtttttaaatcataggcagagccagggttttctttttttctctctctctctgtaattgcgacatgaatgtactttgatcccagtaatcattttcaatcaatgggaaaacaaatgaaaaaaaatcccatgctggaatgatgcaaataggtgagcttgcttattagaatctttttttcttttcctcttacaggccactcacataatacatatccaagtcagagaatgctgatataaaccttgcccacctctctcagcccgtctttcttactcagacaatttctgagcagctctttgatgaacacacaatcttcagtttccaggacaaactgagccacagccttccctcctggcagatggctcctcaccatctgacttttgacactgtccaggacaactcccctgatgtctttaggctttcctggcataccaaagatgataaacagacccaggcaatcctctcctattaagttacagaattcttccagcttatcaaatctacttttcttccaggaagactcctctacccttgattctggattggaaaggtcacaaggcttagattccacaggaggaggtgaagacatctgcagagtctgtactgcgagctgaagctttatttgcttgtcggacccccaaaaggtccaaatccagtctgcaccaaacaggaaggcttggtgcttggtcatcttggtggtggtcagccactcatcaactcccttttcttggcagaaagtgatgaaatggattaagaagatctcattcagagtatttgcagctgggcagggtttacttggaggatattcaaatccaaggtactccttcagtttctgagctgcatggactatagcttcactgaccacctcacagacgacgg

SEQ ID NO: 19027 - DNA, 743 bp, Homo sapiens
  SIMILAR (355)..(741): 481254mologous to Homo sapiens MDS023,accession number AF182422,Smith-Waterman Score=193.
  misc_feature (1)...(743): n = a,t,c or g
ctccggcttgccgtcctcgcagccatggcggccgccgcgctccccagaatggctgtctctgcagtcgagggcaaggactctgcacgcgttctcctcgtgacgtctactaggtcattacgatcctgacacctatgctggcggatagaacacgcagaattgagaggccacccaagaagaaaggcactacctccttaggacagagaaaatggctgttgacccaggactggcctagtgtttacccagttgcagcacccatttaaaccctctgcagtaccttcttcctgttccgaatgggttatccagtaaaaaaagggcgtgcccatgggaanaggaggggaaatctagaacttttaaagatttcccaatttttctggattttgacttcctgtagcaatttaaaaagcacttgtgaagcccttaaagattttttgcactggagtgggccagccgcactgggacagtggacggaagaaaatgttgaagaagcatttttccaattggaaatttggacagcacttggatttatgttttcatcagggaccatctggttccgggaaccccagagcacgagtagtagtccttaagagtaaagctttcctagtttgaatttagcatgatcacgcaaagaagacactaattacacttgtaggagagcgatactgcaagacaccagatgtgcttaccatcaaacagaataggtggcctttaaggagccagatcaccataatgccagtgtatctatt

SEQ ID NO: 19028 - DNA, 3208 bp, Homo sapiens
  SIMILAR (1601)..(2290): 861254mologous to Homo sapiens MDS023,accession number AF182422,Smith-Waterman Score=985.
ggaaacatgttggaagagattaccaaagattaaaagtagagtgaatataacctagatagaacagatgttttgtgtgaaatttagtatctttaacttaataaaccagcaggaactgtatgaacacaacacacccaactgacaaacagagagaactaacatgtttatttagctgtatgtatatatgcttaactacacccgaggaagctgtagagttagaaaaacatgaaccattaacagatgtggcctccctgcagaacttttgctttgaaaaagaagtacgtctgaaccagattcacatgtttgatatttggatgcagagaaaatggggcagaaagcatcgcaacagttggctctgaaggacagcaaagaggtgcccgtcgtctgtgaggtggtcagtgaagctatagtccatgcagctcagaaactgaaggagtaccttggatttgaatatcctccaagtaaactctgcccagctgcaaatactctgaatgagatcttcttaatccatttcatcactttctgccaagaaaagggagttgatgagtggctgaccaccaccaagatgaccaagcaccaagccttcctgtttggtgcagactggatttggaccttttggggatccaacaagcaaataaagcttcagctcgcagtacagactctgcagatgtcttcacctcctcctgtggaatctaagccttgtgacctttccaatccagaatcaagggtagaggagtcttcctggaagaaaagtagatttgataagctggaagaattctgtaacttaataggagaggattgcctgggtctgtttatcatctttggtatgccaggaaagcctaaagacatcaggggagttgtcctggacagtgtcaaaagtcagatggtgaggagccatctgccaggagggaaggctgtggctcagtttgtcctggaaactgaagattgtgtgttcatcaaagagctgctcagaaattgtctgagtaagaaagacgggctgagagagggcggtgccagcccagggagcctgcgcttagcggccccaggcccgcccctgacactgaacgccgcttgtcccctccggcttgccgtcctcgcagccatggcggccgccgcgctcccagcatggctgtctctgcagtcgagggcaaggactctgcgtgcattctccactgccgtctactcggccactccggtcccgacacctagcctgcgcgttgatgacctccatttaacagagattgtagggatgcttgatagcgtgcttaccccggaggactctagtggaaaatacagatttattagcggagaagtgctatgtaggatcactggctgctttactggggtaagagtggaagccaaagatctgtttggaggctgttgcagtaatccaaatgaggtgatggtgacttggattaaagtaatagtggagaaggaggtgtggttgtatttgcgatatattttgaaggcactacctcctaggacagagaaaatggctgttgaccaggactggcctagtgtttacccagttgcagcaccatttaaaccctctgcagtacctcttcctgttcgaatgggttatccagtaaaatagggcgtgcccatggcaaaggagggaaatctagaacttttaaagattcccaattttctgcatttgactcctgtagcaattaaaaagcactgtgaagcccttaaagatttttgcactgagtggccagccgcactggacagtgacgagaaatgtgagaagcattttccaattgaaattgacagcactgattatgtttcatcaggaccatctgttcggaaccccagagcacgagtagtagtcttaagagtaaagctttccagtttgaatttagatgatcacgcaaagaagaaattaattaaacttgtaggagagcgatactgcaagaccacagatgtgcttaccatcaaaacagataggtgccctttaaggaggcagaattacgattatgcagtgtatctactaacagtgttataccatgagtcttgggaatactgaagaatggggaaaaaagtaagactgaagcagacatgggaagagtatatatggggaaaatagctcatcagaaaggaaatatcctggggaacgcttctccagatgaaagctgctgaggaaaaatatggggaattaattaaagaagagctccttggtactaaagaaattgaagagtacaaaaagtctgttgttagtcttaaaaatgaggaggaaaatgaaaattccatttctcagtacaaagaatccgtgaagagactattaaatgtgacatgaattatgggagtaggaaaaatctgcttggatttattaattttatggatatatgtgatccagtatcctaatttggatataaaattgaaaatgttaaaaaatcatttttttttcctcagggtttaaaattattttccctccatactaatgcttaatggcaatgattactcccagagttttttaatttttacactggggcaatagactaggaggtctctgatttcttcttggtctaaagtgttttgattttatttctacataatagctttggtattcatgtatatacatgcatttaattgtgatttgatcacctttcccatttctttcccccacaggctggcatttccagtagtggctttggaataatgggttttgggttacccctgggaaggcaggccccagaaccccatttcccttgacttggcaggttccgggctgtgttccacatgactgctgtctaggcggatgccatttttccacatttgtccaactcctggttaggaaaccagggtccctcagggggtattcctcctaaccctgatattttcctaaaaagatatgttggattccaactttgtttagccatccctactttcctagattgtggggctcattttgcccagggccaagctacccagaaaagtagaagtgggagattcccctggtatgtatctcctctgggtgccccagttagagctgccacagctcacggaaaaagatgaggcataacggaccttgaatgtaattggagtaagtgacaaaataagaactaccctgggaaaccctgcattcaatgtagctgtcaattcagtatttttaaggtacccctgtcaggctgtttcttaccacttcgatggttgtgattaatttaaaatcaaaataaaggaattacctgagtttaaaaaaaaaaaaaaaaaa

SEQ ID NO: 19029 - DNA, 233 bp, Homo sapiens
  SIMILAR (3)..(230): 841254mologous to Homo sapiens myosin phosphatase target subunit 1,accession number D87930,Smith-Waterman Score=324.
aaaaaaatagctcagttaatgaacgatcaacgtatcataaaagttctagtgttccaagcaccacatcaacaccaacagttacctctgcagctgggcttcagaaaagcctgctttccagcacaagcactactacaaagattacaacgggttcttcctcagcaggcacacaaagcagtacctcaaatcgtttgtgggctgaggatagtactgagaaagaaaaaggcagtgtttcc

SEQ ID NO: 19030 - DNA, 256 bp, Homo sapiens
  SIMILAR (1)..(153): 981254mologous to Homo sapiens myosin phosphatase target subunit 1,accession number D87930,Smith-Waterman Score=253.
ataccaggacgactagccagtacatctgacattgaagagaaagaaaacagagattcttcaagtttgcgaacaagtagttcatatacaaggagaaaatgggaagatgatcttaaaaaaaatagctcagttaatgaaggatcaacgtatcataaaagatcatacctcactcctgttagggatgaagagtctgaatcccaaagaaaagcaagatctagacaagcaagacaatctagaagatcaacacagggagtgacat

SEQ ID NO: 19031 - DNA, 114 bp, Homo sapiens
  SIMILAR (1)..(66): 1001254mologous to Homo sapiens myosin phosphatase target subunit 1,accession number D87930,Smith-Waterman Score=112.
agtgatgaaaatgaacaagaacaacaatcagacacagaagagggatccaataagaaagaaactcagagacaagaaagatttgctgatagatcactgttggaaatggaaaaaagg

SEQ ID NO: 19032 - DNA, 444 bp, Homo sapiens
  SIMILAR (258)..(443): 881254mologous to Homo sapiens myosin phosphatase target subunit 1,accession number D87930,Smith-Waterman Score=272.
atcttagacgacagataaggaacaataagaactttaactacttttagacacagaatagggatcctatactaaagaatgtcacacagactccttgtctagatactaaaccagctctacgtcagctgaggaccgagatgattccttgctgcgacgctctggatcataccgagacttataagaatgaataccttacagctgcaggctagataaggatgactcaactgactgtataaagctttatgaacaaattctagctgaaagatgataagctgaaggcacagctacatgatacaaatatggaactaacagatcttaaattacagttggaaaaggccacccagagacaagaaagatttgctgatagatcactgttggaaatggaaaaaagggaacgaacagctctacaaagaagaatatctgaaatggaagaaagacttcaaatgg

SEQ ID NO: 19033 - DNA, 287 bp, Homo sapiens
  SIMILAR (163)..(285): 781254mologous to Gallus gallus 130 kDa myosin-binding subunit of smooth muscle myosin phophatase (M130),accession number D37986,Smith-Waterman Score=153.
ggccaaacagcctttgatgtagcagatgaagacattttaggatatttagaagagttgcaaaagaaacaaaatctgtatgatttcattgctcctatcatgcctgtggtggaatcagtagatcctgcatcatggaggcagggcttgcgcaaaactggcattgttcttgtgcccagtaagggtgaaaaatctatggagaaagatagtaaaggaactaggcttgcatatgttgcacctacaataccaagacgactagccagtacatctgacattgaagagaaagaaaacag

SEQ ID NO: 19034 - DNA, 349 bp, Homo sapiens
  SIMILAR (211)..(348): 971254mologous to Homo sapiens 05-JAN-1996 Human protein p164 coding sequence,accession number V17260_cd1,Smith-Waterman Score= 212.
aattaagagcttgtactctaaggataaagatctttcatatttatttttgtcaaattttggaaagctctttacatatcactggcatcacatcttttctacactgctcctgattggacctttaattctgaagtatcactatttcacagtatagaagaagacttaagaatataataattatataactaacattggtaccttaaatcgatctaggaacgaagagctctagaaagaagaatatctgaaatggaagaagagctcaaaatgttaccagacctaaaagcagacaaccagaggctaaaggatgaaaatggggccttgatcagagttataagcaacctttccaaataaa

SEQ ID NO: 19035 - DNA, 5814 bp, Homo sapiens
  SIMILAR (426)..(1628): 571254mologous to Homo sapiens 05-JAN-1996 Human protein p164 coding sequence,accession number V17260_cd1,Smith-Waterman Score= 978.
tttcgtgtccgctcggccgggtgcgccgccccagtgctctgtgggatactggaagtctcgagcgtcggctccgggttcccagccctcctctggcccgcactcatagaaacattcacacaccccctgcctcccctctcttccctctccgcctcccccttccccccctcgcgataagaagacccggcggcaggagaggggatgaagatggcggacgcgaagcacaagcggaacgagcagctgaaacgctggatcggctccgagacggacctcgagcctccggtggtgaagcgccagaagaccaaggtgaagttcgacgatggcgccgtcttcctggctgcttgctccagcggcgacacggacgaggtcctcaagctgctgcaccgcggcgccgacatcaattacgccaatgtggacggacatcacatgccctgcaccaggcttgcattgatgacaatgttgatatggcgaagcttctggtagacaatggagcaaatattaatcaacctgttaacgacggctggataccactacatgcggcaccttcctgtggatatcttgatattgcagagtttttgaatggtcaaggagcacatgtaggggctgtcaacagtgaaggagatacacctttagatattgcggaggaggaggcaatggaagagctacttcaaaatgaagttaatcggcaaggggttgatatagaagcagctcgaaaggaagaagaacggatcatgcttagagatgccaggcagtggctaaatagtggtcatataaatgatgtccggcatgcaaaatctggaggtacagcacttcacgttgcagctgctaaaggctatacggaagttttaaaacttttaatacaggcaggcctatgatgttaatattaaagactatgatggctggacacctcttcatgcctgcagctcatttggggtaaagaagaagcatgtccgaattttagtggacaatcctgtgtgatatggagatggtcaacaaagtggggccaaaccagcctttgattgtagccagatgaagacatttttaggatatttagaagagttgcaaaaggaaacaaaatctgcttccatagtgaaaaacgggacaaagaaatctccacttaattgaatcaacagcaaatatggacaataatcagtcacagaagacctttaaaaacaaagagacgttgattattgaaccagagaaaaatgcatcccggattgaatctctgggaacaagaaaaggttgatgaagaagaagaaggaaagaaggatgagtctagcttgcttctagtgaagaagatgaggaagatgactcggaatcacgaagctgaaacagataagacaaaacccctgggcttctgtaactaatgccaacacttctagtacacaagcagctcctgtagctgttacaacacctactgtgtcatcaggtcaagcaacacctacatcacctattaaaaagtttccaaccacagctacaaaaatttctcccaaaggaagaagagagaaaagatgagtctcctgcaacttgggaggttagggatttaggaaagacggggcagctatggtgcacttgctgaaatcacagcatctaaagagggtcagaaagaaaaagatactgcaggtgttactacgttcagcttcctgtgccacactttcctcctctttggataataaagaaaaccagaaagatagtaaaggaactaggcttgcatatgttgcacctacaataccaagacgactagccagtacatctgacattgaagagaaagaaaacagagattcttcaagtttgcggaacaagtggttcatatacaaggagaaaatgggaagatgatcttaaaaaaaatagctcagttaatgaaggatcaacgtatcataaaagttgctcctttggtagaagacaagatgatttgatttggttctagtgttccaagcaccacatcaaacccaaccagttaccctctgcagctgggccttcagaaaagccctgctttcccagcacaagcacctacctacaaaagattacaacgggttccttccctcagcaggcacacaaagcagtaccctcaaatcgtttgtgggctgaggatagtactgagaaagaaaaggacagtgtttcttacggcagtgaccattcctgttgctccaactgttgtaaatgctgcagcttctaccacaaccctgacttacaactactggctgggcactgtcttcctccacaacagaggtcaggggagagacgcagattcatacctcactccttgttaggggatggaagagtttgaatcccaaagaaaagcaagatctagacaagcaagacaatctagaagatcaacacagggagtgacattaactgatcttcaagaagctgagaaaacaataggaagaagtcgttctacccgaaccagagaacaagaaaatgaagaaaaagaaaaagaggaaaaagagaaacaagataaagagaaacaagaagaaaagaaggagtcagaaacatctagagaagatgaatataaacaaaagtactccaaggaccgtatgatgagaccttaccagcggtataggccaggtatcaacttcaagttcaaccactccatcctcttcactttctactatgagcagttcactgtatgcttcaagtcaactaaacaggccaaattagtcttgtaggcataacttctgcttactccagaggaataacaaaagaaaatgaaagagagggagaaaaaagagaagaggagaaagaagggagaagttaaatcacaacctaaattcaatcagaggaacgacggacggaccaagagagaaaagaagatctacaggagttttcattttggacacaagatagtgatgaaaatgaacaagaacaacaatcaggacacagaagaggggatccataaagaaagaaactcagacggattccatttctagatatgaaaccagttctacatcagctggtgatcgatatgattccccttgcctggggtccgcctcctgggatccataccaggttaccttagaaggaaaggaaaaccccttaccagccagcagggcctagaaaagggatgacctcaacctgacctttaaaaagcctttatgaacaaattcctagcctgaaaatgaaaagctgaaggcacagcctacatgatacaaatatggaactaacagatccttaaattacatgtggaaaagtcccacccagagacaagaaagatttgctgatagatcactgttggaaatggaaaaaagggaacgaagagctctagaaagaagaatatctgaaatggaagaagagctcaaaatgttaccagacctaaaagcagacaaccagaggctaaaggatgaaaatggggccttgatcagagttataagcaaactttccaaataaaaaaaaaaaagcagcaagtaatggaattgcacatattagtaacccagtggaccataattggcagtcactggaagtctgggaagaatccttggagactgtcattttcggatatcctgccaaatgccctcttatctagaatttttgtttcattttgtttaattttctggggtgtttttgttgttgttggtttgttttttgttttttttttttaatcaagaccattgtttcatgttaatgcagctgctgagaagatttttttttaatgactgaggaaaacttgtttacagctccagcatataaggaaagtgttcaaggccagatatgcctcagatatttaacccagtaaggccttagttgtaccataaatacttttgtggtcaacaaaaacttttcagctcttcacagaagacagttactcaacattttttggatgtgccacagtttcgagtttttcgatatttaaattttttggcttttcatctaagtttgggtttgtattttttccttctaaactcttcatgtggcagagtcttctatgttttcacagctttttcattacagaaaagaacacttgctcttctgtgattattgtcatgtattagggctaatgctgtgttgtctcccacctggaactgaattgcttggtggaacatatgctttcactgtttgtgcaatatgcatttatttcttatatgaatgctttaaagtcatttgaggttagatcttttaattcctattttctgcttcattggtcactttttttttattgtagtataagatgttagattctgtaatcttcacattcattttagcaggtactgagtgatgctgtatatacaaataagtgtattgttttgatttttagaccaccacatgggcatgcttgactatttcttatttcaaatgtctgctaatgcagagtaggctactccatgatagtgttaaaaaacaaaatttgctaacaatgtgatataaagactttaaaagttacacattatgtgggagccctatcatctttacaaaagtttcctactgtaaagtgcttttattttcagttttcatttgatagtactcaaccataattaaagttgcataagataattgctttacatttcacatacctatatttatctgagtgctgtctaaaactgttgtgctagccaaagtaatgctatgctatgaaatcatttgcagaattaacccgtgagttaatgttaaatgcactgttattgccatgtgaagaggcatcgactttgataccaccatcatgttcagaccattttatacatttcagtggcctttttttttttttaaggaaaaaaaagccgcaaaacccaagtacatagtgacgatggcttttatttggacaaatagcttttatattttcattaaaccatgcaaaaaatactacatctttctggcacataactgtctccttaaccactggaacagttcagccatttgaataaattgtacattgtaaagcttatagtagctgattgtattattgattgtatctgtatactatattaaatgtgaatttgtaccccttcattttaaaaggtcacttgtgttctactggcctattttaagattactttggggttggggaagggtgttttggtaagcaggattttaagtcctctctctctccgattggttttatgaagatataaggttatgctcttactaccaagctcaggattcttgattttaaaggtacaaggatagttgtgggagttttatttttggttatatttgaactggtatgaatggtaggtctgaatattgagaatttcccatgggtcttatgtgggagggtaaaatataccaggataacctggatccagtttgagtgacctgccaccatgttctgggttgcacaccaagttagggcatgctatggtttatatttgtgaagtttgggatgcctgtggaaggaatgattaaataccatgtttctaatattttagtgttttgtatttaggttatttattctttgtatctaaaactgaacagctactgtgctatattgattttattggtagtattgagcagaccttgtttctgcatgaaactagttgcaaaaccccactattttggaaatacaaaatgtattttgacatatacaaataaaatggaataaaactattttaaatgtgtgaacttttaatgaagacattttaaattttgttctgagatatttaaattctgcatgggtattttttcactaattgctttacttggataccaatttgaataatttctgaaattgtaatattgtgataatttgcacagcattgtacatgcacatctgtaaatgcaatcttaattgccatatttatgcaatcctgtgtaccaatttggacaaatgtttatatattttacataaagctgtctgtatgcagaatctgaaaaaaaaaaaaaaaa

SEQ ID NO: 19036 - DNA, 2409 bp, Homo sapiens
  SIMILAR (1)..(2406): 1001254mologous to Homo sapiens PTH-responsive osteosarcoma B1 protein,accession number AF095771,Smith-Waterman Score=4140.
atgggatacctaaggatctttagcccccatcctgcaaaaacaggagatggagctcaagccgaagatttgcttctagaagtggatctacgagatccagtacttcaagtggaagtaggaaagtttgtttcaggtaccgaaatgctacatttggctgtgttacattctagaaaactttgtgtctactctgtctcaggaaccttgggtaatgtggaacatgggaaccaatgtcagatgaaattgatgtatgaacataatcttcagagaacagcctgcaatatgacctatggatcatttggtggtgtaaaaggtcgagatttaatttgcatccagtctatggatgggatgctgatggtatttgagcaggagagctatgcttttggaagatttctccctggctttcttctgcctggtcctcttgcctacagttcccgtacagattccttccttactgtctcttcctgccaacaagtggaaagttataagtaccaggtacttgcttttgcaacagatgcagataaaaggcaggagactgaacagcaaaaacttggttctggaaaaagactagttgtggattggactctaaatattggagagcaagcccttgacatatgtattgtctctttcaatcagtcggcatcctctgtttttgttcttggtgagagaaactttttttgccttaaggataatggacaaattcgattcatgaagaggcttgattggagcccaagttgttttctgccatattgctcagtttctgaaggaacaataaatactttgattggaaatcataataacatgctgcatatttatcaagatgtgacactgaagtgggccacccaacttccccacattcctgtagcagtaagagtgggctgtttgcatgatttaaagggagtgatagtcactctgagtgatgatggtcacttgcagtgttcatacctggggacagatccttctctgttccaagctccaaacgttcaatctcgagaactaaactatgatgaacttgatgtagaaatgaaagaacttcagaaaatcatcaaagatgttaacaaatcacaaggtgtttggcccatgactgagagagaagatgacttgaacgtttctgtcgtggtttctcctaactttgattcagtttctcaagcgaccgatgttgaggtgggaactgaccttgtcccttctgtcacggtgaaggtcacactgcagaacagagtgatattgcaaaaagccaaattatcagtctacgtgcaaccaccattagaattgacttgtgatcagttcacctttgaatttatgagcattccgcgagttatccaatgtaaatttagacttcccctaaagttaatttgcctaccaggtcagccttcaaaaactgcaagccacaaaattactattgataccaacaaatctccagtcagtcttcttagtctcttcccaggttttgccagtcagtcagatgatgatcaggtgaatgtaatgggttttcacttcttaggaggtgctcgaattactgttcttgcttccaaaacttctcaacgatatcgcattcagagtgaacaatttgaagatctttggctcataaccaatgagcttattcttcgccttcaagaatattttgaaaaacagggagtcaaagattttgcatgttctttttcgggatctataccccttcaagaatattttgagttgattgatcatcattttgagctacggataaatggtgaaaaattagaagaactcttatctgagagagctgtacaatttcgggccattcaacgccggctactagcaagattcaaagataaaactcctgcccctcttcaacacctggacaccttgttagatggaacctacaagcaggtaattgctctagcagatgcagtggaggaaaaccaaggcaatctgttccagtcattcaccaggctgaagagtgccacccatttggtgattctgctgatcgcgctgtggcagaagcttagtgctgaccaggttgctattctggaagcggcatttctgccgctacaagaagacactcaagaattgggctgggaagaaacggtggatgccgccatttcccacctgttgaagacttgcctgtcgaagagttctaaggagcaggctttgaacctcaacagccagctgaacatacccaaagacacaagccaactgaagaaacatatcaccttgctctgcgatagattatccaaaggtggccgtctctgcctaagtaccgatgcagcagccccacagaccatggtcatgccaggtggttgtactacaatcccagagtcagacctagaagaaagatcagtagaacaagactctacagaactgtttaccaaccacagacatctcactgcagagacacccaggcctgaagtttcacccctccaaggagtctcggaataa

SEQ ID NO: 19037 - DNA, 1985 bp, Homo sapiens
  SIMILAR (254)..(1333): 911254mologous to Homo sapiens PTH-responsive osteosarcoma B1 protein,accession number AF095771,Smith-Waterman Score=1640.
tgaccttgtcccttctgtcacggtgaaggtcacactgcagaacagagtgatattgcaaaaagccaaattatcagtctacgtgcaaccaccattagaattgacttgtgatcagttcacctttgaatttatgacaccagatttgactagaacagtaagcttttctgtttatctgaaaagaagttatacaccatcagaattggaaggaaatgctgttgtttcttattccagaccaacagatcgaaatcctgatggcattccgcgagttatccaatgtaaatttagacttcccctaaagttaatttgcctaccaggtcagccttcaaaaactgcaagccacaaaattactattgataccaacaaatctccagtcagtcttcttagtctcttcccaggttttgccagtcagtcagatgatgatcaggtgaatgtaatgggttttcacttcttaggaggtgctcgaattactgttcttgcttccaaaacttctcaacgatatcgcattcagagtgaacaatttgaagatctttggctcataaccaatgagcttattcttcgccttcaagaatattttgaaaaacagggagtcaaagattttgcatgttctttttcgggatctataccccttcaagaatattttgagttgattgatcatcattttgagctacggataaatggtgaaaaattagaagaactcttatctgagagagctgtacaatttcgggccattcaacgccggctactagcaagattcaaagataaaactcctgcccctcttcaacacctggacaccttgttagatggaacctacaagcaggtaattgctctagcagatgcagtggaggaaaaccaaggcaatctgttccagtcattcaccaggctgaagagtgccacccatttggtgattctgctgatcgcgctgtggcagaagcttagtgctgaccaggttgctattctggaagcggcatttctgcccgtacaagaagacactcaagaattgggctgggaagaaacggtggatgccgccatttcccacctgttgaagacttgcctgtcgaagagttctaaggagcaggctttgaacctcaacagccagctgaacatacccaaagacacaagccaactgaacgaaacatatcaccttgctctgcgatagattatccaaaggtggccgtctctgcctaagtaccgatgcaagcagccccacagaccatggtcattgccaggtggttgtactacaatcccagagtcagacctagaagaaagatcagtagaacaagactctacagaactgtttaccaaccacagacatctcactgcagagacacccaggcctggtaagagactggatggccttcacaagcgttagttaagtcagaagcagtgacaatctggtcagtttttgtcataccagagagcattccgcaaagctgcttgttttccaatttcttcattcttccccttagcactggtgcagctgaatttgatcctttgtgtattcctgtcactattcagatcttttctctctctttctctcttactctctttttttccagaagtttcacccctccaaggagtctcggaataattcaagtagagttgtttggttgagaggaacatccccatctcaaggccgaacctgtgtgaacctcatgccaagcacagatatagggctggcgcaggtgcttcccaaagcttaccttcctggagatgacatgcatagaaagaggggttgggactttttacttcactaggagaacttgtaacaccatggggaagtcagctgaaacttgtcttgttttgccaggaaaggaagtagttgcctttggtcatccatctgctaatagtcacagaatacagtgaaatgacatagttttgggttagattttataatgcaaagattcagatccaaaataatttcataccccattttttcacagaattcttatatagtaaatgtatcaagtttaataaagcatctcattgtc

SEQ ID NO: 19038 - DNA, 825 bp, Homo sapiens
  SIMILAR (127)..(231): 1001254mologous to Homo sapiens unknown,accession number U85997,Smith-Waterman Score=185.
atgggtgtcagtgttttggatttcagccattctgataagtgtgaagtggcatctcgttttgcatcagggatgccagagcccaccaacattgttcttcccaaactggaagtggcagacactctgggtggttgtactacaatcccagagtcagacctagaagaaagatcagtagaacaagactctacagaactgtttaccaaccacagacatctcactgcagagacaccaaggcttggtagagactggatggccttcacaagcaagtttcacccctccaaggagtctcggaataattcaagtagagttgtttggttgagaggaacatccccatctcaaggccgaacctgtgtgaacctcatgccaagcacagatatagggctggcgcaggtaaatcagggatttcttcttggtttgctggtacatcccttgcctctcagtcatttctcatctttgtcctccacctctgggccttctccaagcccagacatcatagccatggccaaccacccatgggacaaggagtgcctgagccttggtagggaggtggatggatacaaggctcaattttggctaaagcactctgccaaaagggaggaggacaagacccaacagagcctaaaggctcctgtccttgcagtgtgtgagtcaccccaggactggacagaggatcgaggcctggaccctaagaataccccactccctgagccagcatctccagctgatggagggacccaaaagctaagcggggtcaatcagacaccttccctgggatggttaaaactgggacaggccaatggagaaggtccttctgtctttggtctgtga

SEQ ID NO: 19039 - DNA, 2142 bp, Homo sapiens
  SIMILAR (3)..(1169): 981254mologous to Homo sapiens PTH-responsive osteosarcoma B1 protein,accession number AF095771,Smith-Waterman Score=1927.
cagtttctcaagcgaccgatgttgaggtgggaactgaccttgtcccttctgtcacggtgaaggtcacactgcagaacagagtgatattgcaaaaagccaaattatcagtctacgtgcaaccaccattagaattgacttgtgatcagttcacctttgaatttatgaatcgaaatcctgatggcattccgcgagttatccaatgtaaatttagacttcccctaaagttaatttgcctaccaggtcagccttcaaaaactgcaagccacaaaattactattgataccaacaaatctccagtcagtcttcttagtctcttcccaggttttgccagtcagtcagatgatgatcaggtgaatgtaatgggttttcacttcttaggaggtgctcgaattactgttcttgcttccaaaacttctcaacgatatcgcattcagagtgaacaatttgaagatctttggctcataaccaatgagcttattcttcgccttcaagaatattttgaaaaacagggagtcaaagattttgcatgttctttttcgggatctataccccttcaagaatattttgagttgattgatcatcattttgagctacggataaatggtgaaaaattagaagaactcttatctgagagagctgtacaatttcgggccattcaacgccggctactagcaagattcaaagataaaactcctgcccctcttcaacacctggacaccttgttagatggaacctacaagcaggtaattgctctagcagatgcagtggaggaaaaccaaggcaatctgttccagtcattcaccaggctgaagagtgccacccatttggtgattctgctgatcgcgctgtggcagaagcttagtgctgaccaggttgctattctggaagcggcatttctgccgctacaagaagacactcaagaattgggctgggaagaaacggtggatgccgccatttcccacctgttgaagacttgcctgtcgaagagttctaaggagcaggctttgaacctcaacagccagctgaacatacccaaagacacaagccaactgaagaaacatatcaccttgctctgcgatagattatccaaaggtggccgtctctgcctaagtaccgatgcagcagccccacagaccatggtcatgccaggtggttgtactacaatcccaagagtcagacctataagaaagatcagtagaacaagactctacagaactgtttaccaaccacagacatctcactgtagagacacccaggcctgaagtttcacccctccaaggagtctcggaataattcaagtacagttgtttggttgagaggaacatccccatctcaaggccgaacctgtgtgaacctccatgccaagcacagatatagggctggggcagggtgtttcccaaagcttaccttcctggagatgacatgcatagaaagaggggttgggactttttacttcacttaggagaacttgtaacaccatgggggaagtcagcttgaaacttgtcttggttttgccaggaaaaggaagtagttgcctttggtcatccatctgctaatagtcacagaatacagtgaaatgacatagttttgggttagattttataatgcaaagattcagatccaaaataatttcataccccattttttcacagaattcttatatagtaaatgtatcaagtttaataaagcatctcattgtcaaataatatcttggattttatttataattagagggatttatgagtgattgctctacattatttcttcaaaggaaaggaaaggaattgaagactttgctactctctggtaagacttgaatgtgattattttataaataaaagaaccactatgaaactttcatgtgatttgttctattaagctaaacgtggaagaagggaagttttctagtattgtatgaaaatgtttaaatattttcaaggaagctagtacattaacatccccttttcattaccccattgggtggcaccttttaaaaatccaggttattaaaggattcacactttattacagttaaaatttaaggtttttatgtgtaagaagtgaaagaaactttgctaatttcaagttcgaattacagttgtgagattgatttatttaaataaaaatatgcctttgccagtt

SEQ ID NO: 19040 - DNA, 801 bp, Homo sapiens
  SIMILAR (143)..(625): 431254mologous to Homo sapiens ribosomal protein L29,accession number Z49148,Smith-Waterman Score=171.
  misc_feature (1)...(801): n = a,t,c or g
gggcggtccattganncccttnaatcgcagaccctattgcagngngctggaattcggcgcttcgggagccgcggcttaatggtgcagacatggccaagtccaagaaccacaccacaaacaaccagttcccgaaaatggcccaagaaatggtatcaagaaacccccgatcaccaaagatacgaattctcttaaagggggtggcccccccaagtttcctgagcgaacatgctgctttgcccaagaaagccccaacaaaaaagggccctaaagaagattgcaggccaacaaattgccaagggccatgagtgcaacgttgccgagggctatcaaggcccctcgtaaaaccccaaggaggtttaagcccaaagattccccaaaggggtgtcaagccgcaagctcgattcgacttgccttacatttgcccaaccccaagctttgggaagcgttgctcgttgcccgtaattgccaaggggcccaaggctgatgcccgccaaaggccaaggccaaggccaaggccaagccaaggccaaagccaaggccaagggccaaggatcaaaaccaaggcccagggctgcagccccaagcttcagttccagctcagggctcccaaacgtacccaggccccttacaaaggcttcagagtagatatctctgccaacattgaggacagaaggactggtgcgaccccccacctcccgcccctgggctaccatctgcatggggctggggtcctcctgtgctatttgtacaaataaacctgaggcaggaataaaaaaaaaaaaaaaaaaaaaaaaaaagggc

SEQ ID NO: 19041 - DNA, 2449 bp, Homo sapiens
  SIMILAR (314)..(1057): 961254mologous to Homo sapiens FUSE binding protein 3,accession number U69127,Smith-Waterman Score=1223.
gaagttctttatggtagcactgccctttgtttctgtggcttttctggctgagacagaaatttctgaagatcatcggccctttgacatcctttaccaaacaacgcagtggaccagaacccacggaggagcatatgtgcgtgttcctcatgactacagctgctgtggagcagtccttaacaatgcatccaaggagggtaaatcttctcatttgtttttaaaagagaaagaaggatctctttccatctttacattgagtttggatccagagcaggagggagtaggtaaccagttaggggccttggtacatcaaagacaagccaaacggctcctgggacagattgtggaccgctgtcgaaatggacctggctttcataatgacatagacagcaacagcacaatccaggagattctcattcccgcatctaaagtgggtctggtcatcggcagaggaggggaaacaatcaagcagttgcaggagcggacaggggtgaagatggtcatgatccaggatggcccattgcccacgggagcagacaagcctcttcgtatcactggagatgcatttaaagtacagcaagcaagagaaatggtactagagattatccgagaaaaagaccaagctgactttcggggtgtacgcggcgatttcaactctcgaatgggaggaggcagtatagaggtatctgtgcctaggtttgctgtggggattgtaataggaagaaacggggaaatgatcaaaaagatccagaatgatgctggtgtgaggattcagtttaaaccagatgatgggattagtccagaaagagctgcccaggtcatgggccctccggatcggtgtcagcatgcagcgcatatcatcagcgagctgattcttacagcccaggaaagagacggctttggaggcctggcagcagccagaggaagaggtcgtggccgtggcgactggagcgtgggagcccctggtggcgtccaggagataacatacacggtgccagccgataagtgtggcctcgtcataggcaaagacactgtgggcttatgctcttgcaaaatgcaagaaaccgtgttgtcttttagactgaaccactcagagttggtatgggttcgtgttcatttgccggcaggtgtgcgggctgggggtgagaacatcaaaagcatcaaccagcagtcaggggcgcacgtggagcttcagaggaacccccctcccaacagcgaccccaacctgcggagattcaccatcaggggggttccccagcagatcgaggtggccaggcagctcatagatgagaaagttggctacctttcctccaaggagctccgggtgcttcccaaacatggctgccaaggtgaatgggaacccccacagcacccctgtgagggctggggcagcacctaccaggcgtggcagcagcccacacagcaggtcccaagccagcagagccagccgcagagcagccagcccaactacagcaaggcctgggaagactattacaaaaaacagagatgtttcttgctggttggaagagatcgggttgaaggctaccagagaagtggtccccctggtgttggcatcatcgccaggttcatggcccttctaggggttggaggtcacgccgccagcgctgctcctcaggccagctccccaccggactacacaatggcctgggcagaatattacagacagcaggtcgctttctacggacagacgttagggcaggcgcaggcccacagccaggctctggggaagcaagttgggtcccacaccctcgatgctggtgtgagccttcacctctgcttgctgtatccatgccaatcaacaggatccctgttgagtagcagggacacatatgtggatggcattcaggtggctttgcctgtttctaattggtatagagttctaattgctgctaaaattgattcaattcctcacttgaataattccacacctctagtggacccctcagtatatggatacggagtacaaaaacggcccttggatgatggagaagaaggtctggttggacccgatgagaccaatgaaatccccaatgccaacttccgtcagcagatccggaagctgatcaaagatgggctgatcttgcgtcaccgcaagcctgtgacggtccattcccgggctcaatgctggaaaagcaccttggcccgccggaagggcaggcacttgggcatagaatcgaagaagattgatcgccacatgtatcacagcctgtacctgaagttgaaggggaatgtgttcaaacacaagcggattctcacggaacacagccacaagctgaaggcagacaaagcccgcaagaagcccctggctgaccaggctgaggcccgcgggtctaagaccaaggaagcacgcaagctccgtgaagagcacctccagaccaagaaggaagagatcatcaagactttgtcccaggaggaaaaggccaagaaataa

SEQ ID NO: 19042 - DNA, 696 bp, Homo sapiens
  SIMILAR (91)..(690): 701254mologous to Homo sapiens ribosomal protein L19,accession number X63527,Smith-Waterman Score=606.
atggctgtcatggaaaaactttactgggtgaacagggaagagtcgtatgcctctctaagagtccatcttccaatctgcaatgccacaaccatgagtatgctcagtcttcagaagaggcttgcctctagtgtcctccgctgtggcaagaagaaggtctggttggaccccaaggagaccagtgaaatcgccaatgccaactcccatcagtggatccgaaagctgatcaaagatgggctgatcatccacaagcctgtgactgtccattcctggctcgataccggaaaacaccttggcctgccagaagggcaggcacatgggcatatgaaaggctacagccaatgcccgaatgccagagaagatcatgtggatgaggggatgaggattctatgccagcttctcagaagatactgtgattctaagaagattgatcaccacatgtatcacagaagataccatgaatctaagaaggttgatcgccacatgtatcacagcctgtacctgaaggtgaaggggaatgtgttcaaaaacaagcggatcctcatggaacacatccacaacctgaaggcagacaaggcctgcaagaagctcctggctgaccaggctgagacccgcaggtctaagatcaaggaagcacgcaagcaccgtgaagagcacctccaggccaagaaggaggagatcatcaagactttggtctaa

SEQ ID NO: 19043 - DNA, 693 bp, Homo sapiens; identical to SEQ ID NO: 8699
  SIMILAR (167)..(277): 721254mologous to Drosophila melanogaster ribosomal protein L19,accession number X74776,Smith-Waterman Score=149.

SEQ ID NO: 19044 - DNA, 814 bp, Homo sapiens
  SIMILAR (11)..(649): 621254mologous to Homo sapiens Human secreted protein, SEQ ID NO: 7925,accession number G03844,Smith-Waterman Score=532.
  misc_feature (1)...(814): n = a,t,c or g
gcacgaggccatgagtatgctcaggcttcaaaagaggctcgcctctagtgtcctccgctgtggcaagaagaaggtctggttagaccccaatgagaccaatgaaatcgccaatgccaactcccgtcagcagatccggaagctcatcaaagatgggctgatcatccgcaagccttgtgacggtccattcccggcttcgttgccggaaaaacacctttggcccggcgnaaagggcaggcacatgggcataggtaagcggaaggtaccagccaatgccccgaatgcccagagaaggtcacattggatgagggagaatgagggattttgccgccggcttgcttcagaagatacccgtgaatcctaagaagatcgatcgcccacatgtagtcacagccttgtacctggtaggtgaaggggaatgtgttcaaaaacaagcggattcttcatggaacacatccacaagctgaaggcagaacaaggcccgcaagaagctccctggctgacctaggctgaggcccgcaggtctaagaccaaggaagctaccaagcgccgtgaagagcgcctccctccaggccaagaaagagggagatcatctagactttatccaaggaggaagagaccaagaaataaaaccttcccattttgtctgtacattactgccctctgttgattacataggttcagccctaaaataaaacaagccttaatctgcaaaaaaaaaaaaaaaagtcggcgcggccgcaaatttgtaggggtagttgcgcccgggatttggtgcgggggttgcggggtgggagaaggttgtccccagggggga

SEQ ID NO: 19045 - DNA, 449 bp, Homo sapiens
  SIMILAR (242)..(448): 941254mologous to Homo sapiens mRNA export protein,accession number U84720,Smith-Waterman Score=351.
  misc_feature (1)...(449): n = a,t,c or g
aattcggacnnnccttaaggaggcttcgggctcctgggatttctgtccgcgctcctggccctcgtccttcgcgccagagcaggttcgcaaactcctcagacccttctgctcccggccgccgctttccgccggggcgagacccccaggttcaaaatgagcctgtttggaacaacctcaggttttggaaccagtgggaccagcatgtttggcagtgcaactacagacaatcacaatcccatgaagcccaccaaccttgccggggaactttcttattgcaggatcatgggctaatgatgttcgctgctgggaagttcaagacagtggacagaccattccaaaagcccagcagatgcacactgtgcctgtgcttgatgtctgctggagtgacgatgggagcaaagtgtttacggcatcgtgtgatataactgccanaatgtgtgacctcagcc

SEQ ID NO: 19046 - DNA, 470 bp, Homo sapiens
  SIMILAR (3)..(215): 971254mologous to Homo sapiens mRNA export protein,accession number U84720,Smith-Waterman Score=376.
gtcatcgatctaatggaaccaacacttcagctcctcaggacatttatgcggtaaatggaatcgcgttccatcctgttcatggcacccttgcaactgtgggatctgatggtagattcagcttctgggacaaagatgccagaacaaaactaaaaacttcggaacagttagatcagcccatctcagcttgctgtttcaatcacaatggacatggatttcaacccctggagaaaacgatgtcattgttcagcagctgagagcccaggcgtccgcggcgacttgccgtctctccattccactgcctgttgcagagtttttctgtaactaagggggttgaggttattgtagacgttagattgcggcaccgccagggattttgcagcgcttcagtgtacgtgttagagaatattggaaaagcgtctgtgagccccgtgctgtatattgtaataaagtcttatgcagattgctaaaaa

SEQ ID NO: 19047 - DNA, 474 bp, Homo sapiens
  SIMILAR (173)..(472): 841254mologous to Homo sapiens mRNA export protein,accession number U84720,Smith-Waterman Score=450.
ttttaaagacaaacagaacaagcctactggttttgccctgggaagtatcgaggggagagttgctattcactatatcaaccccccgaacccgtaagtgtgactctgtcagcttgcagatttcactggactttttttaacaaaggaagacttacatgaacctttgtctttcagcgccaaagataacttcacctttaaatgtcatcgatctaatggaaccaacacttcagctcctcaggacatttatgcggtaaatggaatcgcgttccatcctgttcatggcacccttgcaactgtgggatctgatggtagattcagcttctgggacaaagatgccagaacaaaactaaaaacttcggaacagttagatcagcccatctcagcttgctgtttcaatcacaatggaaacatatttcatacgcttccagctacgactggtcaaagggacatgaattttataatccccagaaaaaaaaa

SEQ ID NO: 19048 - DNA, 1877 bp, Homo sapiens
  SIMILAR (323)..(1405): 431254mologous to Homo sapiens mRNA-associated protein mrnp41,accession number U85943,Smith-Waterman Score=479.
ttggtaccgagctcggatccactagtaacggccgccagtgtgctggaattcggcttctggttcggcccacctctgaaggttccagatcgatagtgaattcgtggttttttccgcggtagtcagggcagtttctaccgcaggcttaaggaggcttcgggctcctgggatttctgtccgcgctcctggccctcgtctcttcgcgccagatcaggttcgcaaactcctgagacccttctgctcccggccggcgttttccgccggagcgagacccccatgtttaaaatgagcctgtttggaacaacctcacgttttggaaccagtgggaccatcatgtttggcagtgcaacttacagacaatcacaatcccattgaaggatattgaaagtaacattcattttccttgatggatagcattggtttgttcttgtctttttagcccaccaaccttgccggggaactttcttattgcaggatcatggggctaatgatgttcgctgctggggaagttcaagacagtggacagaccattccaaaagcccagcagatgcacactgggcctgtgctttgatgtctgctgggagttgacggtgggagcaaagtgtttacgggcatcgtgtggttaaaactgccaaaatgtggggacctcaggcagtaaccaaggcgattacagatcgcacagcatggatgctcctgtttaaaaccatccattggatcaaagctccaaactacagctgtgtgatgactgggagctgggataagactttaaagttttgggatactcgatcgtcaaatcctatgatggttttgcaactcccctgaaaggtgttactgtgctgacgtgatataccccatggctgtggtggcaactgcaggagaggggcctgattgttcttattcagctaggaggattcaaccttctgaattcagaaggatagaatctccactcgaaacatcagcatccggtgtgtggctattttttaaagacaaacagaacaagcctactggtttttgccctggaaagtatccagggaagagttgctattcactatatcaaccccccgaaccccgcccaaagatactttcacctttaaaatgtcatcgatctaatggaaccaacacttcagctcctcaaggacatttatgcggtaaatggaatccgcgttcccatcctgttcatgggcacccttgcaactgtggggatcttgatggtagattcagcttttgtggacatagtatgccagaacaaaacttaaaaactttcgggaacagttagatcagccccatcttcagcttgctggtttcaatcaccaatggaaaacatattttgccatacgcttcccagctacgactgggtcaaaggggaccatggaattttataatcccccagaaaaaaaaatttacatttttccctgcgtaaatgcaggccgaagagctaaaagccccaggaaataaggaagtagtggctggaagaactctgggctcagcccagagtttgtttctcctccactctggcctcatctctgtacgaatttgggcccccaaccttgttggggttgtcagcccatggacgatggagtttcaaccccctggagaaaacgatgtcattgttcagcagctggagagccccaggcgtcccgcgggcgacttgccggtcttctccattcccactggcctggttgcagaagttttttctggtaaacctaaaggggggttgaagggttattggtagaccggttagaatttgccggggcaccccaaggggaattttgcagcgcttcagtgtacgcggtagaaaataatggaaaaagcgtttgtgagccccgtgctggattttgtaataaagtcttttgcagattgcaaaaaaaaaaaaaaaaaaa

SEQ ID NO: 19049 - DNA, 1257 bp, Homo sapiens; identical to SEQ ID NO: 11306
  SIMILAR (430)..(1254): 991254mologous to Homo sapiens EF-1 alpha (aa 1- 463),accession number X03558,Smith-Waterman Score=1427.

SEQ ID NO: 19050 - DNA, 924 bp, Homo sapiens
  SIMILAR (277)..(882): 821254mologous to Homo sapiens elongation factor 1-alpha (AA 1-462),accession number X16869,Smith-Waterman Score=824.
aaatttgagaccagtaagtactacgtgagtatcattgatgccccaggacacagagacttcatcaaaaacatgattacagggacatctcaggctgactgtgctgtcctgattgttgctgctggtgttggtgaatttgaagctggtatctccaagaatggacagacccatgagcatgcccttctggcttacacactaggtgtgaaacaactaattgttggtgttaacaaaatggattccactgagcaaccctacagccagaagacatatgaggaaatcgttaaagaagtcaacacttacattatgaaaattggctgcaaccttgacacagcagcatttgtgcttatttctgtcaatgttacaactgaagtaaagtctgttgaaatacaccatgaagctttgagtgaagctcttcctggggacaatgtgggcttcaatgtcaagaacgtgtctgtcaaggatgttcgtcatggcaacaatgctggtgacagcaaaaacgacccaccaatggaagcagctggcttcactgctcaggtgattatcctgaaccatccaggccaaataagtgctggctatgcccttgtactggattgtcacacggctcacactgcatgcaagtttgctgagctgaaggaaaagattgatcgctgttctggtaaaaagctggaagacggccctaaattcttgaagtctggtgatgctgccatcatttatatggttcctggcaagcccatgtgtgtagagagcttctcagactatccacctctgggtcactttgctgttggtcatatgagacagacagttgccatgggtatcatcaaagcagaggacaggaaggctgctggagttggcaaggtcactaagtctgcccagaaagctccaaagcctagtgaatattatcccttgtacctgccaccccagtcttaa

SEQ ID NO: 19051 - DNA, 1389 bp, Homo sapiens; identical to SEQ ID NO: 11409
  SIMILAR (76)..(855): 941254mologous to Homo sapiens EF-1 alpha (aa 1- 463),accession number X03558,Smith-Waterman Score=1290.

SEQ ID NO: 19052 - DNA, 1127 bp, Homo sapiens
  SIMILAR (361)..(729): 961254mologous to Homo sapiens elongation factor 1-alpha (AA 1-462),accession number X16869,Smith-Waterman Score=612.
  misc_feature (1)...(1127): n = a,t,c or g
ggaattctggcacgagcngggtttgccgccagaacacaggtgtcgtgaaaactacccctaaaagccaaaatgggaaaggaaaagactcatatcaacattgtcgtcattggacacgtagattcgggcaagtccaccactactggccatctgatctataaatgcggtggcatcgacaaaagaaccattgaaaaatttgagaaggaggctgctgagatgggaaagggctccttcaagtatgcctgggtcttggataaactgaaagctgagcgtgaacgtggtatcaccattgatatctccttgtggaaatttgagaccagcaagtactatgtgactatcattgatgccccaggacacagagactttatcaaaaacatgattatcctgaaccatccaggccaaataagcgccggctatgcccctgtattggattgccacacggctcacattgcatgcaagtttgctgagctgaaggaaaagattgatcgccgttctggtaaaaagctggaagatggccctaaattcttgaagtctggtgatgctgccattgttgatatggttcctggcaagcccatgtgtgttgagagcttctcagactatccacctttgggtcgctttgctgttcgtgatatgagacagacagttgcggtgggtgtcatcaaagcagtggacaagaaggctgctggagctggcaaggtcaccaagtctgcccagaaagctcagaaggctaaatgaatattatccctaatacctgccaccccactcttaatcagtggtggaagaacggactcagaactgtttgtttcaattggccatttaagtttagtagtaaaagactggtttaatgataccaatgcatcgtaaaaacctttcaaaggaaagggagaatgtttggggaccacttgggtttcttttttgcgtgtgcagttgtaggtattaggttttaaaatcagtactttttaatggaacaacttggcccaaaaatttgcaccaaaattttggaacccattaaaaagggtaaatggggaaaaaaaaactgtgggggggcgggccgtttttaaagataccttggggggccccaaagtttaccccggcttagcaaaggaatttcttttttccctataagggag

SEQ ID NO: 19053 - DNA, 1871 bp, Homo sapiens
  SIMILAR (376)..(1380): 431254mologous to Xenopus laevis 42Sp48,accession number X56699,Smith-Waterman Score=409.
gcttttttttttttttcgcaacgggtttgccgccagaacacaggtgtcgtgaaaaactaacccctaaaagccaaaatgggaaaggaaaagactcatattcaacattgtcgtcattggacacgtagattcgggcaagtccaccactactggccatctgatctataaatgcggtggcatcgacaaaagaaccattgaaaaatttgagaaggaggctgctgagatgggaaaggactcattcaagttgtgcctgggtcttggataaactgaaagctgagcgtgaacgtggtatcaccattgatatctccttgtggaaatttgagaccagcaagtactatgtgactatcattgatgccccaggacacagagactttatcaaaaacatgattacaggggacatctcaggctgactgtgctgtcctgaattgttgctgctggtgttggtgaatttgaagctggtatctcccaagaatgggcagaacccgagagcatgcccttctggcttacacactggggtgtggaacaactaattgtcggtgttaacaaaatgggattccactgagccaccctacagccagaagagatatgaggaaatgtggttaagggaagtcagcactttccattaagaaaatttggctacaacccccgacacagtagcattttgtgccaatttcttggtttggaattggtgacaacatgcctggagccaagtgcctaacatgccttggttcaagggatgggaaagtcacccgtaaggatggcaatgccagtggaaccacgctgcttgaggctctggactgcatcctaccaccaactcgtccaactgacaagcccttgcgccctgcctctccagggagtccaccaaattgggtggtattggtactgtctcttctgccccgatggaaacctggtttctccaaccccggtatggtggtcacctttgctcccagtccacggtaacaacggaaagtaaaatcctgtcgaaaatgcacccatgaagctttgaagtgaagctccttcctggggaccaatgtgggccttcaatgtccaagaatgtgttctgtcaaggaatgtttcgtcgtggcaaacggttgctgggtgaccagcaaaaaatgaccccacccaatgggaaagcagctgggcttcactggtcaagggtgattatccttgaaccatcccaggccaaaataaggcgccgggcctatgcccctgtatttggattgcccacacgggctcacatttgcatgcaaagtttgctgagctgaaggaaaaagattgatcgccgtttctggtaaaaagctggaagatggccttaaattcttgaagtctggtgatgctgccattgttgatattgttcctggccaggcccatgtgtgttgagagcttctcagactatccaacctttgggtcgctttgctgttcgtgatatgagacagacagttgcggtgggtgtcaatcaaaagcagtggacaaaaaaggctgctgggagctgggcaaggtcaccaaagtctggcccagaaaagctccagaaggctaaatgaatattatccctaatacctgccacccccactctttatcaggtgtgggaagaacggttctcagaactgttttgtttcaattggcccatttaaggttaagtagtaaaagcattggttaaatgataaccaatgcatcgtaaaacctttcagaaggaaaggagaatgttttgcggaccactctggttttcttttttgcgcgtggcagttgtaagttattagtttttaaaatcagtactttttaatggaaacaacttgacccccaaatttgtcacagaattttgagacccattaaaaaagttaaatgagaaaaaaaaaaaaaaaaaaagggcggccgct

SEQ ID NO: 19054 - DNA, 598 bp, Homo sapiens
  SIMILAR (45)..(455): 481254mologous to Homo sapiens ribosomal protein L23a,accession number U37230,Smith-Waterman Score=195.
gaattcggcacgagggcgaagaaggaagctcctgcccctccgtaaagcttgaagccaaagcgaaaggcttttaaagggccaagaaaggcagtttttaaaaggtgtcccacagccaccaaaaagaagaagatcccgcacgttcacccacctttccgggcgggccgaagacactgcggactccggagacagccccaaatatcctcggaagagccgcgtcccaggagaaacaaggcttgaccacctatgcctatccatcaagtttcccgctgacccactgagtcctgcccatgaagaagatagaagacaacaacacacttgtgttcattgtggatgttaaagccaacaagcaccacgattaaacaggctgtgaagaagcttgtatgacatttgatgtggccaaggtcaacacccctggattcggcctgatggagagaagaatggcatatgttcgacttggctcctgatttaccgattgcttttgggatgtttgccaacaaaatttggggattcatctaaacttgagttccagcttgcctaatttctgaatatatatatatatatatatatctttttcacccataaaaagaaaaatagaaaa

SEQ ID NO: 19055 - DNA, 1483 bp, Homo sapiens
  SIMILAR (735)..(899): 941254mologous to Homo sapiens RAB5A, member RAS oncogene family,accession number BC001267,Smith-Waterman Score=257.
cgacgatttcgtgtttgtgttttggttcgagaaggagccggcgttttgccttttgggaggaggcagtgggaggatgtttgaggaagaattagtcggaacttcagcgccggcggcggcggcggcggaggaggagaaaggaaagaggaagggggagcggcgagaggcggagacggagcccgacaggggcggcaccacggcacgagccccgcacagtccagtgtgaggggagcggtgctaagagcaggcgacgccgccgccgccaccaccaccgtcatagatacatctctcattctacggtccacgcctgggccttgctgtcaggaagcttctgccccgcagctcggctggctgcggactcacgttgctttacctccagaaagaagaatatcggcccctcgaattctggaaggtcattgtagagtctgaaattagggacttatttcaaatttggacatggctagtcgaggcgcatcatgatcccacggggccagatactggaaataaaatatgccagttcaaacttagtacttctggggagagtcccgctgtttgcaaatcaagcctagtgcttcgttttgtgaaaggccaatttcaatgaatttcaagagagtaccattggggctgcttttctaacccaaactgtagtgtcttgatgacactacagaaaagtttgaaatatggggatacagctggtcaagaacggtaccatagcctagcaccaatgtactacagaggggcacaagcaggccatagttgtatatgatatcacaaatgaggagtcctttgcaagagcaaaaaattgggttaaagaacttcagaggcaagcaagtcctaacattgtaatagctttatcgggaaacaaggccgacctagcaaataaaagagcagtagatttccagggaagcacagtcctatgcagatgacaatagtttattattcatggagacatccgctaacacatcaatgaatgtaaatgaaatattcatggcaataggtaagattaatatctctttttaaatgatcaatataagcaaaacaagtgtgaagcatatttggtttgactgtctcttttttaaaaaatttttgggggtgggtttgtgtgtatgtttatgtgtgtgtgtgagagagagagagagattataccacttttctaagtcccttccacaaaacaatattttgttggtaatattgttaaatttgaaagatgattacctattaggttgtaatactgtcagtttaggcagcttcttccgggtgagttaagccttaacctcttaacctgatagttcagacagacagattttgcaaaggtttcgctgggaaatttggataaatattttttttattagattatactttttaaaaatcaaattattggtaaatataactcagaagaacatgacacataagtatacagattgacaaattattttaatgtaaacattataaggaagatgatttcaaagcatagaggcgtaaggaa

SEQ ID NO: 19056 - DNA, 2659 bp, Homo sapiens
  SIMILAR (218)..(1750): 241254mologous to Sus scrofa gastric mucin,accession number U10281,Smith-Waterman Score=290.
atggccctgctcactgatcccatggtccccgtgcttctgccaccgcagccttcggtgctctgcagtgcgactgcctcttcacttgtctcactccccaccagagtctgggatactgacatgacggctggaactcaagctgcccttatggactatgaggttcacagaaatggaattattgggccatttaagtatattcaaaataacagggaaacagaaacaacttacacgaacagcgccgggaccgtcaggtcagctccgctccaaccaaacaacagggaacagcctggaaccgtcaggtcagccccgctccagccaaacaacagggaacagcctggaaccgtcaggtcagccccgctccagccaaacaacagggaacagcctggaaccgtcaggtcagccccgctccagccaaacaacagggaacagcctggaaccgtcaggtcagccccgctccagccaaacaacagggaacagcctggaaccgtcaggtcagccccgctccagccaaacaacagggaacagcctggaaccgtcaggtcagccccgctccagccaaacaacaggggacagcctggaaccgtcaggtcagctccgctccaaccaaacaacaggggacagcgtccaaccaaacaacagggaacagcctggaacagtcaggtcagctccgctccaaccaaacaacagggaacagcctggaaccgtcaggtcagctccgctccaaccaaacaacaggggacagcgtccaaccaaacaacagggaacaacctggaaccgtcaggtcagctccgctccaaccaaacaacagggaacagccaggaccgtcaggtcagccccgctccaaccaaacaacagggaacagcctggaaccatcaagtcagctccgctccaaccaaacaacaggggacagcgtccaaccaaacaacagggaacagcctggaaccgtcaggtcagctccgctccaaccaaacaacaggggacagcgtccaaccaaacaacagggaacagccaggaccgtcaggtcagccctgctccaaccaaacaacagggaacagtctcgaaccatcaagtcagctccgctccaaccaaacaacaggggacagcgtccaaccaaacaacagggaacagcctggaaccatcaggtcagctccgctccaaccaaacaacaggggacagcgctgggaccgtcaggtcagctccgctccaaccaaacaggggacagcgctgggaccgtcaggtcagctctgctccaaccaaacaacaggggacagcgctggaaccgtcaagtcagctccgctccaaccaaacaacagggaacagcctggaaccgtcaggtcagccccgctccaaccaaacaacagggaacagccgggaaccgtcaagtcagctctgctccaaccaaacaatagggaacagccaggaccgtcaggtcagctccgctccaaccaaacaaccgggaacagccaggaccgtcaggtcagccccgctccaaccaaacaacagggaacagccgggaaccgtcaagtcagctccactccatccaaacagggaacagcgtccaaccaaacaacagggaacagcctggaaccgtcagtggtgccatggatgggtggctaccccagtcaagggtccggccagagtggagacttctgcccacaaggtctctgctgctggtttgccaaagaagaaaacaagccaggtgtgactggaggggcacccaggctcaccctcaacacagtgctccccaaacattcccggacccccagcaggcacgaggctggtagtacccaggccttgtaccacaatggccaggctcagtatgccctgtcttttccacacgaagctgcacctatggctgcattttatgtcgtgacaggaatagaagtcactacggcactcacgctagaggaagcaccatgcactgtagaaatcactacggcactcacgctagaggaaccaccatgcaccgtattctggaataaaacagaaaggaacacacggacattggttcaggacaaaggaagcaacaccaaaggctttgtccagacagccacgtgctgcttccgagctgactgtaaagccagcaggcccagccctcatcctccctcaccccacagagaatggacctcagacctcagacacaagcaggtgtccaaattcccaggagcacacagactgccgggacacccagagcttccgattcaggaggcctgggaccgtggtgagggcaccgaggaagacagcgtggctcaacctttccaggaccgtggtgagggcaccgaggaagacagcgtggctcaacctttccaggacggtggtgagggcaccgaggaagacagcgtggctcaacctttccaggaccgtggtgagggcaccgaggaagacagcgtggctcaacctttccaggaggtcgcatgcgagcggttccggtggttaccttgaatgatcccaagtgtcattccaggggctgcaaatatatcttcagtaggcaaagacaaggcccctgacaataaaatataaatgaccacctgtcttctgcaaccgccccgattatgggagtcgagcggcatggcgctaatggaagggaagcaacctcagacacatgggacaccaggggagcctccaaaggcacctgctgctggactgactccgctaaattgtg

SEQ ID NO: 19057 - DNA, 360 bp, Homo sapiens
  SIMILAR (8)..(310): 1001254mologous to Homo sapiens NAD(P)H:menadione oxidoreductase,accession number J03934,Smith-Waterman Score=507.
  misc_feature (1)...(360): n = a,t,c or g
cagagccatggtcggcagaagagcactgatcgtactggctcactcagagaggacgtccttcaactatgccatgaaggaggctgctgcagcggctttgaagaagaaaggatgggaggtggtggagtcggacctctatgccatgaacttcaatcccatcatttccagaaaggacatcacaggtaaactgaaggaccctgcgaactttcagtatcctgccgagtctgttctggcttataaagaaggccatctgagcccagatattgtggctgaacaaaagaagctggaagccgcagaccttgtgatattccagagtaagaaggcagtgctttccatcaccactggtggcagtggctccatgtn

SEQ ID NO: 19058 - DNA, 2725 bp, Homo sapiens
  SIMILAR (1718)..(1882): 601254mologous to Homo sapiens Human secreted protein encoded by gene 44 clone HTDAD22,accession number Y02693,Smith-Waterman Score=148.
  misc_feature (1)...(2725): n = a,t,c or g
cgcccttgtaggctgtccacctcaaacgggccggtcaggatatataagagagaatgcaccgtgcactacacacgcgactcccacaaggttgcagccggagccgcccagctcaccgagagcctagttccggccagggtcgccccggcaaccacgagcccagccaatcagcgccccggactgcaccagagccatggtcggcagaagagcacttgatcgtactgggctcactcagagaggacgtccttcaactatgccatgaaggaggctgctgcagcggcttttgaagaagaaaggatgggaggtggtggaagtcggacctctatgccatgaactttcaatcccatcatttccaagaaaggacatcacaaggtaaacttgaaggacccttgcgaacttttcagtatcctggccggagtctgttcttggcttataaaagaaggccatcttgagcccagattatttgtggcttgaacaaaaagaagctggaagccgcagaccttgtggatattccagttccccctggcagttggtttggaagtccctgccattcttgaaaggctggtttgagccgagtgttcataaggagagttttgcttaacactttacggctggccatgttatggacaaaggaccctttccgggagtaaagaaggcagtggcttttccattcaccactggtggcaagtggctcccatgtactcttgccaagggattccacggggaacatgaatgtcattctctggcccaattcagagtggccattctgccatttctggggcttcccaagtctttagaccctcaactgaccatatagcatttggncaccactcccagccagacgccccgaattctcaatcctggaaaggatggaagaaaccgcctggaagaatatttgggatgagaccaccactgtattttgctccaaggcagcctctttgacctaaacttccaggcaggattcattaatgaaaaaagaggtacaggatgaggaggaaaacaagaaattttggcctttctgtgggcccatctacttgggcaagtccatcccaactgacaaaccagatccaaagctagaaaatgagattccttagcctgggatttccttctaaacatgtttatccaaatctgggtatctttccgaggcttccctggacttgctttagtttttaagatttgtgtttttcttttttccacaaggaataaatgagaggggaatcgaccgtattcgtgcatttttggatgcatttttaacctgaatcctaaggattactatcatggcatataacccaaaaatccgaactgggctcaagaggcccaccttagggacagatgtagaaagatgctaggaaaaatgttctttaaaggcatctacacaatttaattcctctttttagggctaaagttttagggtaccagtttggctaggtatcattcaactctccaatgttctattaatcacctctctgtagtttatggtcagaagggaattgctcagagaaggtaaaagactgaatctacctgccctaagggacttaacttgtttggtagttagccatctaatgcttgtttatgatatttcttgctttcaattacaaagcagttactaatatgcctagcacaagtaccactcttggtcagcttttgttgtttatatacagtacacagataccttgaaaggaagagctaataaatctcttcttttgctgcagtcatctactttttttttaattaaaaaaaatttttttttgaagcagtcttgctctggttacccaggctggagtgcagtggtggtgatctcggctcactgcaacctctgcctcccaggttccagcaattctcctgcctcagcctccctagtagctgggatgacaggcgcctgccattcatgcctgactaaatttttgtattttttnagtagagacggcgttttcaccatgttggccaggctggtctcaaactcctgacctcaggtgatccgcctacctcagcctcccaaagtgctgggattacaggcgtgattccacccacacctgggccctgcaaatcttctactttgaggtttgcagagataaacccattaaatccacaccgtacatctgcaatatggaattcaagaaaggaaatagtaccttcaatacttaaaaatagttcttccccaaaaaaacccttaattctggaatcaatcaaaattccagaggtttattttctttatcatggctaaacctgatggacttacccatgggatggggtcccagtcccatggaccttgggggtaccaattgtaaacctaggagttttattcaactttgggtgaaccagttttgggcataatagtcaatttctacttctgggaagtcatctcaatcccactgttggtattatataattcaaggagaatatgataaaacactggccctcttgtggtgcattggaaagaagagatgagaaatggatggaaaaggttgccctgaaaaatgggagacagcctcttacttgcccaagaaaatgaagggattggacccgagctggaaaacctcctttacccagatgctgactggcactggtggtttttgctctccgacagtatcccacaatagctgacggctgggtgtttcagtttgcaaaatattttgttgccttcatcttcactgcaattttggtggtaaatttccccaaagatctgaattaaataaataaaattcatttctacagacccacaaaaaaa

SEQ ID NO: 19059 - DNA, 473 bp, Homo sapiens
  SIMILAR (6)..(329): 951254mologous to Homo sapiens CGI-102 protein,accession number AF151860,Smith-Waterman Score=529.
ctgggtggactctcagcagaagcaggtatgttccagtaaaaggagaccatgtgattggcatagtgacagctaaatctggagatatattcaaagttgatgttggagggagtgagccagcttctttgtcttacttgtcatttgaaggtgcaactaaaagaaacagaccaaatgtgcaggttggagatctcatctatggccagtttgtggttgctaataaagacatggaaccagagatggtctgtattgacagctgtggacgagccaatggaatgggtgtcattggacaggatggtctgctttttaaagtgactctgggcttaattagaaagtaagtcctgatgtctgctggcttgactgctttttataattatacattcttggaaagttggttaatcttcaggattcagattctttgtaacgtttgaatttctcctcagagttagaaatcagtatccattttaacacatttggaa

SEQ ID NO: 19060 - DNA, 923 bp, Homo sapiens
  SIMILAR (862)..(281): 321254mologous to Oncorhynchus mykiss rhamnose binding lectin STL3,accession number AB039024,Smith-Waterman Score=265.
cggggaagccctggccacagccttttctaatgcccagggcgcccagtgtgagggccaggccaatgcagtcactggacacgaacagcagggcagctctctctgggtgggctctaatgtaagcaaaggctgccagagagttgctaacaagaattccatctttcctcagaaccttcgatccgcttgggtcgaagtttataccatattcaccatctttttgcttcaaagaaggttttagattagcaatggctggatcaatcgctgtgagtatgttcttgggaacacatgcgtaggtcacagtgaggtattttttcacgcctggcaaacaggggcttccaaaatggtgattgttgacgatgattttgcatctctgcttcccatagcaccttcgggataggacttgcaaagctgagtaagacaagcaatcgaaaggggggagccgctctgccttggaggagcagatgtccctttcctgggtcctcctgccgtaggtcgcagagtagatgttgaggaacttggattcatggcagtgcagtttcagctcctggtcttcacacacggttttgttttttaattcatctgaagtaggttggcatttaaaggagaccaggaggtatttactgcttcctggacaaaggtcaggtccaaaaacacggctattgaccaggaggtggcaggcccgctggttctggcattcgtccagcaccttctggaaggtggtggctgccacacaggttaagctgtcttccctctgggaggcaggcttctgggaactacacatttggtaatcttgcccataaaatgccgattgggcacttatcgtagaatgccgagggcactgtagattcaaatagtccccatcacaggcataggtggggtggttttgcaggagtttggttaggtaaccagagaagtcggtgagcgct

SEQ ID NO: 19061 - DNA, 2611 bp, Homo sapiens
  SIMILAR (1436)..(1813): 551254mologous to Homo sapiens exosome component Rrp40,accession number AF281132,Smith-Waterman Score=285.
atggcagtagctataagactttctgctgatacacagtgggaggattcaccagggaagagtatcttggagttacacatgagctgcaccaagatccctgagcgatgtgaagctgataaaaaagagtctacatccagctggtgtactcggaaaatcagatttcgcatggacttggagaaggagtgcaaggttttattgagtggaggaggtggctctcggatggggagccagaagggggatggagtgggaaggtggtcttcccctagagttgggctgcccagcagccagactctcctccgaccgcccccgactgatttccacatcgccccgctgtcgaaagcccgccagcatctgctggtgtctgtcagtgtgctcttctgcttctctgctcctctcgacgtccagccacttaaggtgctggacgaatgccagaaccagcgggcctgccacctcctggtcaatagccgtgtttttggacctgacctttgtccaggaagcagtaaatacctcctggtctcctttaaatgccaacctaagcaaatgttcacccagcaggggccaggtcctgtgctcagcattggggagacacaggtgagcacgtcctcggtaaccagatcatccagtcccgtggggcctgatattcactgtgagtttcacacaaatatgtgcaagattccagatgaattaaaaaacaaaaccgtgtgtgaagaccaggagctgaaactgcactgccatgaatccaagttcctcaacatctactctgcgacctacggcaggaggacccaggaaagggacatctgctcctccaaggcagagcggctcccccctttcgtttttaccaggtattactgcttcctctatgcccctgtgagctctattgcaaatcctgtgaaaggatgctttcatctgggtaaaaagcaagattgcttgtcttactcagctttgcaagtcctatcccgaaggtgctatgggaagcagagatgcaaaatcatcgtcaacaatcaccattttggaagcccctgtttgccaggcgtgaaaaaatacctcactgtgacctacgcatgtgcaactctaagtagcatggggcccattttggctgaggttcccccagaggccaaaaaggtcactttgagtacatccttggatagctcctctggtagaatggaggacggtagactggacacgggtcacactgaggttccagtaacttcaggcctcttcatcagagtgttgaataagaagcagaactttagcctccaaataaggtgtagttttggccggggaccgggaaagctgagacactgctgggctggggccgccatagccctgggaacggagtatattctagtgaaaggagaccaggtgactggcatagtgacagctaaatctggagatatattcagagttgatgttggagggagtgagccagtttctttgtgcttacttgtcatttgaaggtgcaactaaaagaaacagaccaaatgtgcaggttggagatctcatctatggccagtttgtggttgctaataaagacatggaaccagagatggtctgtattgacagctgtggacgagccaatggaatggggtgtcattggacaggatggtctgctttttaaagtgactctggggcttaattaggaaagcctattagcctcccagatttgtgaaaatccatacaggaagtgggaaaactcccttccactggagatagtatttggaatgaatggaagaatatggggttaaggccaaaaaacccatcccagccagactttaattttggcaaaacattttaggaagcttgtgaacacatgaccgtcagatcaaaggaaaacagatcttcctcccagattggcagaaagttgatataggtggacttttttacaggtccagttgagggccaaaagactatggggttttttcaggtgaacctccccccatttaaaatactcagaagataaggtgtgaatgtatgtattattagagtccgaaagtatttttataagttactggttttcaccccacgcttttgtgggagagaaaatcattgcaaaatcattttttttgtttggtacaataaagtttactaaaaaacagtattagggtttatttggagttaactcccttagtaattgctacagcttccataattaactggaggtcagcagtaaaataattttgtgattataacagtaagccaggttcaccagaggaaaatgtggaatacctaaagtataaagcagcaaagaaatgtcacctgtagtcccattattcagcgggtgagtatataacaacgaaatactttttcatttaccaagtattgtgttttgcatggattaactcctttattctaactgcagaagacacttatcctcataattgaaactgaggcacagaatttaacttggcctacattctctatattcatcaaattgaaattatagttattatagcttatatgccactttgtaatatacttttgtctacttcaaacagcatgatacatttcacaactttagtcacatatttcatgttacaggatatttttgagttttatcattatataaataacactatgaggatttctgaatccaaatctggccaagtcttatttt

SEQ ID NO: 19062 - DNA, 410 bp, Homo sapiens
  SIMILAR (29)..(103): 921254mologous to Mus musculus polymorphic tumor rejection antigen precursor,accession number M16370,Smith-Waterman Score=122.
  misc_feature (1)...(410): n = a,t,c or g
gggacttgagactcaccggccgcacgccatgagggccctgtgggtgctgggcctctgctgcgtcctgctgaccttcgggtcggtcagagctgacgatgaagttgnnnnnnnnnnnnnnnnnnnnnnnnnnnnnnnnnnnnnnnnnnnnnnnnnnnnnnnnnnnnnnnnnnnnnnnnnnnnnnnnnnnnnnnnnnnnnnnnntannnnnnnnnnnnnnnnnnnnnnnnnnnnnnnnnnnnnnnnnnnnnnnnnnnnnnnnnnnnnnnnnnnnnnnnnnnnnnnnnnnnnnnnnnnnnnnnnnnnnnnnnnnnnnnnnnnnnnnnnnnnnnnnnnnnnnnnnnnnnnnnnnnnnnnnnnnnnnnnnnnnnnnnnnnnnnnnnnnnnnnnnnnnnnnnnnnnnnnnnnnnnna

SEQ ID NO: 19063 - DNA, 427 bp, Homo sapiens
  SIMILAR (250)..(372): 971254mologous to Mus musculus endoplasmic reticulum transmembrane protein precursor,accession number J03297,Smith- Waterman Score=220.
atggggagaaaccagagcagaatagctgaaaattctaaaaaccagagggccccttctcctccaaaggatcgcagctcctcaccagcgccgcatcagagcaggaaggagactgattttgacgagctgagcaggtgtacgcttaagaagggggctatttgcaaagttgtccgcggccaggtgccgactttggcggcggtggcggtggggctttgggcgcttcgggacctggcggtcgacgggcgtagtgtggttgaaaaaactgtctgggactgggaacttatgaatgatatcaaaccaatatggcagagaccatcaaaagaagtagaagaagatgaatacaaagctttctacaaatcattttcaaaggcctcactgttaacagccaaccttcgaaacaacggagtagccagccatctccttgttgaag

SEQ ID NO: 19064 - DNA, 1548 bp, Homo sapiens
  SIMILAR (754)..(1470): 761254mologous to Homo sapiens precursor polypeptide (AA -21 to 782),accession number X15187,Smith-Waterman Score=856.
atgaccatggcagcggcggcggtggtggcacgcggggccggggcgagggcagcgacagcggcggctttgcggggtggctgcgggaccgcggctcgggggcggccgtgtgcgggccccgcccggcccttgtgcactgcacccgggaccgccccggacatgaagcgctacctgtgggagcgctaccgggaggcgaagagaagcacagaaggcactaagaagtacacgacctcacttaatgcaagacactattatacccatttcacagaggaaaatgaagatgaaattaacagctcgagttcttatgcgagtcagaagaaaacatttgaaattaatcccagacacccgctgatcagagacatgcttcgacgaattaaggaagatgaagatgataaaacagttttggatcttgctgtggttttgtttgaaacagcaacgcttcggtcagggtatcttttaccagacactaaagcatatggagatagaatagaaagaatgcttcgcctcagtttgaacattgaccctgatgcaaaggtggaagaagagcctgaagaagaacctgaggagacagccgaggacacaacagaagacacagagccagacgaagatgaagaaatggatgtgggaacagatgaagaagaagaaacaggcaaggaaagtgatgaccccatggcttatattcactttactgctgaaggggaagttaccttcaaatcaattttatttgtacccacatctgctccacgtggtctgtttgacgaatatggatctaaaaagagcgattacattaagctctatgtgcgccgtgtattcatcacagacgacttccatgatatgatgcctaaatacctcaattttgtcaagggtgtggtgattaggaagaagcttgttcgtaaaacgctggacatgatcaagaagattgctgatgataaatacaatgatactttttggaaagaatttggtaccaacatcaagcttggtgtgattgaagaccactcgaatcgaacacgtcttgctaaactttctaggttccagtcttctcatcatccaactgacattactagcctagaccagtatgtggaaagaatgaaggaaaaacaagacaaaatctacttcatggctgggtccagcagaaaagaggctgaatcttctccatttgttgagcgacttctgaaaaagggctatgaagttatttacctcacagaacctgtggatgaatactgtattcaggcccttcccgaatttgatgggaagaggttccagaatgttgccaaggaaggagtgaagttcgatgaaagtgagaaaactaaggagagtcgtgaagcagttgagaaagaatttgagcctctgctgaattgggatgaaagataaagcccttaaggacaagatttgaaaaggctgtgggtgtcttcagccgccttgacagaatctcccgtgttgcttttggtggcccagccagtacgggattggtcttggccaacattgggagagaatcatgaaagcacaagcgtaccaaacgggcaaggacatctctacaaatttactatgcgg

SEQ ID NO: 19065 - DNA, 3068 bp, Homo sapiens
  SIMILAR (834)..(2324): 411254mologous to Homo sapiens precursor polypeptide (AA -21 to 782),accession number X15187,Smith-Waterman Score=574.
  misc_feature (1)...(3068): n = a,t,c or g
aattcccgggtcgacgatttcgtgcttggggtgtagtgggcggaccgcgcggctggaggtgtgaggatcctaacccaggggtgtgttggtggaggcggctcctgcgatcgaaggggacttgagacctcaccggcccgcacgccagtgagggccctgtgggtgctgggccctctgctgcgtcctgctgaccttcgggtcggtcaagaagctgacgatgaagttgatgtggatggtacaagtagaagaggatcttgggtaaaagtatgagaaggatcaagtgacggatgatgaagtagtacagagagaggaagaagctatttcagttggatggattaaatgcatcacaaataagagaactttagagagaagtcggaaaattttcctttcccaagccgaagttaacagaatgattgaaactttattcatccaatttcattgtattaaaaataaagagattttccttgagagacttatttccaattcctcctgttgctttggataggttaagcctaatatcactgacctgatgaaaatgctctttctggaaatgaggaactaacagtcaaaaattaagtgtgataaggagaagaacctgctgcatgtccagcacaccggtgtaggaatgacccagagaagagttggttaaaaacccttggtaccatagcccaaatctgggaccaagcgagttttttaaacaaaatgncctgaagccacaggaagatgggcccagtcaaccttcctgaattgattggcccagtttgggtgtccggtttcctattcccgccttcccttgtagcagataaggttattgtcacttcaaaacacaaacaaccgataccccagcacatctggggagtctggactcccaatggaattttcttgtaattgctggacccaagagggaaacactcttaggaccgggggaaccgacaatttaccctttgtccttaaaaagaagaagcatctgatttaccttggaatttggataccattaaaaatctccgtcaaaaaaatattcacagtttcataaaacttttcctaatttatgtatggaggcagcaaagactgaaaactgtttgaggagcccatggaggaaagaaagaaagcagccaaaagaagaagaaaagaagaatctgatgatgaagctgcaggtagaggaagaagaagaagaaaagaaaccaaagacctaaaaaagttgaaaaaactgtcttgggactgggaacttatgaatgatatcaaaccaatatggcagagaccatcaaaagaagtagaagaagatgaataccaagctttctaccacatcattttccaaggaaagtgatgaccccatggcttatattcacttttactgctggaaggagaagttaccttcaaaatcaattttatttgtacccacatctgctccacgtgggtctgtttgacggattatggatctaaaaaagagcggttacattaagctcttatgtgccgccgtggtattcatcacagaccgacttccatgatatgatgcctaaatacctcaattttgtcaagggtgtggtggactcagatgatctccccttgaatgtttcccgcgagactcttcagcaacataaactgcttaaggtgattaggaagaagcttgttccgtaaaaccgctgggacatgatcaagaagatttgctggatgataaatacaatgatactttttgggaaagaatttgggtaccaacattcaagcttggttgtgattgaaggaccacttcgaattcgaacaacgtcttgctaaacttcttagggttccagtcttctcatcatccaacttgacattactagcctagaccaggtatgtgggaaagaatgaaggaaaaacaagacaaaatctacttcatggcctggggtccagcagaaaagaggctgaatcttctccatttgttgagcgacttcttgaaaaagggctatgaagttatttacctcacagaacctgtggatcgaatactgtattcaggcccttccccgaatttgatcgggaagaggttccacgaatgttgccaaaggaaggagtgaagttccgatgaaaagtgagaaaactaaggagagtcgtgaagccagttgagaaagaatttgagcctctgcctgaattggatgaaagataaagcccttaaggacaagattgaaaaggctgtggtgctctcagcgcctgacagaatctccagtgtgctttggtggccagggcaggtcttttggtctggcaacatggagagaatccatgaaagcacaagcgtaccaaaccgggcaaagaacatcttacccaatttactatgccgagtcagaaagaaaacattttgaaattaatccccagacaccccgcttgatcagagacattgcttcgacgaatttaagaaagatgaaggatgataaaacagtttttggatcttgcttgtggttttggtttgaaaccggcaacggctcgggtcagggtatctttttacccagacacttaaacgcatatggagattggaattggaaagaatgcttcgcctcagttttgaacatttgacccctgatgccaaaggtgaaaaaaagagccccgaaggaagaaccctgaaagagacagcagaaggacacaagcagaaagacacagagcagagacgaagagtgcaagaaatgggatggtgggaaacagatgaagaaagaagaaaccagccaaaggaatcctacagcctgaaaaaagatgaaattgtaaaattatactcctcacccatttggatccctgtgtggagaggggaatgtgaaaatttacatccatttcttttttgggagaagacttgttttggatgcccacacataatcccccttctcccctgcactggtaaaatgtgggattatggggtcacaggaaaaagggggttttttaaattggaattttttttaacatttcctcatggaatgtaaatttgtactattttaactggactattcttggtgttaaaatcttgtcatgtgtataaaaataaaaaaaagatcccaaaaaaaaaaaaaaaaaaaaaaaaaaaagtcgtatcgatgtcgagcgatcatgatgatgat

SEQ ID NO: 19066 - DNA, 670 bp, Homo sapiens
  SIMILAR (299)..(346): 501254mologous to Homo sapiens small proline rich protein,accession number M21302,Smith-Waterman Score=54.
aaaaaaaaggaactatgtcaaaaatagtccctgccggggtgaaagcctgtcaaatggagttacagtgggacatcagtaaaagcccagtgggaaggagcgggcacggttctggcgttcgcatgaggaaggaagcagcgtcatcagcgcaggtgtaggcagttgtcaacccctcgctggccgcgtgcgacgtgaagcacctgcgctgggcgcggcgggtaaacgccgtcactagcgggcgcctgaacagtccagcggcgtcagcgctgcggagcaggaaagggtcccgaacgcagggtggccatgcagcgtggcgcccacctgtccctctcctcgaagcgctgagccagcacgatgcacataagggaaggaggaaggtggcttgaggacagtgaccgagcggacagcggaagcccatttcaggagccccggtacccgagctcgggcccctttccaatcccccaggcgtccttcccatgtccttgtctcctagtcctgggaatccgcggccactccactatcctgcagtaccgcggacaagaacaccatgtactcttcacaggcaggtgtcttctggtggacccaactctgttggtacttgtcgtctccaaaaagtccccaaatgcagctagagaccagccagcccggtatccgagagggccactctaggtga

SEQ ID NO: 19067 - DNA, 868 bp, Homo sapiens
  SIMILAR (151)..(348): 431254mologous to Rattus sp. hnRNP C protein C-terminal fragment (158 AA),accession number X16933,Smith-Waterman Score=134.
atggctgaagctggccctaaaccacagaggaccctgatgtgggcctgggagtccgtcctcagccagcggaagcccagagaggcaggacgcctgagcgaaggctgcgtgaaggccaccgggacccctgggtttggatggcaagcccgtcctgaccagaaggagcacaggctggatggccgtgtcattgaccctaaagaccgccatggactagtgaaggatacggaacccaggttgaacgaacaatctctgtgtgggggtctgaatcctgaagccactgaggaaaagatcagggagtacttggcgagtttggggagaagaagacccgtgaagaaggttctggagaaaaagttccatactgtcagtggaagcagtgcggaccccaagtcccgccttcctggtcagagacgtaccggacccgtgcctaatcaggagaccagctggggactccggcagcgcctaaccccaggtggcccatggaataagagcaggaaattgaagctcagcgaaggtcagctcatagtggagccagggccccctggcccccctggccccccaggcccgatgggcctccagggaatccaggtccaaagtttatggtttctctctcttgctggaacatcagctccctgagggcagggctcctgtacgctggctgtggctgcagcccctgagtggggccattagtggggaccccaaggactcgcctgtgtctcagttgaagtctggggtacttcgctatgaacttcgacttggattaggaatccgtgctaccccgagtgtggaatgccccacaagccacaattttcttatacacaaggccttcggtttcatatgtcaactgacgagtacgatgacccaaggggagtga

SEQ ID NO: 19068 - DNA, 684 bp, Homo sapiens
  SIMILAR (118)..(684): 991254mologous to Homo sapiens dJ579N16.2 (SET binding factor 1),accession number AL096767,Smith-Waterman Score=963.
cgaggcacgcgtccgcgcgcaagaagtacaacccccccagctggtttcaccggggtctgccgccccctgaggaccaggaggacgagatgtcagtgtcggaggagctggagcgccatcacgctgaccccgtcctcagccctgaagccctccgaccgcatgaccatgagcagcctgggggaaagggcttgctgtcgcgactaccagcgcctcggtctgggcaccctgagcagcagcctgagccgggccaagtctgagcccttccgcatttctccggtcaaccgcatgtatgccatctgccgcagctacccagggctgctgatcgtgccccagagtgtccaggacaacgccctgcagcgcgtgtcccgctgctaccgccagaaccgcttccccgtggtctgctggcgcagcgggcggtccaaggcggtgctgctgcgctctggaggcctgcatggcaaaggtgtcgtcggcctcttcaaggcccagaacgcaccttctccaggccagtcccaggcggactcgagtagcctggagcaggagaagtacctgcaggctgtggtcagctccatgccccgctacgccgacgcgtcgggacgcaacacgcttagcggcttctcctcagcccacatgggcagtcacggtaagtggggcagtgtccggaccagtggacgcagcagtggccttggg

SEQ ID NO: 19069 - DNA, 341 bp, Homo sapiens
  SIMILAR (10)..(339): 1001254mologous to Homo sapiens dJ579N16.2 (SET binding factor 1),accession number AL096767,Smith-Waterman Score=552.
cgcgtccgcaagagccgcctacttcgggagcgtgccgggctgggcgacctggagagcgccagcaacagcctggtcaccaacagcatggctggcagtgtggccgagagctatgacacggagagcggcttcgaggatgcagagacctgcgacgtagctggggctgtggtccgcttcatcaaccgctttgtggacaaggtctgcacggagagtggggtcaccagcgaccacctcaaggggctgcatgtcatggtgccagacattgtccagatgcacatcgagaccctggaggccgtgcagcgggagagccggaggctgccgcccatccagaagcccaagctgct

SEQ ID NO: 19070 - DNA, 3868 bp, Homo sapiens
  SIMILAR (1039)..(2766): 751254mologous to Homo sapiens dJ579N16.2 (SET binding factor 1),accession number AL096767,Smith-Waterman Score=2095.
atggtgtctggagcccgggccgccgccgcagccgcagccgctgcggccgccgcggagcgaacccggggtgtcccgggtcatccagactccactggccgactccctgcccatcagcagctgcagcgtggcctgctcttccgccagctgggcatcaccaacgtactgtctttggtctgtgccaccctcatggagcacgaggttctcttcctgtcccggagctaccagcagctcaccgatgcctgcaggagcctcctggcattgctgtttcctctcagatacagcttcacctatgtgcccatcctgccggcccagctgctggaggccctcagcacacccacgcccttcataatcggggtcaatgcggccttccaggcagagacccaggagctgctagacgtgattgtagctgatctggatggagagacggtgaccatccctgagtgtgtgcacattccacccttgctagagccactgcagagtcagacgcacagtgttctaagaatggtcctggacccggagctggagttggttgacctcgccttccctccacccatgacgacaaagagctgcggctcttccatcagctgctgcagggctatctctggtgcctgcacgttcgtgtgcattcacccggagcctgtcatccgcttccataaggcagccttcctgggccagtgtgggctggtggaggacaatttcctgatgaatgtgctggagggcatggcctttgctctctttgtgttggagtgtggggtcccgtactgccccacggacctgtttgatgagctggtggcccacgatgtggcacagagcaggctgcaggtcaagagcccagggcagctggaggtcgtgggcaactgcatctcccacgtgtttgaggggaagatgcttgaggccaagaagctgctcctacctgtgctgagggccctgaagtgtatgatgaactgctgcctgcaggactgcacttctctggacaagcatggcatctcggctgctctgctgcctctggtcacagccttcctggaagcggagccaagggtggcttttgagcagtggtgcctgtggccatccctgagcggtgagaagcagcaggagctgatgcagaaggaggagagcacagtgttcagccaggccatccactataccaactgcgtgagctacctcctgctgcctctggacagcagcaagagccgcctgcttcaggagctgggtgacctggagagcaccagcaacagcctggtccccaacagcatggctggcagtgtggctgagagctatgacacggggagcggctttgaggacagagagacctgcaatgtagctggggctgtggtccacttcatcaaccgctttgtggacaaggtctgcacagagagtggggtcaccagtgaccacctcaaggggctgcatgtcatggtgccagacatcgtccagataaacattaagaccctggaggcgaaacccaagctattgaggctgcacctgctgtttggtgaggagtgtgtgctggatggcctgcgcatctacctgccaccgaatgggcgtgaggagggtgcgagggcgggcagtgcggggtggccagcactgctcccagctgagggcgccctcttcctcactacgtaccgggtcatcttcacggggatgctcacagaccccctggtgggggagaaggtggtgttccgctccttcccggtggccgcgctgaccaaggagaaatgcatcagcatccagacccctttggatcagctattgcaggacgggctgcagctgcgctcctgcacattccagctgctgaaaatggcctttgatgaggaggtggggtctgacagtgccgagctcttctgcaagcagctgcataagctgcggtacacaccggatgtcagggccaccttctccttcaccctgggctctacctacacacccggccagccaccccgagtcaccaagaacaagggtccttccctcagaaccctgtcctggaacctggttaagaacgtcaagaagaccatcgggcggcagcatgtcactcgcaagaagtacaaccccaactcagctaggagcactggagccagccgccctctgaggaccaggaggaggagatctcagtccttgaagccctcggacggcatgaccatgagcagcctcctggtggaaagggcttgctgccgcgaatatcagtgccttggcctgggccccctgagcagccgcctgagccgggccaagtctgaatccttccgcatttctctggtcaaccgcatgcatgccatctaccgcaggtacccggggctgctgatcgtgccccagagtgtccaggacaacgccctgcagcgcgtgtcctactgctaccgccagaaccgcttcaccgttgtctgctggcgcatccggcggtccaaggcagtactgctgcattctgggggcctgtacggcataggtgtagtcggactctttaaggcccagaacgcaccttctccaggccagttccaggcagactcgagtagcctggagcaggagaagtacctgcaggctgttgtcagctccatgccccgctactccagtgcgtccggacgcaacacacttagcggcttctcctcagcccacgtggggagtcacattggcagccccagagccagggtcaccactctgtctaaccccatggcggcggcatccaaactgactgcaccccgagcaagcagccctctacatcctcggggacaaaggccagctcaagaatgtgcggccggaccccttgcagcaaccttcctactggactctgactatgagcacattgagctggggctgctgtacgaggagaaggggcagcgcaggagccagctgccttgcaggtctctgtgtggaccggatgagcaagaggacagccatgttccacaactacatgaatgcacccgaggacacagaggtcctgcggccctacagcaacgtgtccaacctgaaagtaggttggagacagagctgagccgacccgctaagcgctggaaggacacctgggaccgcgtgaaggctgcatggcgccttgaagcccggccagatggacgtggcacccctagctccctcctagtgtccaccgcacctcaccaccgctgctcgctgggctgcctgcggcagcaccagcacccttacagccaggttccagacagcagagagtgagaacaggtcctacgagggcactctgtacaatgaagggggccttcatgaagccctggaaggccccgctggttcgtgctggacaagaccaagcccccagttgcgctactacgaccacccgtgtggacacagagtgcaaagggtgtcatcgacctggtggaggtggaggtggaggctgtggcacctggcacgcccacctatggggtgcccctaagactgtggacgagaaggcccttctttgacgtgaagacaacgcgtctcgcgtttacaacttctggtgcccaggacgtgccctcggccccagcagtgggtggaccggatccagagctgcctgtcggacgcctgagcctccaagccctggcccggttgctttgcttcccggtcggttacccgacccactagggggtgggcagggccgccccggcaattgtttacagccccggccctcgacagtattgaggccccgagccccccagcacttgtgtgtacagcccccgtccccgccccgccccgcccggccggccctaacttattttggcgtcacagctgagcaccgtgccgggaggtggccaaggtacagcccgcaatgggcctgtaaatagtccggccccgtcagcgtgtgctgggtccagccagcgggctgcagaagactcttctagaaccagagtctatataaagagagaactaacgccaaaaaaaaaaaaaa

SEQ ID NO: 19071 - DNA, 486 bp, Homo sapiens
  SIMILAR (1)..(303): 1001254mologous to Homo sapiens p35,accession number X92669,Smith-Waterman Score=536.
gaaatgcaacttgagaaacccaagcctgtaaaaccagtgacgttttccacaggcatcaaaatgggtcaacatatttcactggcacctattcacaagcttgaagaagctctgtatgaataccagccactgcagatagagacatatggaccacatgttcctgagcttgagatgctaggaagacttgggtatttaaaccatgtcagagctgcctcaccacaggaccttgctggaggctatacttcttctcttgcttgtcacagagcactacaggatgcattcagtgggcttttctggcagcccagttaaccatttataagatttggaccttggagctgaaccagggagctagcaaaaaggatttgacacgataagcctcatctgatggaagagaggaataaataattcacctatatgtgtttgaggttgtgacagacttataaaatctttttaaaaaataaagctataatttatattaaaaaaaaaaaa

SEQ ID NO: 19072 - DNA, 945 bp, Homo sapiens
  SIMILAR (70)..(690): 971254mologous to Homo sapiens p35,accession number X92669,Smith-Waterman Score=1026.
atgattatcgtagacaaagttaactggatcccgtggctaattggcttgaaatccatgtatgcaaataactgtgaaagttgtgtagatttactgtttgtgagaggagctggaaactgccctgagtgtggtactccactcagaaagagcaacttcagggtacaactctttgaagatcccactgttgacaaggaggttgagatcaggaaaaaagtgctaaagatatacaataaaagggaagaagattttcctagtctaagagaatacaatgatttcttggaagaagtggaagaaattgttttcaacttgaccaacaatgtggatttggacaacaccaaaaagaaaatggagatataccaaaaggaaaacaaagatgttattcagaaaaataaattaaagctgactcgagaacaggaagaactggaagaagctttagaagtggaacgacaggaaaatgaacaaagaagattatttatacaaaaagaagaacaactgcagcagattctaaaaaggaagaataagcaggcttttttagatgagctggagagttctgatctccctgttgctctgcttttggctcagcataaagatagatctacccaattagaaatgcaacttgagaaacccaaacctgtaaaaccagtgacgttttccacaggcatcaaaatgagtgttgggattacactgtgcccggctgaggagcacacttttaatgatgaaagaagtttcaatctcagctcatcttggagcaaatttaataaacctccctctactctgccttttaaagtattggatgaagagaggttggtggaactgaaagttcccaacacactaattacaaagttggttccctttgcaataagcccctgttctgaggctatccaggaccacccagccatcttattagcatacaaaaagacaccattttggagactacaaacgttttag

SEQ ID NO: 19073 - DNA, 1543 bp, Homo sapiens
  SIMILAR (247)..(1167): 631254mologous to Homo sapiens p35,accession number X92669,Smith-Waterman Score=799.
ctagatgcaagaccgggggaactgactgccggaacgtttgtgttgcagcgcctcgccccttgccggtgctctttcgcgaagggaccgtctctgccaagcgcctgttggtaggaacctgcttggtcgcgtctgagggggcttgtaggtggctctggctgaaacaggcgcctgcgagagtctgtaggagggaaaccgccatggacgatcagggttgccctcggtgtaagaccaccaaatatcggaacccctccattgaagctgatggtgaatgtgtgcggacacactctctgtgaaagttgtgtagatttactgtttgtgagaggagctggaaactgccctgagtgtggtactccactacagaaagagcaacttcaggggtacaactctttgaacgatcccactgtttgacaaggagtgttgagatcaggaaaaaagtgctaaacgatatacaataaaagggaaggaaggtttttcctagttctaagagaatacaatgatttcttgggaagaagtgggaaggaaattgtttttcaactttgacccaacaatgtgggttttgggacaacaccaaaaaggaaaatgggagatataccaaaagggaaaacaaaggatgttattcagaaaaataaattaaagctgactcgagaacaggaagaactggaagaagctttagaagtggaacgacaggaaaatgaacaaagaagattatttatacaaaaagaagaacaactgcagcagattctaaaaaggaagaataagcaggcttttttagatgagctggagagttctgatctccctgttgctctgcttttggctcagcataaagatagatctacccaattagaaatgcaacttgagaaacccaaaccctgtaaaaccagtgacgttttccacaggcatcaaacatggtcaaacatatttcactggcaccttattcaccaagcttggaaggaagctctgtatgaataccagcccactgcagatagagacatatggacccacatgttccctgagcttgagatgctagggaagacttgggtatttaaaccaattgtccagagctgcctcaccgacaggacccttgctggggggctatacttcttctcttgcttggtccacagagcacctacaggatgccattccagtggggctttttctggccagccccaggttaacccatttataagatttggacccttggagcctgaacccaggggagcctagcaaaagtaaagcagacttataaaattatagctaatgtgcagctgcacaacacagtccttccacttagccagctgtggttaaaggattttataaggagaaaatttcagaaactaagttgagtaatatggggggatatatatttgtgaaaaataatttttacttatatttttcagaggatttgacacgataagcctcatctgatggaagagaggaataaataattcacctatatgtgtttgaggttgtgacagacttataaaatctttttaaaaaataaagctataatttatattaaaaaaaaaaaaaaagggcggccgct

SEQ ID NO: 19074 - DNA, 511 bp, Homo sapiens
  SIMILAR (124)..(300): 981254mologous to Homo sapiens Amyloid precursor protein mutant APP-ARP 751,accession number W42979,Smith-Waterman Score= 284.
  misc_feature (1)...(511): n = a,t,c or g
acacctggggatgagaatgaacatgcccatttccagaaagacaaagtagtagaagtagcagaggaggaagaagtggctgaggtggaagaagaagaagccgaccgaggactgaccactcgaccaggttctgggttgacaaatatcaagacggaggagatctctgaagtgaagatggatgcagaattccgacatgactcaggatatgaagttcatcatcaaaaattggtgttctttgcagaagatgtgggttcaaacaaaggtgcaatcattggactcatggtgggcggtgttgtcatagccgacagtgatcgtcatcaccttggtgatgcctgaagaagaaacagtacacatccattcatcatggtgtggtggaggttgacgccgctgtcaccccagaggaacgccacctgtccaagatgcagcagaacggctacgaaaatcccacctacnagttctttnagcagatgcagnactagacccccgccacagcagcctcttgaagttggacang

SEQ ID NO: 19075 - DNA, 549 bp, Homo sapiens
  SIMILAR (2)..(136): 891254mologous to Homo sapiens Human brain tissue amyloid peptide precursor APP365,accession number R14026,Smith-Waterman Score=218.
ggtctaccctgaactgcagatcaccaatgtggtagaagccaaccaaccagtgaccatccagaactggtgcaagcggggccgcaagcagtgcaagaccatcccccacttgtgatttccctaccgctgcttaggtgagccggccggccgtggggctggtgttgattgggggcctggtcttgagggaagaaaaagaggatgctcctgttaggtcacatacacagacttgttcttcagcacattgccactctgtgttgtactgtgttttggactcttgcagttacattctgggcactgaccctataggagcagtatttttgagttccctgcctcagaatgaatttacccagggtgtatattgaaattacaaattcctgggccagttccaggactcctgaatgaaaaatgcctatagtagcggatccgggaattcttattttaccgtatcgcatagatgattctcatgaacaggggccttgtgtgtttcttcacatagactttctagaagaaagaatctaatgtgaagctgcagcattttgttaaattctaaaa

SEQ ID NO: 19076 - DNA, 438 bp, Homo sapiens
  SIMILAR (33)..(296): 671254mologous to Homo sapiens Human brain tissue amyloid peptide precursor APP365,accession number R14026,Smith-Waterman Score=299.
taccaacttgcatgactacggcatgttgctgtcctgcggaattgacatagttccgaggggtagagtttgcgtggtgcccactggctgaaaaaagtgacaatgtggattctgctgatgcggaggaggatgactcggatgcctgctggggcggatcaaacacatactatgcagatgggagtgaagacaaagtattagaagtatcagaggatgaagaagtggctgaggtggaagaagaagaagccgatgatgaagagccatagaaaagcactacttcagcttctacttcagaagaagaataaaagaagaagtctagccgttcataagaaaggtccaagaaaaggagaaagaaaaaatcatcgaaaagaaaacataagaagtattctgaagatagcgacagtgactctgattctgaaacagactccagtgatgaagataaca

SEQ ID NO: 19077 - DNA, 3585 bp, Homo sapiens
  SIMILAR (148)..(2463): 971254mologous to Homo sapiens amyloid-beta protein,accession number M33112,Smith-Waterman Score=3937.
agtttcctcggcagcggtaggcgagagcacgcggaggagcgtgcgcgggggccccgggagacggcggcggtggcggcgcgggcagagcaaggacgcggcggatcccactcgcacagcagcgcactcggtgccccgcgcagggtcgcgatgctgcccggtttggcactgctcctgctggccgcctggacggctcgggcgctggaggtacccactgatggtaatgctggcctgctggctgaaccccagattgccatgttctgtggcagactgaacatgcacatgaatgtccagaatgggaagtgggattcagatccatcagggaccaaaacctgcattgataccaaggaaggcatcctgcagtattgccaagaagtctaccctgaactgcagatcaccaatgtggtagaagccaaccaaccagtgaccatccagaactggtgcaagcggggccgcaagcagtgcaagacccatccccactttgtgattccctaccgctgcttagttggtgagtttgtaagtgatgcccttctcgttcctgacaagtgcaaattcttacaccaggagaggatggatgtttgcgaaactcatcttcactggcacaccgtcgccaaagagacatgcagtgagaagagtaccaacttgcatgactacggcatgttgctgccctgcggaattgacaagttccgaggggtagagtttgtgtgttgcccactggctgaagaaagtgacaatgtggattctgctgatgcggaggaggatgactcggatgtctggtggggcggagcagacacagactatgcagatgggagtgaagacaaagtagtagaagtagcagaggaggaagaagtggctgaggtggaagaagaagaagccgatgatgacgaggacgatgaggatggtgatgaggtagaggaagaggctgaggaaccctacgaagaagccacagagagaaccaccagcattgccaccaccaccaccaccaccacagagtctgtggaagaggtggttcgagaggtgtgctctgaacaagccgagacggggccgtgccgagcaatgatctcccgctggtactttgatgtgactgaagggaagtgtgccccattcttttacggcggatgtggcggcaaccggaacaactttgacacagaagagtactgcatggccgtgtgtggcagcgccatgtcccaaagtttactcaagactacccaggaacctcttgcccgagatcctgttaaacttcctacaacagcagccagtacccctgatgccgttgacaagtatctcgagacacctggggatgagaatgaacatgcccatttccagaaagccaaagagaggcttgaggccaagcaccgagagagaatgtcccaggtcatgagagaatgggaagaggcagaacgtcaagcaaagaacttgcctaaagctgataagaaggcagttatccagcatttccaggagaaaagtggaatcttttggaacaggaagcagcccaacgagagaccagcagctggttggagacacacatggccagagttggaagccatgctcaatgaccgccgccgcctggccctggagaactacatcaccgctctgcaggctgttcctcctcggcctcgtcacgtgttcaatatgctaaagaagtatgtccgcgcagaacagaaggacagacagcacaccctaaagcatttcgagcatgtgcgcatggtggatcccaagaaagccgctcagatccggtcccaggttatgacacacctccgtgtgatttatgagcgcatgaatcagtctctctccctgctctacaacgtgcctgcagtggccgaggagattcaggatgaagttgatgagctgcttcagaaagagcaaaactattcagatgacgtcttggccaacatgattagtgaaccaaggatcagttacggaaacgatgctctcatgccatctttgaccgaaacgaaaaccaccgtggagctccttcccgtgaatggagagttcagcctggacgatctccagccgtggcattcttttggggctgactctgtgccagccaacacagaaaacgaagttgagcctgttgatgcccgccctgctgccgaccgaggactgaccactcgaccaggttctgggttgacaaatatcaagacggaggagatctctgaagtgaagatggatgcagaattccgacatgactcaggatatgaagttcatcatcaaaaattggtgttctttgcagaagatgtgggttcaaacaaaggtgcaatcattggactcatggtgggcggtgttgtcatagcgacagtgatcgtcatcaccttggtgatgctgaagaagaaacagtacacatccattcatcatggtgtggtggaggttgacgccgctgtcaccccagaggagcgccacctgtccaagatgcagcagaacggctacgaaaatccaacctacaagttctttgagcagatgcagaactagacccccgccacagcagcctctgaagttggacagcaaaaccattgcttcactacccatcggtgtccatttatagaataatgtgggaagaaacaaacccgttttatgatttactcattatcgccttttgacagctgtgctgtaacacaagtagatgcctgaacttgaattaatccacacatcagtaatgtattctatctctctttacattttggtctctatactacattattaatgggttttgtgtactgtaaagaatttagctgtatcaaactagtgcatgaatagattctctcctgattatttatcacatagccccttagccagttgtatattattcttgtggtttgtgacccaattaagtcctactttacatatgctttaagaatcgatgggggatgcttcatgtgaacgtgggagttcagctgcttctcttgcctaagtattcctttcctgatcactatgcattttaaagttaaacatttttaagtatttcagatgctttagagagattttttttccatgactgcattttactgtacagattgctgcttctgctatatttgtgatataggaattaagaggatacacacgtttgtttcttcgtgcctgttttatgtgcacacattaggcattgagacttcaagcttttctttttttgtccacgtatctttgggtctttgataaagaaaagaatccctgttcattgtaagcacttttacggggcgggtggggaggggtgctctgctggtcttcaattaccaagaattctccaaaacaattttctgcaggatgattgtacagaatcattgcttatgacatgatcgctttctacactgtattacataaataaattaaataaaataaccccgggcaagacttttctttgaaggatgactacagacattaaataatcgaagtaattttgggtggggagaagaggcagattcaattttctttaaccagtctgaagtttcatttatgatacaaaagaagatgaaaatggaagtggcaatataaggggatgaggaaggcatgcctggacaaacccttcttttaagatgtgtcttcaatttgtataaaatggtgttttcatgtaaataaatacattcttggaggagc

SEQ ID NO: 19078 - DNA, 3414 bp, Homo sapiens
  SIMILAR (1075)..(1683): 991254mologous to Homo sapiens APP precursor,accession number A31584,Smith-Waterman Score=1130.
atgatggaaggtgaagggggagtacggatgtcacatgaccagaccgggaacaagagaaagcatggtacctctggtatttctgtgtgtcctaatctcctcctcttacaagaataccagccagattatattagggcccacgccagtggccttaatttaattagctcttcaaaggccctacccaaatacagtcatgttctaagtggactctgcaagatttgtagctttggaccacgtttctctttgcattcagataccttcttttttgccttatttgctcatgcagacccggaacaaatacggaattgcgaaacgcctgccccacctctccaaaccgagagaaaaaacgaaatgcggataaaaacgcaccctagcagcagtcctttatacgacacccccgggaggcctgcggggtcggatgattcaagctcacggggacgagcaggagcgctctcgacttttctagagcctcagcgtcctaggactcacctttccctgatcctgcaccgtccctctcctggccccagactctccctcccactgttcacgaagcccagtttcctcggcagcggtaggcgagagcacgcggaggagcgtgcgcgggggccccgggagacggcggcggtggcggcgcgggcagagcaaggacgcggcggatcccactcgcacagcagcgcactcggtgccccgcgcagggtcgcgatgctgcccggtttggcactgctcctgctggccgcctggacggctcgggcgctggagagcttagaaaataggtctgctgcaggtggctgtagaaaagaaatgaataagggcaatgataatggggccttggctatcgggggaaacatggttattatctgggttgatgattttggctggtatgttgatagagatactttagagcaggggtccccaacacccagccatggacaggtactggtccatggcctgctaggaaccgggccacacagcaggagcacattgaacatcaaggagcaactccctcgatctaaaatttctagcattggtgcttgtaatatcatttttcaagttgacattaatgctatctttggaattctcatggtacccactgatggtaatgctggcctgctggctgaaccccagattgccatgttctgtggcagactgaacatgcacatgaatgtccagaatgggaagtgggattcagatccatcagggaccaaaacctgcattgataccaaggaaggcatcctgcagtattgccaagaagtctaccctgaactgcagatcaccaatgtggtagaagccaaccaaccagtgaccatccagaactggtgcaagcggggccgcaagcagtgcaagacccatccccactttgtgattccctaccgctgcttagttggtgagtttgtaagtgatgcccttctcgttcctgacaagtgcaaattcttacaccaggagaggatggatgtttgcgaaactcatcttcactggcacaccgtcgccaaagagacatgcagtgagaagagtaccaacttgcatgactacggcatgttgctgccctgcggaattgacaagttccgaggggtagagtttgtgtgttgcccactggctgaagaaagtgacaatgtggattctgctgatgcggaggaggatgactcggatgtctggtggggcggagcagacacagactatgcagatgggaggacatctgcaatctttggctatgaccacgactgtaaagtgcatgacgcttttgctctgtcatcagtattagttgacaggcaagaatggggctccacttacgaatctggggcaggacaaggtattgctgcattttggggagcgtgctggaaggaggagcagagtttgttgtttttgcttcctgatatggactggctgtgtctccattcaaatatcaacttcaattatatctcccagaattcccacatgttgtggagggacccaggggagatagattccaagaaattgagtgctttatcttcactacctggaatagtactggcacttggtaaagcacagcgaatattgttgattgaattactaggggttggcttagagagtgaagacaaagtagtagaagtagcagaggaggaagaagtggctgaggtggaagaagaagaagccgatgatgacgaggacgatgaggatggtgatgaggtagaggaagaggctgaggaaccctacgaagaagccacagagagaaccaccagcattgccaccaccaccaccaccaccacagagtctgtggaagaggtggttcgagaggtgtgctctgaacaagccgagacggggccgtgccgagcaatgatctcccgctggtactttgatgtgactgaagggaagtgtgccccattcttttacggcggatgtggcggcaaccggaacaactttgacacagaagagtactgcatggccgtgtgtggcagcgccacaaactgcacatttgatttgaaaaagtcatggtcatctggaggtcaaattcagatggcagactcaattcagagaaaaggagctgaactagaagctatttgccaaaagaggttttctcagaggaaacacaggtatggaaaatgtttcgttggtgtcttggccccagtgatggaggagcattttgtgataggaacgttgggtgcagcatcgccatttatgaataaactgaaagctaacctgtgttacttcaccccagaaaacagagctctggcagttcctacaacagcagccagtacccctgatgccgttgacaagtatctcgagacacctggggatgagaatgaacatgcccatttccagaaagccaaagagaggcttgaggccaagcaccgagagagaatgtcccaggtcatgagagaatgggaagaggcagaacgtcaagcaaagaacttgcctaaagctgataagaaggcagttatccagcatttccaggagaaagtggaatctttggaacaggaagcagccaacgagagacagcagctggtggagacacacatggccagagtggaagccatgctcaatgaccgccgccgcctggccctggagaactacatcaccgctctgcaggctgttcctcctcgggtaggtctcgctgcagccgagttcacacttcaggtcacagcacagacacctcgtcacgtgttcaatatgctaaagaagtatgtccgcgcagaacagaaggacagacagcacaccctaaagcatttcgagcatgtgcgcatggtggatcccaagaaagccgctcagatccggtcccaggttatgacacacctccgtgtgatttatgagcgcatgaatcagtctctctccctgctctacaacgtgcctgcagtggccgaggagattcaggatgaagttgcattcaaaattaataaaaacatgaattattataaaccagatgcgggaaagatctctggctga

SEQ ID NO: 19079 - DNA, 3238 bp, Homo sapiens
  SIMILAR (1253)..(2035): 791254mologous to Homo sapiens amyloid A4(751) protein (AA 1 - 751),accession number X06989,Smith-Waterman Score=1002.
gaattcccgcggagcagcgtgcgcggggccccgggagacggcggcggtagcggcgcgggcagagcaaggacgcggcggatcccactcgcacagcagcgcactcggtgccccgcgcagggtcgcgatgctgcccggtttggcactgctcctgctggccgcctggacggctcgggcgctggaggtacccactgatggtaatgctggcctgctggctgaaccccagattgccatgttctgtggcagactgaacatgcacatgaatgtccagaatgggaagtgggattcagatccatcagggaccaaaacctgcattgataccaaggaaggcatcctgcagtattgccaagaagtctaccctgaactgcagatcaccaatgtggtagaagccaaccaaccagtgaccatccagaactggtgcaagcggggccgcaagcagtgcaagacccatccccactttgtgattcccctaccgctgcttagttggtgagtttgtaagtgatgcccttctcgttcctgacaagtgcaaattcttacaccaggagaggatggatgtttgcgaaactcatcttcactggcacaccgtcgccaaagagacatgcagtgagaagagtaccaacttgcatgactacggcatgttgctgccctgcggaattgacaagttccgaggggtagagtttgtgtgttgcccactggctgaagaaagtgacaatgtggattctgctgatgcggaggaggaatgattcggatgtctggtggggccggagcagacacagactatgcagatgggagtgaagacaaagtagtagaagtagcagaggaggaagaagtggctgaggtggaagaagaagaagccgattgattgacgaggaccgatgaggatggttgatgaggtagaggaagaggcttgaggaaccctaccaagaagccacagagagaaccacccagcattgccaccaccaccaccaccaccacagagtctgtggaagaggtggttcgagaggtgtgctctgaacaagccgagaccggggccgtgccgagcaatgatctcccgctggtactttgatgtgactgaagggaagtgtgccccattcttttacggcggatgtggcggcaaccggaacaactttgacacagaagagtactgcatggccgtgtgtggcagcgcatctcctacaacagcagccagtacccctgatgcccgttgacaagtatctcgagacacctggggatgagaatgaacatgcccatttccagaaagccaaagagaggcttgaggccaagcaccgagagagaatgtcccaggtcactgagagaatgggaagaggcagaaccgtcaagcaaagaacttgcctaaagctgataagaaggcagttatccagcatttccaggatgaaagtggaatctttgtaacaggaagcagccaacgaggagacagcagctggtggagacacacatggccagagtggaagccatgctcaatgaccgccgccgcctggccctggagaactacatcaccgctctgcaggctgttcctcctcggcctcgtcacgtgttcaatatgctaaagaagtatgtccgcgcagaacagaaggacagacagcacaccctaaagcatttcgagcatgtgcgcatggtggatcccaagaaagccgctcagatccggtcccaggttatgacacacctccgtgtgatttatgagcgcatgaatcagtctctctccctgctctacaacgtgcctgcagtggccgaggagattcaggatgaagttgatgagctgcttcagaaagagcaaaactattcagatgacgtcttggccaacatgattagtgaaccaaggatcagttacggaaacgatgctctcatgccatctttgaccgaaacgaaaaccaccgtggagctccttcccgtgaatggagagttcagcctggacgatctccagccgtggcattcttttggggctgactctgtgccagccaacacagaaaacgaagttgaggcctgttgatgcccgccctgctgccgaccgaggactgaccactcgaccaggttctgggttgacaaatatcaagacggaggagatctctgaagtgaagatggatgcagaattccgacatgactcaggatatgaagttcatcataaaaaaattggtgttcctttgcaagaagatgtggggtccaaaccaaaggtgcaatcattgggactcatgggtgggcggttgttgtcatagcgacagtgaatcgtgcatcaccttgggtgatgcctgaagaaagaaacaagtaccacatccattcatcatgggtgtggtggaggttggacgccggctgtcaccccagaggagcgccacctgtccaagaatgcagcagaacggcttacggaaaatccaacctacaagttcttttgagcagatgcagaactaggacccccgccacagcaagcctctggaagtttggacagcaaaaccattggtttcactacccatcggtggtccatttatagaataatgtgggaagaaacaaacccgttttatggatttactcatttatcgcctttttgacagctgtgctgtaaacacaagtagatgccttgaacttggatttaatccacacatcagtaatgtattctatctcccctttacattttgggtctctatactacattattaatggggttttgtgtactgtaaagaatttagctggtatcaaactaagtgcatgaatagattctctccctggattatttatcacatagcccccttagccaggttggtatattattcttggtgggtttgtgacccaattaaggtcctactttacatatgctttaaggaatcgatggggggatgcttcatgtggaacgtggggagttcagctgctttctcttgcctaagtattcctttcctgatcactatgcattttaaagttaaacatttttaagtatttcagatgctttagagagattttttttccatgactgcattttactgtacaagattgctgcttctgctatatttgtgatataggaattaagaggatacacacgtttgtttcttcgtgcctgttttatgtgcacacattaggcattgagacttcaagcttttctttttttgtccacgtatctttgggtcttcaattaccaagaattctccaaaacaattttctgcaggatgattgtacagaatcattgcttatgacatgatcgctttctacactgtattacataaataaattaaataaaata

SEQ ID NO: 19080 - DNA, 3648 bp, Homo sapiens
  SIMILAR (396)..(1655): 701254mologous to Mus musculus beta-amyloid protein,accession number M18373,Smith-Waterman Score=1381.
  misc_feature (1)...(3648): n = a,t,c or g
atgaagtccatcttcacttcagagatctcctccgtcttgatatttgtcaacccagaacctggtcgagtggtcagtttcctcggcagcggtaggcgagagcacgcggaggagcgtgcgcgggggccccgggagacggcggcggtggcggcgcgggcagagcaaggacgcggcggatcccactcgcacagcagcgcactcggtgccccgcgcagggtcgcgatgctgcccggtttggcactgctcctgctggccgcctggacggtctgggcgctgggaggtacccactgatggtaatgctggcctgctggctgaaccccagattgccatgttctgtggcagactgaacatgcacatgaatgtccagaatgtgaagtgggattcagatccatcagtggaccaaaacctgcattgataccaaggaaggcatcctgcagtattgccaagaagtctaccctgaactgcagatcaccaatgtggtagaagccaaccaaccagtgaccatccagaactggtgcaagcggggccgcaaagcagtgcaagacccatccccactttgtgattccctaccgctgcttagttggtgagtttgtaagtgatgcccttcttcgttcctgacaagtgcaaattcttacaccaggagaggatgggatgttttgccgaaactcatcttcactggcacaccgrccgccaaagagacattgcagtgaagaagaagtaccaacttgcatgactacggcatgttgctgccctgcggaattgacaagctccgaggggtagagtttgtgtgttgcccactggctgaagaaagtgacaatgtggattctgctgatgcggaggaggatgactcggatgtctggtggggcggagcagacacagactatgcagatgggagtgaagacaaagtagtagaagtagcagaggaggaagaagtggctgaggtggaagaagaagaagccgatgatgacgaggacgatgaggatggtgatgaggtagaggaagaggctmaggaaccctacgaagaagccacagagagaaccaccagcattgccaccaccaccaccaccaccacagagtctgtggaagaggtggttcgagttcctacaacagcagccagtacccctgatgccgttgacaagtatctcgagacacctggggatgagaatgaacatgcccatttccagaaagccaaagagaggcttgaggccaagcaccgagagagaatgtcccaggtcatgagagaatgggaagaggcagaacgtcaagcaaagaactttgcctaaagctgataagaaggcagtttttccagcatttccccggagaaagttgaatctttggaacaggaagcagccaacgagagacagcagctggtggagacacacatggccagagtggaagccatgctcaatgacccccgccgcctggccctggagtaactacatccaccgctctgcaggctgtttcctcctcggcctcgtcacgtgttccaatatgctaaagaagtatgtccgcgccagaactgaaggactagtcagcacatctctatagcatttcgagcatgtgcgcaatggtggatcccaagaaagccgctcagatccggtcccaggttatggacacacctccgtgtgatttatgagcgcatgaatcagtctctctcccgtgctctacaacgtgcctgcagtggccgaggagattcaggatgaagttgatgagctgcttcagaaagatgcaaactattcatgatgacgtctttggccaaccatgattagtgaaccaaggatcaagttacggaaaacgatgctcttcatgccatctttgaccgaaacgaaaaccacccgtgggagctccgttccggtgaatgaagaagttcagcctggaccgatctcgagccggtgcatttcttttggtggctgacgtctgtgccagccaacacagaaaacgaagttgaagcctgttgatgcccgccctgctgccgaccgaggactgaccactcggaccaggttctgggttgacaaatatcaagacggaggagatctctgaaagtgaagatggatgcagaattccgacatgactcaggatatgaagttcatcatcaaaaattggtgttctttgcagaagatgtgggttcaaacaaaggtgcaatcattgggactcatggtgggcggtgttgtcatagcgacagtgatcgtgcatcaccttggtgatgcttgaaggaagaaacagtacacattccatttcatcatgggtgtgggtggaggttgacgccgctgtcaccccagaggagcgccacctggtcccaagatgcagcagaacggctacgaaaatccaacctacaagttctttgagcagatgcagaactagacccccgccacagcagcctctgaagttggacagcaaaaccattgcttcactacccatcggtgtccatttatagaataatgtgggaagaaacaaacccgttttatgagttacgcattgatcgccttttgacagctgtgctgtaaacacaagtagatgcttgaacttgaattaaatccacacacaagataaatggattcctcctctctttacatttttggtctctatactacattattaatgggttttgtgtactgtaaagaatttagctgtatcaaactagtgcatgaatagattctctcctgattattttatcagcataggccccttaggccagttgtatattattcctggtggtttgtgacccaattaaagtcctactttacatatgctttaagaatccgatggggggatgccttcatgtgaaacgtgggagttccagctgccttcctcttgccctaagtaatccctttcccgggaccactatgccattttaaaagttaaaaccatttttaaaggtatttccagatgcttttaggagagatttttttttcccatggactgcaattttaactgtaacagattgcctgccttctgctaatatttgtgatattaggaatttaagagggatacacaccgtttggtttccttcggtgcctgtttttatgtgcacacaattaggccattgagacttccaagctttttcctttttttgtcccacgtaatctttggggtctttgattaaagaaaagaatcccctgttcatttgtaggccacttttaccgggggccgggtgggggagggggtgctttgctggttcttcaattacccaagaattctccaaaacaattttctgcaggatggattgtaccagaatcattgccttatgacatgatcgctttcctacactggtattacattaattaaattaaattaaattaaccccggggcaagacttttttttgaaggatgacccccagccattaaataatccgaagtaattttgggtggggagaagangcaggcagattcaattttctttaaccaagtctgaagtttcgatttatgatacaaaagaagatggaaaatgggaagtggcaatataaagggggatgaggaaggcatgcctgggacaaaccccttcttttaagatgtgtcttccaatttgtataaaacgggggctttcatgtcaacaaaatacattctttggaggagcttgttacatccttgtatgtcacacgcccctctgcatagacacttcttcatttcacacgcgagtgtgggggcggggcg

SEQ ID NO: 19081 - DNA, 475 bp, Homo sapiens
  SIMILAR (473)..(57): 1001254mologous to Homo sapiens desmoplakin,accession number J05211,Smith-Waterman Score=697.
gaacataaactcaagattttattgtcttcataataaaagatgacacttagaactggatcacttggatctgagagaatctcactgagttcctcattgaaatagcccctcttatatgctatgtcaactggtaaacgatggctctcctttgggtcaatgatccccccggttgcgatctgtgcttctaataagcgaataccgtggcccttttcgatgagttccttattcatggcttggaacaaagagatgatgtttcctgtttcaggatcattatacccagtgacagctcgttctgcagacaggagcttctctttgaactcaatgcccaccagacctctcttgtaggcttcctccactggtaacctcaagttgctaacaggatccactataaagccagtagctgcttgggcttccagcaactccagagcagtaccaggtcggactaagccaattttcatggcctcataaatgccaagct

SEQ ID NO: 19082 - DNA, 482 bp, Homo sapiens
  SIMILAR (19)..(144): 971254mologous to Homo sapiens ribosomal protein,accession number M15661,Smith-Waterman Score=217.
tttaatttaattttttttcaggctaaaactacaaagaagattgtgctaaggcttgagtgcgttgagcccaactgcagatctaagagaatgctggctattaaaagatgcaagcattttgaactgggaggagataagaagagaaaggtatataattatgggtggaaggtgcaatctttttcatagctttattatttgaaaaggtgaacatctattcattgtggcatagagctcaggggtaatcctctaaaaatattagatctatagctaaagatatgtgaggtcttttgctacaaggaggaaaggaagaatgaggcagcttaacagcatggtgagtattttaggaacagataatgttcttaatggggcagtagttcatggcaaaatacaaaacaacttttttctgttctgttacagggccaagtgatccagttctaagtgtcatcttttattatgaagacaataaaatcttgagtttatgttca

SEQ ID NO: 19083 - DNA, 487 bp, Homo sapiens
  SIMILAR (85)..(387): 581254mologous to Rattus norvegicus ribosomal protein L36a,accession number M19635,Smith-Waterman Score=249.
ggatggttcacgctgagatctctgacgagggtttctttctttccgcgccgatagcgctcacgcaagcatggttaaatatccctaaaaccccgccggactttctgtaagtaagtgtggcaagcaccaaccccataaaagtgacacagtacaagaagggcaaggattcctctgtacgcccagggaaagcggcgttatgacaggaagcagagtggctatggtgggcaaaactaaaagccgattttccggaaaaaggctaaaactacaaagaagattgtgcttaaggctttgagtgcgttgagcccaacttgcagatctaagagtaaatgctggctttttaaaagatggcaagcatttttgaactggggaggagataaggaagagaaagggccaagtggatccagttcttaagtgtcatcttttatttatggaaggacattaaatctttgagtttctgttcaaaaaaaaaaaaaaaaaaaaaaagtcgagc

SEQ ID NO: 19084 - DNA, 564 bp, Homo sapiens
  misc_feature (1)...(564): n = a,t,c or g
tcttatanacatgttgactcttgttcctgctgagttacttgttcgaagcttacagcttgttntccaggcatcgaataactgttgagattgttctactgttgtcgtatattcttctatattgaattctggttaatttggagtaactaattctgtggctgttgtgagtcttcagcaccctcccatgtaatgttcctccatacagttaaaacatcctaacttgtttttcaagctcactcaggcctacgccaaacgtttctgttttttttaaccataaaggttaaattaatttttgtgataggagggatatttacatattttagtggaccacattttaagttggatggtgtgctctaaaatactgaaaaacaatagcccatatacctatgtatttgtttttgatgggttgtttactctgaaataaaatgtatggttttcttaaaaggaagttttaaagtacctattttgtgtcatcctgtattgaaaagaatgtcaagcttgttaaaatgacatgtaacaaaaatgtattttgatttgtatttcagaaactaaaaaataaaatgttga

SEQ ID NO: 19085 - DNA, 1804 bp, Homo sapiens
  SIMILAR (501)..(959): 691254mologous to Homo sapiens ankyrin repeat protein,accession number D83197,Smith-Waterman Score=453.
  misc_feature (1)...(1804): n = a,t,c or g
gtgagacacgatgagtgttagcttgcacagtagaggcaagtgttataggaggccagaaaagggagatgaacatgggaagcatagtcagagaaggcttcatggaggaagcagggcccagaattgggtttaatttgagtttcttcatccaaagcacagtcaccggttcgagctcagtaggtagtactcagctccaacccttgtcccttccgcctgccactgcaggtcaggaaccccgggggacaggacctttaggctctcataactcttgccctgcccccgaacctgtttcatatggccgactcaacgacccgccagcgactacccaccccggctctttcacacggttccactcaaagccgctcacaagtagttgctgggacagcgaaatggaggggtgtgtgtctaacctaatggtctgcaacctggcctccttcctaaatgttagcactaatccttgtgcctttttcccctggtatttctactacctacttcttttataggcaggttggtctcctcttcatattgcggcttctgctggccgggatgagattgtaaaagcccttctgggaaaaggtggagttctaaacgtgtatacaaacacagatagatttctgcattgttttcttctttcttctccatctttccagatcgctgtcatgttactggaaggcggggctaatccagatgctaaggaccattatgaggctacagcaatgcaccgggcagcagccaagggtaacttgctagcaagaaatcctaaccattacatagaattggtagtgattaattggtctctggtggtccctgatttcagacacttagcctgtgatgaggagagagtggaagaagcaaaactgctggtgtcccaaggagcaagtatttacattgagaataaagaagaaaagacacccctgcaagtgggccaaaggtgggctggggttttaatactcaagagaatgggtgggaaggtttaaacagcttgggtttattctttactttgtattgttgtgtttgttgtccccagtgtcctacaaactaatgtatttgtgcacaagacatcatctatgaatgatgaagttttctcaccttcaaagtcttataaacatgttgactcttgttcctgctgagttacttgttcgaagcttacagcttgttttccaggcatcgaattaactgttgagattgttctactgttgtcgtatattcttctatattgaattctggctaatttggagtaactaaattctgtgggctgttgtgagtcttccagcaccctccccatgtacccttataatccctccncctgaaaacagaacagctcccaatagcaaccaagctaggtggttctgcccagatgtttctatgtggattctgtaaatgtccctcccataccagttaaaacccatcctaaacttggttttttccaggctcacttccaggcctacggcaaaacggtttctgtttttttttaaccatgaggtttaatttattttttgtgataggagggatatttacatattttagtgggaccacattttaagttgggatgggtgtgctctaaaatactggaaaaacaatagcccatataccctatgtatttgtttttgatggggttgtttactcctggaaataaaatggtatgggttttccttaaaagggaagtttttaaaggtaccctattttgtgtcatcctgtattgaaaagaatgtcaagcttgttaaaatgacatgtaacaaaaatgtattttgatttgtatttcagaaactaaaaaataaaatgttgaaagaaaaaaaaaaaaaaaaaa

SEQ ID NO: 19086 - DNA, 1923 bp, Homo sapiens
  SIMILAR (1011)..(529): 921254mologous to Homo sapiens Fragment of human secreted protein encoded by gene 18,accession number Y14483,Smith-Waterman Score=776.
ttattgcaaatggagattagcaataagtgaggaaggtgaccatccactccgttctgataagacaccatctttaaatattaaattttttgcaggaagtggaacacccatgtcagcatacgatgactgtgaaagcaaacttgaaaaactgggctctgtgtgaatatccaatgttgaagcaccttcctggaatgagtgaacaaagttaaggacttgcagagagagttttctactggaatgtaagaggttttgaaggctctcttttctgcaaaggccatgtgtagcaattttcctataaactttccggtttaattcggaactgaacagcggaattccaaagcacagctcgagaggaacccaatctgcttctgttgtggcaccagaggtttgctttgttgctgaatctatagttgcttcttcaatgaccatttcaaatgactctgtactcccatttaacatctgagccagaagccaaatcaggttttcctctctcatcagaagcatcactgagttttctatttgcaagttggcatgctcctgaattaaaactgcagaatgtgttaaagcatcattcaacatcgtgagcacatttgaggtaggaactactccaggatcgtgaccccaagatgttattagcaatcgatcgtaactctgaaatatatctggcagttttcgaggtcttgtacctttggataataaaagggatggtggtccttgtccagtgatatgataaacataaatgtactgtttaaaccagacagagctgacttctgggatagctggtccaatatgctgaggggtgcagctgctgacaggccggatttcattggtgaggggagccatggaaacaagcagtgtgtaatttttgtttagaactctgctgccagttgcagggtccagaccaagaaggctttcacagcataagagatccagaggaaaaccataattgggttggtctggctgtgcagtttgcacaactagatctttgttatgatgcagaaacagtattgtgtttctcagagtaagcgcatgatcaaaatatctctgtgcttctctttcaccagtgctctgaactggtgaaagatttcccatcattaagaaggcagtaagagtggagtcaaacaggaatgcgatgtgcttcgtgtgtcctgcagacagactcaggcttcttacactggctgtgtcagctggatcttcttgactatttgtatcagtgtcagttgccgatgaagcttcttgtacaggcctcctactttcccctccaccccatgacaagagcaccttttgatgtgaagacaaagatgaagacctccatgatgagctatctccacttaatgactgcctcacgttggccggcaacttgttccaggggtagttgtgccggatgtggaactccacgtctatgttcaccatgccgccgccagggctggctgtttccacagccgaggggccttcctgtgcatcaaagaggaaggcattgctgctgggaagctggtgggagtcatggcagctggaatgagtcaaatactgttcatctagtgagtactccaggacttcatccatttcttcctcctggacttcccggagccttgcagctgacctcggcaattcggccagctccctctcctgaaactgcacctcctcctccagcacagattctataaggtctttgcactcttcacacttacatttctgcaggtgattggccaggcagtaggcagtagctttggatgtcaggaatttctctgtgaggtcttggaagttctgtttgcacttttccagttcagagcgcaagtactgattggtttccaggatgctcatttctgccctcttggtctgggtagacactttcactggatgggtaaaggcttttcccacagggtcagagaaggccaccacggtcatttcttcccttttgtcagacat

SEQ ID NO: 19087 - DNA, 794 bp, Homo sapiens
  SIMILAR (179)..(283): 821254mologous to Homo sapiens plasminogen-like protein,accession number M93143,Smith-Waterman Score=151.
tcagacataattcctcagtttggccttcccatctctatacagtccgataacggactggcctttattagtcaaatcacccagtttctcaggctctttgtattcagtgaaatcttcataccccttatcgtcctcaatctctgggtcaaggagagcctctggatgactatgtgaatacccagggggcttcgtgttcagtgtcactaagaaggagctgggggcaggaagtatagaagaatgtgcagcaaaatgtgaggaggacaaagaattcacctgcaggtatttccattgtcgttgcacctttctcagcattccacaagttacttcctccttcctttgttttcctctacctttgcctcttttaaaaagttctaagttgttagccaatcgggacaaatacagaatgtgaggtcccattccagccaatagaaaccagacacagcagtagggtggacatgtcaggttataaatgaccctgtctcctttgtttggtgaactctcatggcaaaactgctggtgagtgtaccctttcaaaatcccttttaaaacctgaagccaaaataaagccttcttcagccaaagaaaagctgaaagccaccaccaccaccagtcccgtgctataagaaatgctaaaggttgtttttcccagaaagaatgtgcctccagatggaaattgggatctcctttccgttttgaaacacacaaaaatctctcggcctcaagtacacagtcttcatcaacttcctgctgatgatcaagtactttctgctgtaaaaatttatcagctgcaagaattg

SEQ ID NO: 19088 - DNA, 2146 bp, Homo sapiens
  SIMILAR (669)..(265): 601254mologous to Homo sapiens NAG13,accession number AF194537,Smith-Waterman Score=369.
ttacaaatagtctcgtccacacattgtgacagactctttgtatggacggatgcttttatttttcttgggtaaataggagtgacataggagtgaaaggctgggacctatagtaagtgtattttcactttttaaggaactgtcaaatgattttctgttgtgatcgtactgttgtatgttccaatcaagagtgtgacagcgttctggttgctccatctcctcttcaccaatatttgatattgtccatttttttttagatttgtgccacagctcctctttgtacctctggtagaatttggctgcgaatccatctggtcctgggctttttttggttggtagtctattaattgctgcctcactttcagaacttgttattgatctattcagggattcgacttcttcctggtttagtcttgggaggctgtatgtgtccaggaatttatccatttcttctagattttctagtttatttgtgtagaggtgtttatagtattctctgatggaagtttgtatttctttggtctttgatgttggtgaccttcggatggggttttcatgtggacctccttttgttgatgttgatgctattcctttatgtttattagttttccttctaacagtcaggcccttctgctgcaggtcttctggagttcgttggaagtccactccagaccctctttgcctggctatcaccagtggaggcttcgtggtcaccatatcatctggagaacgtgtcaaaagaggagaagtttctgcttgcattccccatccagtgaaagcgtctacccagactaagaggtattttagtttcctgactcggggcatgtgagtaaagtcaatttgccagtcctgggcaggggcaaatccccgagcttgatgtgtaggaaagggaggaggcctgaacaattccatggggtggataggcaaaacaatttggttgataaggctcagatcctgaactaacctgtaaggcttctctggttctaggacaggtgaaatgggggaattgtaaggagagtttataggctttaaaaggccatgctgtagcaggcgagtgataacaggctttaatctttttaaagcgtgccagctgccactctcttgattgtcctctgcagcatcacttccaagtaatgacctgtctgctgtgtgagcacctctcatcacaggatactcactacccttcgcctggtccagactccacacatgggctgcgctgccacagtacacgctgccaccacagcaggacaacgcccacggcccgtgaaccacgcgaggacaacgcccacggcccgtgaaccacgtgaggtgcgacacttttgtcctgccctgggacttctgctccggcccgcgatgccgcaagacctggctcagctgcagggccccacagcctcccctccggccccactcaccgccgcccccgtgaggtaggacagggagatcccaaagagccggccccaggcagccccgatgagcagggacgggatgaagaccccggcagacaccgtgagcccgtaggtccagcaggccaggaagaagtagaccagcgtgaacaggccgagggtcagggggttgtaggagcctaggagagaagaggggctgacggggcctccacgactcccgcctccgcaggactgccctgccccgctgcccagtctcgggcctcacagtcaccttccaggagcccagcaacctgagctcccgagcccagcggtccccagaaggctccctgttctcagcctccgggctgcagatgctgggccgaggctgctcagcggctgtcctgccccacacaggagtctctggggctcggggtctcccaggccctggggacagtcgctgggtgggacgggaggcttgggaccggcctgtcaggcctctaccctcggacagcctgaggcccagcatctgctcctgcagatcgagccggctgctcagagccgggagatggccactcagctcctttaactgcccggccagctgcgccacggatgcctccagagcccggctcttctctcggagcagcaccagctctccatgcatctcctgccgggccagctcgccagccagctgtgcggcctccaggttctcctgcacataggcggccagctccccagcccggctttcctccaagcgccccttggcgtcc

SEQ ID NO: 19089 - DNA, 1281 bp, Homo sapiens
  SIMILAR (256)..(11): 591254mologous to Plasmodium lophurae histidine-rich protein,accession number X01469,Smith-Waterman Score=384.
atgtctactgatgatgatagtgatggtggtggtggtggtgatggtggtggtggtaataattgtgatggtggtggaatgatgatgatggtggtggtgggtagtaatgatggtgttggtgatggtggtagtggtcgtggtgatggtgatagtgatagtgatggtggtggtaatgataatgctaatggtgatggtaatgataatgattatcatgatgatagcggtggtgatggtgatggtgatgataatggtgatggtggtagaatgatgatgatggtgatggtggtgctggtggtaataatgatgatggtggtggtgatgatgttgaggatgatgataatagtgacagtggtggtgagactgaggtgcgactctagaggatcccctgatggtggtggtagtggtagtaacgatgatggtggtggtgatgatagtgatgatggtgatgatgttgagggtgatgataatagtgatagcggtggtggtaatgataatggtgatggtggcggtggtgatgatgttgatgaagatgataatgggagtggtggtggcaatgtggatggtgatgatgatgttgacgatgatgatgctcatcacaatcaccttatatcacctctgagaaagtcagcagagtcagaacgcttttctaggttccagactcataatgtcctcaccagcacctctgagaaagtcaggcagagatcccaaaacagtcttagtgttccagtggtcaagggggactggcaaattgactttactcacatgccccaagtcaggaaactaaaatacctcttggtctgggtagacactttcactggatgggtagaagcctttcccacaggatctgagaaggccaccgtggtcatttcttcccttttgtcagacataattcctcagtttggccttcccatctctatacagtccgataacggactggcctttattagtcaaatcacccagtttctcaggctctttgtattcagtgaaatcttcgtaccccttatcgtcctcaatcttcaggaaaatgactgcacaagaattgctccaagtggaaggactgatgttggcaagccggcttccagccaggagctgcagacagccgttgatcttcaggggaagttacctctgagttcagacactctggcaatccctagctatcaaccttccgataagcaagggctccgacccacctacctgaggatcagtccgggagccagcgtctggacagagcggggtcgcgccctggaacacagggcaggagaggaaggagaaaagcccagctga

SEQ ID NO: 19090 - DNA, 641 bp, Homo sapiens
  SIMILAR (165)..(500): 461254mologous to Xenopus laevis ribsomal protein S19,accession number V01443,Smith-Waterman Score=162.
gactcccgggtcgactactactactaaatttccgacagcgtcgacagatagatcgcccctccatgaacgacacccgtaacctatcccgcacctagaaagttccatgccccaacccgacctacttcagaggaaaacaaatgggtcattgatgtcctttcacccgcgggaaggccgacagtgccctaagaccagaaattccgggaaaaacctagcccaaaatgtaccaagccccacacccggatgtccatccttgtatttggattccagaacctcattttggtggtggcaagacaactggctttggccatgatttatgattccccctggattatgcaaaggaaaaatgaaccccaaacatagacttgcaagaccatggcctgtatgagaagaaaaaggacctcaagaaagccaccgaaaaggaacgccaagaaccagaattgaagaaagtccaggggggacttgcaaaaggcccattgttgggtgctgggcaaaaagaagaaatgaagtgtctagcagttgagctggagattggttcacagccgaaggagttaaaggtgctgcaatgatgttagctgtggccactgtggatttttcgcaagaacattaataaactaaaaacttcatgtgaaaaaaaaaaaaaa

SEQ ID NO: 19091 - DNA, 476 bp, Homo sapiens
  SIMILAR (2)..(475): 991254mologous to Mus musculus nuclear factor YC,accession number AB006181,Smith-Waterman Score=789.
tatgaaactggatgaagatgtgaaggggatcagtgcagaagcgcctgtactctttgccaaggcagcccagatttttatcacagagttgactcttcgagcctggattcacacagaagataacaagcgccggactctacagagaaatgatatcgccatggcaattacaaaatttgatcagtttgattttctcatcgatattgttccaagagatgaactgaaacctccaaagcgtcaggaggaggtgcgccagtctgtaactcctgccgagccagtccagtactatttcacgctggctcagcaacccaccgctgtccaagtccagggccagcagcaaggccagcagaccaccagctccacgaccaccatccagcctgggcagatcatcatcgcacagcctcagcagggccagaccacacctgtgacaatgcaggttggagaaggtcagcaggtgcagattgtccaggctcagccacagg

SEQ ID NO: 19092 - DNA, 2451 bp, Homo sapiens
  SIMILAR (739)..(969): 821254mologous to Homo sapiens CCAAT transcription binding factor, gamma subunit,accession number Z74792,Smith-Waterman Score= 324.
atgaggggctccatccttaaggaatgtggttctaaggagagggccagccaagtggacctggaatactccagaggaaacacggccagctttgccatgtgcttccatgacagagccagaattatgaagggaagccagagaagccgaaaactaacagggggagaagggagagaagagggagaaagagtagagaataaagacttcttggacctgcatggccagatacaggtgcgccttgtggtgaagactgccagcttgttatcacgagtcacctacatagctgaggttgaaggtagagagacagatgccggctggagaaatgaacttcaagtggggagactggattctggtccagacattttggttgtttccatctccactgaccatactttggttgacactcatctagaagcagttggaggacactcacatgaatttccatattttaaaaaccacttagcttgccatgtggaaagtgagctgcagagagacaggaatggccacagggatgctggttggaggaacatgagacatgggattactgacaaggaaatgcaagatagtcaaggatcttcagacaatcatgttctgggaagcttgaggtcatggagcgccagggcggctcctgctcttcctggactccctgaagaggcgtttgtcgaaatgtccacagaaggaggatttggtggtactagccgcagtgatgcccagcaaagcctaaagtccttctggcttcggcccagattttttatcacagagttgactcttcgagcctggattcacacagaggataacaactgccggacttatgtcgccatggcaattacgaaatttgatcaattggattttctcatcgatattgttctaagagatgaactgaaacctccaaagtgtcaggaggaggtgctgcagtctgtaactcctgctgagccagtccaatactatttcacgctggctcagcagcccaccgcccgtccaagtccagggacagcagcaaggccagaccaccgccagctccatgaccaccatgcagcctgggcagatcatcatcgcacagcttcagcagggccagaccacgcccgtgacgacgcaggttggagaaggtcagcaggtgcagattgtccaggcccagccacagggtcaagcccagtaggcccagagtggtactggatggaccgtgcagggacagatccagacacttgccaccagcgctcaaccgattacacagacagaggtccagcaaagacagcagtagttcagccagttcacagatggacagcagctctaccagatccagcaagtatccatacctgcgggccagcgacctcgcccaggcccatgttcatccagtcagccaaccagccctccgacgggcaggccccccggagtcatgaagtcatcgcagctgcgcctgcagccaggcgggaacgggaacgggaactggctggccgcggtcccttctgtcccccgccagccggaaatgtccgcgcgctgaaaagcagacgctgcctgcccggggaacggcgagagagagcgagaaaaaaaaagcctgaaggcggcgcggcagccagcgagcggggagaaacagattcacacccaggggcctccgggcagggcccacgggactcaggccgtgtcccgcttggaatgtggagcaggcgcggcctcggcgtcagcagagctcccctgcatctcctcctgggggtgtcaacttcctttccattaccattaactcctcttattccaaccacagctgttgtcaaccctctcaaacctctgaaaaacaggataaaagccccacataggaggatgccccttgtgccaggtggctctcagaatctggggactgtaagagccaggatcagcacccgtcagtcacatgctgagcccagcactgacaatgaacgtgttctgtctatgactcaagatatacactccatcttcttgaaccttaagaatattacatggatttgtaccttacaaagttgtgggttcttgctaagcaatctctgtaaggacattgtccacaaggcaggcagtggggaagcaaggacaagatggagcccacgggcacaagctggaacccatgaggatggactgagactcatgccaattcttgctgcctctgactttgatggtgtgggtgtcctgcaggaaaagcttgtgccctttatcacagagctggcccaggagccaagaggccaaagcaggacagcaggggcctgctgtcccacaccagcaacaagcagcatatgtgttctgtttctccggaaaaccctgactaatacagtagaggatatccagattgacaacttcaggagaaagtctgatttaggagtcggaagcccagattggaaaaacctcttgatagatgtcactcgggaagaccatgaaaacagccaaaataattcaaagagaagatgcaaagtgaactgtgaaacagaccaaagatga

SEQ ID NO: 19093 - DNA, 456 bp, Homo sapiens
  SIMILAR (448)..(386): 421254mologous to Bacteriophage 186 computer protein 78; putative host replication depressing protein,accession number X15001,Smith-Waterman Score=64.
catgaccatgcattacgagattccggtccgtacccggagatcaaaagggacgacataactccctcagaacgcctggtgaacaacatgcctcactgaacaggtgctatttaagctgatatctcaatgactaattatgcaaggattgagaggaaccatttagggagaggaaacagcaactccaaagaccctaagctacgagagagctctgagcatttgaggaaattaaagaccagagtggtgaacgagcagaccaggcttggtctcataatggagacgtttgtgggccgaggcggagaggctccattttactttcaatgtgacaaacatctgtcacggagttttcagggactcggtctgatctgtctgtaaaaagcctgtaaaactgctctctgggcagggcatctctgaaagaaaggcagcagccccagtcagggcttatagataaaactcccatct

SEQ ID NO: 19094 - DNA, 1039 bp, Homo sapiens
  SIMILAR (771)..(604): 501254mologous to Homo sapiens Human gene 91-encoded protein fragment, SEQ ID NO:490,accession number Y86573,Smith-Waterman Score=128.
tttcataccccagtggtgcctggaatgccagcgagacaaaaccgtttactcccctggaaaggaggctgaagccagggagccaagtggtctggctcggtgggtcccactcccatggagcccagcaagctaacatccactggcttgaaattcttgctgccagcacagcattctgaagttgacctgggacactcaagcttggtggggggaggagcagccagggagccaagtggtctggctcggtgggtcccactcccatggagcccagcaagctaagatccactggcttgaaattcttgctgccagcacagcattctgaagttgacctgggacactcaagcttggtggggggaggagcgtccgccattggtgaggcttgagtaggtggatttaccctcacggcgtaaacaaagcctctggggagttcgaattgggtggagctcactgcagctcagcaaggccactgtggccagactgcctctctagattcctcctctctgggcagggcatctctgaaagaaaggcagaggccccagtcaggggcttatagataaaactcccatctccctgcaacagagcacctgggggaaggggtggctgtgggcgcagcttcagcagacttaaacgttcctgcctgccaactctgaaaagagcagcagatctcccagtgcggcacttgagctctgctaaaggacagactgcctcctcaggtgggtcccggacccctgtgcctcctgacagggagacatctcccagcaggggtcaacagacacctcatacaggagagctccagctggcatctgacagggtcacaagggatcaaaactggatagagaatgagtttgacaaattgacagaagtaggcttcagaaggtgggtaataacaaattcctctgagctaaaggagcatgttctaacccaatgcaaggaagttaagaacattgataaaaagttacaggaactgctgactagaataaccagtttagagaagaacatatgtgacctggtggagctgaaaaaacacagcacaagaacttcatga

SEQ ID NO: 19095 - DNA, 1239 bp, Homo sapiens
  SIMILAR (640)..(768): 441254mologous to Homo sapiens Human secreted protein sequence encoded by gene 11 SEQ ID NO:72,accession number B24447,Smith-Waterman Score=72.
  misc_feature (1)...(1239): n = a,t,c or g
acatgcttcccaagctacactctggggtatgaaacacacgctaacagatgtaaaagaagccccactggttacctagctgtaatgaacacctaacaccctacttcatccaactacagcagaacacacatgcttcccaagctacactctgggctatgaaacacccgctaacagaagttaaagaatataggtccttccatgggtatgacctctcaattccatacgggagttaaactagaaatcagtaacagaaagatagctggaaaatccccaaacacatggagattaagcaatgcacttctaataccacatggatctacaaagaagtctcaaaagaaatttaaaaatatttaaactaaatgaaaataacaacacaatatatgtaaatttgtgagatgcagcaaaagcagtgcctggaagaaatgcatagcattcaatgcctgtattagaaaagaatgatccaaaagcaatcatttagatatccatcttaggaggcagtcaaatccaaagtaagctcagcaaatggaataataaaagttagtagcagaaatcaatacaattgagaataggaaacagagaaaaataatgtaatcaaaagccagcgcnnnnnnnnnnnnnnnnnnnnnnnnnagccgctaaccgttcactctcctggaaaaggggctgcagccagggagccaagtggtctggctcggtgcggtcccacctaccaatgagcccagcaagctaagatccactggcttgaaattcttgctgccagcacagaaatcaacctgaaatcaacctgaaatgctcaagcttggtgcnnnnnnnnnnnnnnnnnnnnnnnnnnnnnnnnnnnncagttttaccctcaccgtnnnnnnnnnnnnnnnnnnnnnnnnnnnnnnnnnnnnnnnnnnnnnnnnnngcaaggccactgtnnnnnnnnnnnnnnnnnnnnnnnnnnnnnnnnnnnnnnnnnntctctgaaaaacaggcaaccagccccaagcaggggctttgaaaataaaacccccatctatctgggacagagcacccaaggaaaggggccgggtgtgggggccgattttaacaaaaataaacgctcatgcctgacggctgtgaagacaacagcagatctcccagcacagcactcaagtctctgctaaggtcagactgcctctcactgggtcctgaccctgtgtatctgactggagaacctccagtagggaaacagaccctatacagaagcttgctggg

SEQ ID NO: 19096 - DNA, 429 bp, Homo sapiens
  SIMILAR (235)..(152): 461254mologous to Mycoplasma pneumoniae RpsN,accession number U34795,Smith-Waterman Score=60.
  misc_feature (1)...(429): n = a,t,c or g
cttaattcccacgaggctggggtgtgtgctcctgagctnttngaaaccaggctgctttcaggaacattgctgtggattcccagggcctattccactanaagcaagatggctgaatgcgcatgcagcaacctctgggaaacagagtaacttttcccgaaaatcatccactcacaataagccctctgaaggcaaagcggcaaaccccaaaatggtgagcagtctccccagcaccgccgacccctctcaccagaccatgccggccaacaagcagaatggatcttctaaccaaagacggagatttaatccacagtatcataacaaccggctgtgacgttggtggcctgagctaggaggaaaaagagcagttttcactcagttttggttccctgcccgaggtgctgacccaattcgctgccaaaagagtggtca

SEQ ID NO: 19097 - DNA, 415 bp, Homo sapiens
  SIMILAR (296)..(415): 1001254mologous to Homo sapiens Human secreted protein, SEQ ID NO: 5522,accession number G01441,Smith-Waterman Score=199.
aagcgacgattttgtgcagcgctgtgtttgcgagcgggatttaagggctgccggctggggtgtgtgctcctgagctcttcagaaaccaggctgctttcaggaacattgctgtggattcccagttcaagcaaagtgatgtaatacccaagaacaggaaagtaaacctaagagcattaatgggtttcagagaaacgaaagtgaaactttattactgcctacacaatcaaacaggagggagaaaggagacaagcaagtcagaaagcgatttgatagggcctattccactagaagcaagatggctgaactcaatactcatgtgaatgtcaaggaaaagatctatgcagttagatcagttgttcccaacaaaagcaataatgaaatagtcctggtgctccaacagtttgattttaatgtg

SEQ ID NO: 19098 - DNA, 394 bp, Homo sapiens
  SIMILAR (210)..(22): 341254mologous to Aspergillus aculeatus CREA,accession number AB024314,Smith-Waterman Score=84.
ctgggattcttctagaaagtggggtgggaaaggagctagggagggcgtgtggagggacgagatctgtgtcagaacgtgcgtgtgagcggatacaaaacccgagagaggcgtgagcagcgctgtgtttgcgagcgggagcgaggggcgccggctggggtgtgtgctcctgagctcttcagaaaccaggctgctttcaggaacattgctgtggattcccaggtgagtagagatggtccttccctctctgtgacctcctcctgctgccatggccagctgtccctacacctgcagctgcctcctgggagccttgtcacagcctttggccgcctctgctgcctctcagggctcaacaccagagttctcttttagagtgtgttgactgaagttattcctg

SEQ ID NO: 19099 - DNA, 1350 bp, Homo sapiens
  SIMILAR (808)..(1143): 971254mologous to Homo sapiens unnamed protein product,accession number AK002064,Smith-Waterman Score=575.
atggaatcacattctgatatccttgaagagaaggctataggttcactgccctttgaggatgcagctgatcttgtacagccaacagtggcactagatgccgccactgggaccaccactgctgctgggaccactgggaccaccactgcatatgggaaagtgggcatagttgtgctgcagttttcccatcactgctgcttggcattactagctcctgttgctagacctggtttgggtgtgtctgactcgtcaaacctgaatcatatgctacaagtcctgctgcaagggagtcctgaacagcctgtgtctggcttttgttgttgtgttgatgatgatgatgattatgatgatggtggcttcttagtgagaggtaacctagacagactcataaggttcactggttctcttccacagagcggccctgagcagctgagcctgcaagccacgcaagcatctgtttcttcttttgccaagtacaggaggatgtttgctctctctgtagagagctttctgaggtctctgggtgtacccagagatttaatagaaattcttaacgttaagtcacattccaggaaggaaggaagagttgttcgttcaaataagaaagataaatgttcggcactgcaggaagatgctcattccctagccaggtcagcactaagactgagcgtggagcctcccagcaacagggctggaaagatccccaccaggtcagcactgcagtggacaccggaagagcagagtgaacgcatccacgggggtgccttggtcatttctgtaatcatggggttcctgcttttcatctctttcctccagcactttgtcagcgagcgtaaatatgacgaggagctcgggaaagctgcccggttttcctgtgacatcgaacagctgaaggcccaaatcatgctctgcggagaaattacacatccaaagaacaactattcctcaagaactccctgcagctccctgctgcctctgctgaatgcgcacgcagcaacctctgggaaacagagtaacttttcccgaaaatcatccactcacaataagccctctgaaggcaaagcggcaaaccccaaaatggtgagcagtctccccagcaccgccgacccctctcaccagaccatgccggccaacaagcagagcggccctgagcagctgagcctgcaagccacgcaagcatctgtttcttcttttgccaagtacaggaggatgtttgctctctctgtagagagctttctgaggtctctgggtgtacccagagatttaatagaaattcttaacgttaagtcacattccaggaaggaaggaagagttgttcgttcaaataagaaagataaatgttcggcactgtag

SEQ ID NO: 19100 - DNA, 899 bp, Homo sapiens
  SIMILAR (168)..(413): 1001254mologous to Homo sapiens hypothetical protein,accession number AL110124,Smith-Waterman Score=417.
  misc_feature (1)...(899): n = a,t,c or g
cccacgcgtccgcttactggtcacagtaaaagcaagttgataaaggtggccagtgggggaacagagcttatgtgcctcctgagaaagccagtcgctggaaactggactgagagccctgatttggagcacgaggaaaccttaaaaaggcctattccactagaagcaagatggctgaactcaatactcatgtgaatgtcaaggaaaagatctatgcagttagatcagttgttcccaacaaaagcaataatgaaatagtcctggtgctccaacagtttgattttaatgtggataaagccgtgcaagcctttgtggatggcagtgcaattcaagttctaaaagaatggaatatgacaggaaaaaagaagaacaataaaagaaaaagaagcaagtccaagcagcatcaaggcaacaaagcatgctaaagacaaggtggagaggcctgatgtcatgtcccctgcagccgcagccaccacagattcaaaacggccccatgaatggctgcgagaaggacagctcgtccacagattctgctaacgaaaaaccagcccttatccctcgtgagaaaaagatctcgatacttgaggaaccttcaaaggcacttcgtggggtcacaggcccaaatattgagaaatcggcgaaggatttgcaacgctgcaccgtttctctaactagatatcgcgtcatgattaaggaagaagtggatagttccgtgaagaagatcacagctgcctttgctgaattacacaactgcatcattgacaaagaagcttcattaatggcagaaatggataaaggtatagaagaagccatggaaatcctgactgctcgtcagatggaaagcagaagnactaaagagactcactgaccttggccagttcagatggcagagatgcagctgg

SEQ ID NO: 19101 - DNA, 2715 bp, Homo sapiens
  SIMILAR (367)..(627): 951254mologous to Homo sapiens Human secreted protein, SEQ ID NO: 5522,accession number G01441,Smith-Waterman Score=418.
  misc_feature (1)...(2715): n = a,t,c or g
gggtcgacgatttcgtcggattgtgacaaaatctttcattaacaaggggagtttcggtgaagtggaggtttggggaaaggcgaggaagtcggtctggagcaagcaagcaaagtgcggaagctgtactgggattcttctagaaagtggggtgagaaaggagctagggagggcgtgtggagggaccagatctgtgtcagaacgtgcgtgtgagcggatacaaaacccgagagaggcgtgagcagcgctgtgtttgcgagcgggagcgaggggcgccggctggggtgtgtgctcctgagctcttcagaaacgaggctgctttcaggaacattgctgtggattcccagggcctattccactagaagcaagatggctgaactcaatactcatgtgaatgtcaaggaaaagatctatgcagctagatcagttgttcccaacaaaagcaataatgaaatagtcctggtgctccaacagtttgattttaatgtggataaagccgtgcaagcctttgtggatggtagtgcaattcaagttctaaaagaatggaatatgacaggaaataagaagaactataagagaataagaagcaagtccaagcagcatcaaggcaacaaagatgctaaagacaaggtggagaggcctgaggcagggcccctgcagccgcagccaccacagattcaaaacggccccatgaatggctgcgagaaggacagctcgtccacagattctgctaacggaaaaaccagcccttatccctcgtgagaaaaagatctcgatacttgaggaaccttcaaaggcacttcgtggaggtcacagaaggcaacagactactgcaacagaaactatccttaggtggggaaccccaaacctatacatggaacaacagagaggtcagatggcctacagtggtcagctgagcagccttgtaacccaagcaagcctaaggcaaaaacatctcctgttaagtccaatacccctgcagctcatcttgaaataaagccagatgagttgggcaaagaaaagaggcccaaatattgagaaatcaagtggaaggatttgcaacggctggcaccgttttcttctaactagaatatcgcgtcatgaattaaagggaaagaaagtgggatagttccggtgaaagaagatcaaagctgccctttgctgaaattacacaactgcatcattgaacaaaaggaagttttcattaatgggcaggaaatgggattaaagtttaaaggaaggaaggccatgggaaatcctggactggctcgtcaggaagaaaagcaagaagaaactaaagagactcactgaccttggccagtcaagaatggcagagatgcagctgggcccgaaactcaggggcagaaattaagcactttgtcagcgaagcggtaaattatgacgagggagctcgggaaaagctgccccgggttttcctgtgacatcgaacaagctgaagggcccaaatcattgctctgcnggggaaaattacacatccaaaagaacaactatttcctcaaggaactcccttgcagctccctgctggcctctgctgaatgccgcacgcagcaaacctctggggaaaacagaggtaactttttcccgaaaatcatccactcacaataagccctctgaaggcaaagcggcgaaccccaaaatggtgagcagtctccccagcaccgccgacccctctcaccagaccaatgccggccaacaagcagaatggatcttctaaccaaagacggagatttaatccacaagtatcataactaacaggctaaattgggcctgccaagtcgcagggcagtgggaatgaagccgagccactggggaaagggcaacagccgccacggaacacaggaaggacagccgcacaanggttcggtttccggcccaaaaacaaagggcggtgccaaaaaattcaagaggcttccttggggattgaaggacccccgagggccccggcccatttcttgaaaaggccccgggcgaaaggcagtcacgctgcagacaccttcgggagggccagggccttttccggggttagtgttcggttaggggttcacagtgcaatctcttccccacgaagaatagaagtttccacagatgcagcagttctctcagttcccggctgtgaccgttgggtggcctgagctaggaggaaaaggagccagtttccactcagtttgggttcccctgcccggggtgctgaccccaattcgctgcccaaaagagtgtcaatcagaatataccaaatcccggtatgggttgtgtcatccctctcttaatccatttttacttaattcttaataatccagcccccagcctggcctccataattttccagggcctttgccttgatcctgttgatgcctttcctcctcatccaagactttggcagcattttagccccaggcagtatttacctcattattaggaaaatcaagaatgtgggtgaaaaacatcaaggggtcagttagccaacctgtgttgtagccagtgatgtccagtcccattgattggccttttagaagagttaatgttcccaaaaaggattctttataatccggccaaacatgatctgctgaggacacatgcgcttttgtagaatttaacatctggtgtttttctgaaaaaatatatatatacatatattgctttagtttgaaacaaattaaaatatgactgcatttgaaaaaaaaaaaaaaaaaaaaccta

SEQ ID NO: 19102 - DNA, 490 bp, Homo sapiens
  SIMILAR (117)..(167): 641254mologous to Homo sapiens Human secreted protein sequence encoded by gene 35 SEQ ID NO:156,accession number Y91435,Smith-Waterman Score=58.
  misc_feature (1)...(490): n = a,t,c or g
gggaacaantttgagacctgattacgtgtggnggaatccnnnnnnnnnnnnnnnnnnnnnnnnnnnnnnnnnnnnnnnnnnnnnnnnnnnnnaaaaagacctgctctttaaacaattgctttgctgagatgttgctaatttgtagctttgccccagccactttgccccagccactttgannnnnnnnnnnnnnnnnnnnnnnnnnnnnnnnnnnnnnnnnnnnnnnnnnnnnnnnnnnnnnnnnnnnnnnnnnnnnnnnnnnnnnnnnnnnnnnnnnnnnnnnnnnnnnnnnnnnnnnnnnnnnnnnnnnnnnnnnnnnnnnnnnnnnnnnnnnnnnnnnnnnnnnnnnnnnnnnnnnnnnnnnnnnnnnnnnnnnnnnnnnnnnnnnnnnnnnnnnnnnnnnnnnnnnnnnnnnnnnnnnnnnnnnnnnnnnnnnnnnnnnnnnnnnnnnnnnnnnnnnnnnnnnnnnnnnnnnnnnnnnnntgtggaa

SEQ ID NO: 19103 - DNA, 388 bp, Homo sapiens
  SIMILAR (307)..(387): 481254mologous to Homo sapiens Human secreted protein encoded by gene 43,accession number Y00300,Smith-Waterman Score=66.
  misc_feature (1)...(388): n = a,t,c or g
gcgccggggcaaagtgcctggggcaaagctacaaatgaacaacatctcagcaaagcaattgtttaaagtacaggtcttttcnnnnnnnnnnnnnnnnnnnnnnnnnnnnnnnnnnnnnnnnnnnnnnnnnnnnnnnnnnnnnnnnnnnnnnnnnnntccaagggcttgaacatttcttgacttgttagcaatccaaatcgttatgtctccgaaacagagttgactgaggggaccgcacggctgggcaggacctttgacttcgtatacatccacaggagaaagagaacctcagccccactctaccaacacgcacctagtaaaattccgccaactgaatctcacgcacgcaaacacgtggggagcgttgcttgcaccgcgagtccccatt

SEQ ID NO: 19104 - DNA, 1259 bp, Homo sapiens
  SIMILAR (1)..(531): 851254mologous to Homo sapiens putative p150,accession number U93574,Smith-Waterman Score=765.
  misc_feature (1)...(1259): n = a,t,c or g
atgattatctcaatagatacagaaaaggcccttgataaaattctacaccccttcattctaaaaactctcaataaactaggtattgatggaacgtatctcaaaataataagagctctttatgacaaacccacagccaacatcataatgaatgagcaaaagctggaagcattccctttgaaaagcaacacaaagcaaggatgcccttttttaccactcctattcaacatagtattggaagttctggccagggcaatcaagcaagagaaagaaataaagagtattcaaataggaagggaggaagtcaaattgtctctgtttgcagatgatatgattgtatatttagaaaaccccatcatctcagccccaaatctccttaagctgataagcaacttcagcaaagtctcaggatacaaaatcaatgtgcaaaaatcacaagcattcctatacaccagtaatagacaaacagagatccagatgatgagtgaacttccattcacaattgctacaaagggaataaaatacctaggaatactacccacttacaagggatgtgaaggacctcttcaaggagaactccaaacccctgctcaagaattagaaaaaactactttaaatttcatatggaaccaaaaaagagcccatatagccaagacaatgctaagcaaaaagaacaaagctggaggcgtcatgctacctgacttcaaactatactacaaggctgcagtaaccaaaacagcatggctgggggacgatcaggtctttctcatcccacgaggccatatttcagactatcacatggggaaaaaccttggacaatacccggctttccaggacagaggtccctgcggctttccacagtgcattgtgcccctggtttatcgagactagagaatggccacgacttttaccaagtatacggcttgtaaacatttggttaacaaggcacgtcctgcacagccctagatcccttaagccttgattttatacaacacaggtttttgtgagctccaagttgggtcaaagcggctggggcaaagtgcctggggcaaagctacaaatgaacaacatctcagcaaagcaattgtttaaagtacaggtcttttcnnnnnnnnnnnnnnnnnnnnnnnnnnnnnnnnnnnnnnnnnnnnnnnnnnnnnnnnnnnnnnnnnnnnnnnnnnntccaagggcttgaacatttcttgacttgttagcaatccaaatcgtatgtctcgaacgattcccccctgggagtgaatcaa

SEQ ID NO: 19105 - DNA, 1603 bp, Homo sapiens
  SIMILAR (893)..(1378): 611254mologous to Homo sapiens cytochrome c-like polypeptide,accession number S80864,Smith-Waterman Score=439.
gggcggcggagagggagcagccagttggtgtgtctcagaaaatcccactgagttccgaggcctcctagatgtggaatcctgctgagagttgttcccaggtcagagaatggagagagccctgtgcatgatgggatatccccgcctagatctttcagtgagtctctacctcagctactcttaggatcagggggagaaccatggaaaggcccggtgtcagacatccggaaagaagatgggatgaatgttttacctctgaagtacatcccaaatgtgggagttaacttcagctttgctggggtctatttggccagtgaaactctgcctgggttcattcgcacatccggaagccacttcacgggggggccgtcgcaaccggaaccacacacttggcatcggcgggttgagccaaattggggactcgtggtgcaagcaacgctcccccacgtgttagcgtgcgtgagattcggttggcggaattttactaggtgcgtgttggtagagtggggctgaggttttcttgctcctgtggatgtataggaagtcaaaggtcctgcccagccctgcggtcccctgagtcaactctgtttcggagacataacgatttggattgctaacaagtcaagaaatgttcaagtccttggatgtagggaaaagaaagagagatcagactgtcactgtgtctatgtcgaaagggaagacataagagactctattttgaaaaggacctgtactttaaacaattgctttgctgagatgttgttcatttgtagctttgccccagccactttgccccagccgctttgacccaacttggagcacacaaaaacctatgttgtataaaatcaaggtttaagggatctagggctgtgcaggaccgtgccttgttaaccaaatgtttacaagcagtatactttgtaaaagtcattgccattctctagtctcaataaaccagggacacaatgcaccgtggaaagccgcagggacctctgcccttgaaagcagggtattgtccaaagtttctccccatgcgatagtctgaaatatggcctcgtgggatgagaaagacctgactgtcccccagcctgacacccgtaaagcgtctgtgctgaggtgtattagtcaaagaggaaagcctcttgcagttgacatggaggaaggccaactgtctcctgcttgccccctgggaactgaaatgtcctcgggtgtaaaaccccgatcgtacatttgttcaactctgagctcgggagaaaagctgccctgtggagggaggcgagacatgttgggcagtaatgctgccttgttattctttactccgctgagatgtttgggtggagagaaacataaatctggcctacatgcacatccgggcatagtacctttcccttgaacttaattatgatatagattcttttgctcacgtgtttgtttttgttgttgctgttgaacttccccttattatcaccctgctcccctactgcattcctttgtgctgtaataatgaaaaataataatcaataaaaactgagggaactcaaaggccggtgccggtgcaggtccttggtgtgctgagtgcccggtcccctggacccactgttgtttccct

SEQ ID NO: 19106 - DNA, 522 bp, Homo sapiens
  SIMILAR (202)..(516): 631254mologous to Homo sapiens Obesity receptor C protein,accession number W34499,Smith-Waterman Score=320.
gtgtacccaacagctccgaagagatagcgaccatcgagaacgggcaatgatgacgatggcggttttgtcaaaaagaacagggggaaatgtgggaaaaagaaagagagatcagattgttactgtgtctgtgtagaaagaagttgacataggagacaccattttgttctgtactaagaaaaattcttctgccttgggatgctgttattctataaccttatccccaaccctgcgctctctgaaacatgtgctgtgtccactcagggttaaatggattaagggtggtgcaagatgtgctttgttaaacagatgctagaaggcagcatgctccttaagagtcatcaccattccctaatctcaagtacccagggacacaaacactgcggaaggccgcagggacctctacctaggaaaaccagagacctttgttcacctgtttatctgctgaccttctctccactatcatcctatgaccctgccacatccccctctttgagaaacacccaagaatgatcaataaatact

SEQ ID NO: 19107 - DNA, 1701 bp, Homo sapiens
  SIMILAR (534)..(794): 981254mologous to Homo sapiens envelope protein,accession number AF164615,Smith-Waterman Score=437.
gagatagggaaaaaccgccttagggctggaggtgggacctgcgggcagcaatactgctttgtaaagcattgagatgtttatgtgtatgcatatccaaaagcacagcacttaatcctttacattgtctatgatgccaagacctttgttcacgtgtttgtctgctgaccctctccccacaattgtcttgtgaccctgacacatccccctctttgagaaacacccacagatgatcaataaatactaagggaactcagaggctggcgggatcctccatatgctgaacgctggttccccgggtccccttctttctttctctatactttgtctctgtgtctttttcttttccaaatctctcgtcccaccttacgagaaacacccacaggtgtgtaggggcaacccacccctacatctggtgcccaacgtggaggcttttctctagggtgaaggtacgctcgagcgtggtcattgaggacaagtcgacgagagatcccgagtacatctacagtcagccttacgacatttgaagttctacaatgaacccatcagagatgcaaagaaaagcacctccgcggagacggagacatcgcaatcgagcaccgttgactcacaagatgaacaaaatggtgacgtcagaagaacagatgaagttgccatccaccaagaaggcagagccgccaacttgggcacaactaaagaagctgacgcagttagctacaaaatatctagagaacacaaaggtgaaacaaaccccagagagtatgctgcttgcagccttgatgattgtatcaatggtgtctgcaggtgtacccaacagctccgaagagacagcgaccatcgagaacgggccatgatgacgatggcggttttgtcgaaaagaaaagggggaaatgtggggaaaagcaagagagatcagattgttactgtgtctgtgtagaaagaagtagacataggagactccattttgttatgtactaagaaaaattcttctgccttgagattctgttaatctatgaccttacccccaaccccgtgctctctgaaacatgtgctgtgtccactcagagttgaatggattaagggcggtgcaggatgtgctttgttaaacagatgcttgaaggcagcatgctccttaagagtcatcaccactccctaatctcaagtacccagggacacaaaaactgcggaaggccgcagggacctctgcctaggaaagccaggtattgtccaacgtttctccccatgtgaaagtctgaaatatggcctcgtgggaagggaaagacctgaccgtcccccagcccgacacccgtaaagggtctgtgctgaggaggattagtaaaagaggaaggaatgcctcttgcagttgagacaagaggaaggcatctgtctcctgcctgtccctgggcaatggaatgtctcggtataaaacccgattgtatgctccatctactgagatagggaaaaaccgccttagggctggaggtgggacctgcgggcagcaatactgctttgtaaagcattgagatgtttatgtgtatgcatatccaaaagcacagcacttaatcctttacattgtctatgatgccaagacctttgttcacgtgtttgtctgctgaccctctccccacaattgtcttgtgaccctgacacatccccctctttgagaaacacccacagatgatcaataaatactaagggaactca

SEQ ID NO: 19108 - DNA, 1062 bp, Homo sapiens
  SIMILAR (133)..(1059): 951254mologous to Human endogenous retrovirus env,accession number X82272,Smith-Waterman Score=1517.
atgtctacgcgaacaccaaaattagtaagtcctgtttctgctcctgaacatccagaattatggaggcgggctgtggcctctctccacattagagtttggtttgttgatcaaactttagattcaagagattttgtagtaaatatagtaattaaaccagactcccagattataacatgtgaaaattgtagagtgcttacgcgcattgattcaacttttaattggcaacgccgtattctgttggtgagagaaagaaagggtgtgtggatccctgtgtccatggaccgaccgtgggaggcatcaccatccgtccatattttgattgaagtattaaaaggtgttttaaatagatccaaaagattcatttttactttaattgcagtgattatgggattaattgcagtcacagctacggctgctgtagcaggagttgcattgcactcttctgttcagtcagtaaactttgttaatgattggcaaaagaattctacaagattgtggaattcacaatctagtattgatcaaaaattggcaaatcaaattaatgatcttagacaaactgtcatttggatgggagacagactcatgagcttagaacatcgtttccagttacaatgtgactggaatacgtcagatttttgtattacaccccaaatttataatgagtctgagcatcactgggacatggttagacgccatctacagggaagagaagataatctcactttagacatttccaaattaaaagaacaaattttcgaagcatcaaaagcccatttaaatttggtgccaggaactgaggcaattgcaggagttgatgatggcctcgcaaatcttaaccctgtcacttgggttaagaccattggaagtactacgattataaatctcatattaatccttgtgtgcctgttttgtctgttgttagtctgcaggtgtacccaccagctcggaagagacagcgaccatcgagaacgggccatgatgacgatggcggttttgtcgaaaagaaaaggcggaaatgtgccgaaaagcaagagagatcacattgttcctgtgtctgtgtag

SEQ ID NO: 19109 - DNA, 1878 bp, Homo sapiens
  SIMILAR (295)..(1854): 951254mologous to Homo sapiens Gag-Pro-Pol-Env protein,accession number AF164611,Smith-Waterman Score=2554.
atgaacgacaaaaaccacatgattatctcaacagatgccgaaaagacctttgacaaaattcaacaacccttcatgctaaaaactctcaataaattagatattgttgggacgtatctcaaaataataagagctatcaatgacaaacccacagccagtatcatactgaatggggaaaaactggaagcattccctttgaaaactggcacaagacaaggatgccctctctcaccactcctattcaacatagtgttggaagtgttggccagggcaattaggcaggagaaggaaataaaggaaaaaccagtgtgggtaaatcagtggccgctaccaaaacaaaaactggaggctttacatttattagcaaatgaacagttagaaaagggtcatattgagccttcattctcaccttggaattctcctgtgtttgtaattcagaagaaatcaggcaaatggcgtatgttaactgacttaagggccgtaaatgccgtaaacgccgtaattcaacccatggggcctctccaacccgggttgccctctctggccatgatcccaaaagattggcctttaattataattgatctaaaggattgcttttttaccatccctctggcagagcaggattgtgaaaaatttgcctttactataccagccataaataataaagagccagccaccaggtttcagtggaaagtgttacctcagggaatgcttaatagtccaactatttgtcagacttttgtaggtcgagctcttcaaccagttagagaaaagttttcagactgttatatcattcattatattgatgatattttatgtgctgcagaaacgaaagataaattaattgactgttatacatttctgcaagcagaggttgccaacgcaggactggcaatagcatctgataagatccaaacctctactccttttcattatttagggatgcagatagaaaatagaaaaattaagccaccaaaaatagaaataagaaaagacacattaaaaacactaaatgattttcaaaaattgctgggagatattaattggattcggccaactctaggcattcctacttatgccatgtcaaatttgttctctatcttaagaggagactcagacttaaatagtaaaagaatgttaaccccagaggcaacaaaagaaattaaattagtggaagaaaaaattcagtcagcgcaaataaatagaatagatcccttagccacactccaacttttgatttttgccactgcacattctccaacaggcatcattattcaaaatactgatcttgtggagtggtcattccttcctcacagtacagttaagacttttacattgtacttggatcaaatggctacattaattggtcagacaagattacgaataataaaattatgtggaaatgacccagacaaaatagttgtccctttaaccaaggaacaagttagacaagcctttatcaattctggtgcatggcagattggtcttgctaattttgtgggaattattgataatcattacccaaaaacaaagatcttccagttcttaaaaatgactacttggattctacctaaaattaccagacgtgaacctttagaaaatgctctaacagtatttactgatggttccagcaatggaaaagcagcttacacagggccgaaagaacgagtaatcaaaactcaatatcaatcggctcaaagagcagaattggttgcagtcattacagtgttgcaagattttgaccaacctatcaatattatatcagattctgcatatgtagtacaagctacaagggatgttgagacagctctaattgatcaaaatggcaatcaaattaatgatcttagacaaactgtcattggatgggagacaggctcatga

SEQ ID NO: 19110 - DNA, 747 bp, Homo sapiens
  SIMILAR (604)..(732): 951254mologous to Human endogenous retrovirus K env protein,accession number Y17832,Smith-Waterman Score=208.
atgggaaaagttcgcttttacttccgcctctggggtccggagcggctaggaggagcggaagtggaaaagactaacttccggcctcgggtcgcgcgcagaggtgatgtcgttggtcctgcgccccctcgtggcggtacttcagcccttcgcagcccgacgctaggggcctggcagggggcagcaagagaccgcggatctcacaagagcttactcttacaaggacagcaccaagaatatgaggaatctgcccgcatgacccaaacacttccctccaggccccacctccaacactggggattacatctcaacactggatttggaggggacatccaaactatatcaaggctgtacaagaagcttggtgccagcatttgcttctacgcagagcctcaggctgcttctactcacagtaaaaggcaaaagggcatgcaaagatcatgtggcaagagaagaatgaggagcgcctctgcccagccgcccatcgtctgggatgtgaggagcgcctctgcccagccgcccatcgtctgggatgtgaggagcgcctctgcctggctgccccatctgggaagtgagaagcgcctctgcccggccatctcatctgggaggtgtacccaacagctccgaagagacagcgaccatcgagaacgggccatgatgacgatggcgcttttgtcgaaaagaaaagggggaaatgtggggaaaagaaagagagatcagattgttactgtgtctggtagaaagaagtag

SEQ ID NO: 19111 - DNA, 786 bp, Homo sapiens
  SIMILAR (376)..(783): 971254mologous to Homo sapiens Gag protein,accession number AF164610,Smith-Waterman Score=725.
atgattccaccagcatccataggcagccagttgcctcaatatcatttggagacaccttttgacccactggctgcagatcataaatgttatctttgtccagaaccaccatattctttcaagaaccagagccttaaatccaaatatgcctctggttgcagagagaaacacactaactattcaagtgactcactgggagtgatggcttgcttacattctctcgctcccgcagcttccactatagcagtgtttcttcaccctggcagcagcagttcctccctgcggttgcaactaaatccaggttgcagtttttccaacatttactataccagccttaccagcctcatcaccactcacaccagcaccctcttctccaagccgccggctgaacttcagtatcggccacccccagaaagtcagtatggatatccaagaatgcccccagcaccacagggcagggcgccataccctcagccgcccactaggagacttaatcctacggcaccacctagtagacaaggtagtgaattacatgaaattattgataaatcaagaaaggaaggagatactgaggcatggcaattcccagtaatgttagaaccgatgccacctggagaaggagcccaagagggagagcctctcacagttgaggccagatacaagtctttttcgataaaaatgctaaaagatatgaaagaaggagtaaaacagtatggacccaactccccttatatgaggacattattagattccattgctcatggacatagactcattccttatgattag

SEQ ID NO: 19112 - DNA, 6011 bp, Homo sapiens
  SIMILAR (2324)..(4471): 961254mologous to Human endogenous retrovirus K pol protein,accession number Y10391,Smith-Waterman Score=3594.
ggtgaaggtacgctcgagcgtggtcattgaggacaagtcgacgagagatcccgagtacatctacagtcagccttacgaacaaggaacttcagatctaaaagattggaaaagaattggtaaggaactaaaacaagcaggtaggaagggtaatatcattccacttacagtatggaatgattgggccattattaaagcagctttagaaccatttcaaacagaagaagatagcatttcagtttctgatgcccctggaagctgtttaatagattgtaatgaaaacacaaggaaaaaatcccagaaagaaaccgaaagtttacattgcgaatatgtagcagagccggtaatggctcagtcaacgcaaaatgttgactataatcaattacaggaggtgatatatcctgaaacgttaaaattagaaggaaaaggtccagaattaatggggccatcagagtctaaaccacgaggcacaagtcctcttccagcaggtcaggtgctcgtaagattacaacctcaaaagcaggttaaagaaaataagacccaaccgcaagtagcctatcaatactggccgctggctgaacttcagtatcggccacccccagaaagtcagtatggatatccaggaatgcccccagcaccacagggcagggcgccataccatcagccgcccactaggagacttaatcctatggcaccacctagtagacagggtagtgaattacatgaaattattgataaatcaagaaaggaaggagatactgaggcatggcaattcccagtaacgttagaaccgatgccacctggagaaggagcccaagagggagagcctcccacagttgaggccagatacaagtctttttcgataaaaatgctaaaagatatgaaagagggagtaaaacagtatggacccaactccccttatatgaggacattattagattccattgcttatggacatagactcattccttatgattgggagattctggcaaaatcgtctctctcaccctctcaatttttacaatttaagacttggtggattgatggggtacaagaacaggtccgaagaaatagggctgccaatcctccagttaacatagatgcagatcaactattaggaataggtcaaaattggagtactattagtcaacaagcattaatgcaaaatgaggccattgagcaagttagagctatctgccttagagcctgggaaaaaatccaagacccaggaagtacctgcccctcatttaatacagtaagacaaggttcaaaagagccctaccctgattttgtggcaaggctccaagatgttgctcaaaagtcaattgccgatgaaaaagccggtaaggtcatagtggagttgatggcatatgaaaacgccaatcctgagtgtcaatcagccattaagccattaaaaggaaaggttcctgcaggatcagatgtaatctcagaatatgtaaaagcctgtgatggaatcggaggagctatgcataaagctatgcttatggctcaagcaataacaggagttgttttaggaggacaagttagaacatttggaggaaaatgttataattgtggtcaaattggtcacttaaaaaagaattgcccagtcttaaacaaacagaatataactattcaagcaactacaacagggttttcagggacaacaacccccactgtcccaagtgtttcagggaataagccagttaccacaatacaacaattgtccctcaccacaagcggcagtgcagcagtagatttatgtactatacaagcagtctctctgcttccaggggagcccccacaaaaaatccctacaggggtatatggcccactgcctgaggggactgtaggactaatcttgggaagatcaagtctaaatctaaaaggagttcaaattcatactagtgtggttgattcagactataaaggcgaaattcaattggttattagctcttcaattccttggagtgccagtccaagagacaggattgctcaattattactcctgccatatattaagggtggaaatagtgaaataaaaagaataggagggcttgtaagcactgatccaacaggaaaggctgcatattgggcaagtcaggtctcagagaacagacctgtgtgtaaggccattattcaaggaaaacagtttgaagggttggtagacactggagcagatgtctctattattgctttaaatcagtggccaaaaaactggcttaaacaaaaggctgttacaggacttgtcggcataggcacagcctcagaagtgtatcaaagtatggagattttacattgcttagggccagataatcaagaaagtactgttcagccaatgattacttcaattcctcttaatctgtggggtcgagatttattacaacaatgggaaaaaccggtgtgggtaaatcagtggccgctaccaaaacaaaaactggaggctttacatttattagcaaatgaacagttagaaaagggtcacattgagccttcgttctcaccttggaattctcctgtgtttgtaattcagaagaaatcaggcaaatggcatacgttaactgacttaagggctgtaaacgccgtaattcaacccatggggcctctccaacccgggttgccctctccggccatgatcccaaaagattggcctttaattataattgatctaaaggattgcttttttaccatccctctggcagagcaggattgtgaaaaatttgcctttactataccagccataaataataaagaaccagccaccaggtttcagtggaaagtgttacctcagggaatgcttaatagtccaactatttgtcagacttttgtaggtcgagctcttcaaccagtgagagaaaagttttcagactgttatattattcattatattgatgatattttatgtgctgcagaaacgaaagataaattaattgactgttatacatttctgcaagcagaggttgccaatgctggactggcaatagcatctgataagatccaaacctctactccttttcattatttagggatgcagatagaaaatagaaaaattaagccacaaaaaatagaaataagaaaagacacattaaaaacactaaatgattttcaaaaattactaggagatattaattggattcggccaactctaggcattcctacttatgccatgtcaaatttgttctctatcttaagaggagactcagacttaaatagtcaaagaatattaaccccagaggcaacaaaagaaattaaattagtggaagaaaaaattcagtcagcgcaaataaatagaatagatcccttagccccactccaacttttgatttttgccactgcacattctccaacaggcatcattattcaaaatactgatcttgtggagtggtcattccttcctcacagtacagttaagacttttacattgtacttggatcaaatagctacattaatcggtcagacaagattacgaataacaaaattatgtggaaatgacccagacaaaatagttgtccctttaaccaaggaacaagttagacaagcctttatcaattctggtgcatggcagattggtcttgctaattttgtgggacttattgataatcattacccaaaaacaaagatcttccagttcttaaaattgactacttggattctacctaaaattaccagacgtgaacctttagaaaatgctctaacagtatttactgatggttccagcaatggaaaagcagcttacacagggccgaaagaacgagtaatcaaaactccatatcaatcggctcaaagagcagagttggttgcagtcattacagtgttacaagattttgaccaacctatcaatattatatcagattctgcatatgtagtacaggctacaagggatgttgagacagctctaattaaatatagcatggatgatcagttaaaccagctattcaatttattacaacaaactgtaagaaaaagaaatttcccattttatattacttatattcgagcacacactaatttaccagggcctttgactaaagcaaatgaacaagctgacttactggtatcatctgcactcataaaagcacaagaacttcatgctttgactcatgtaaatgcagcaggattaaaaaacaaatttgatgtcacatggaaacaggcaaaagatattgtacaacattgcacccagtgtcaagtcttacacctgcccactcaagaggcaggagttaatcccagaggtctgtgtcctaatgcattatggcaaatggatgtcacgcatgtaccttcatttggaagattatcatatgttcatgtaacagttgatacttattcacatttcatatgggcaacttgccaaacaggagaaagtacttcccatgttaaaaaacatttattgtcttgttttgctgtaatgggagttccagaaaaaatcaaaactgacaatggggcagggatactgtagtaaagctttccaaaaattcttaagtcagtggaaaatttcacatacaacaggaattccttataattcccaaggacaggccatagttgaaagaactaatagaacactcaaaactcaattagttaaacaaaaagaagggggagacagtaaggagtgtaccactcctcagatgcaacttaatctagcactctatactttaaattttttaaacatttatagaaatcagactactacttctgcagaacaacatcttactggtaaaaagaacagcccacatgaaggaaaactaatttggtggaaagataataaaaataagacatgggaaatagggaaggtgataacgtgggggagaggttttgcttgtgtttcaccaggagaaaatcagcttcctgtttggttacccactagacatttgaagttctacaatgaacccatcggagatgcaaagaaaagggcctccacggagatggtaacaccagtcacatggatggataatcctatagaagtatatgttaatgatagtatatgggtacctggccccatagatgatcgctgccctgccaaacctgaggaagaagggatgatgataaatatttccattgggtatcgttatcctcctatttgcctagggagagcaccaggatgtttaatgcctgcagtccaaaattggttggtagaagtacctactgtcagtcccatcagtagattcacttatcacatggtaagcgggatgtcactcaggccacgggtaaattatttacaagacttttcttatcaaagatcattaaaatttagacctaaagggaaaccttgccccaaggaaattcccaaagaatcaaaaaatacagaagttttagtttgggaagaatgtgtggccaatatgattatgggattaattgcagtcacagctacggctgctgtagcaggagttgcattgcactcttctgttcagtcagtaaactttgttaatgattggcaaaagaattctacaagattgtggaattcacaatctagtattgatcaaaaattggcaaatcaaattaatgatcttagacaaactgtcatttggatgggagacagactcatgagcttagaacatcgtttccagttacaatgtgactggaatacgtcagatttttgtattacaccccaaatttataatgagtctgagcatcactgggacatggttagacgccatctacagggaagagaagataatctcactttagacatttccaaattaaaagaacaaattttcgaagcatcaaaagcccatttaaatttggtgccaggaactgaggcaattgcaggagttgctgatggcctcgcaaatcttaaccctgtcacttgggttaagaccattggaagtactacgattataaatctcatattaatccttgtgtgcctgttttgtctgttgttagtctgcaggtgtacccaacagctccgaagagacagcgaccatcgagaacgggccatgatgacgatggcggttttgtcgaaaagaaaagggggaaatgtggggaaaagcaagagagatcaaattgttactgtgtctgtgtag

SEQ ID NO: 19113 - DNA, 3455 bp, Homo sapiens
  SIMILAR (1742)..(2761): 991254mologous to Homo sapiens Gag-Pro-Pol protein,accession number AF164609,Smith-Waterman Score=1831.
atgggagttccagaaaaaatcaaaactgacaatggaccaggatattgtagtaaagctttccaaaaattcttaagtcagtggaaaatttcacatacaacaggaattccttataattcccaaggacaggccatagttgaaagaactaatagaacactcaaaactcaattagttaaacaaaaagaagggggagacagtaaggagtgtaccactcctcagatgcaacttaatctagcactctatactttaaattttttaaacatttatagaaatcagactactacttctgcagaacaacatcttactggtaaaaagaacagcccacatgaaggaaaactaatttggtggaaagataataaaaataagacatgggaaatagggaaggtgataacgtgggggagaggttttgcttgtgtttcaccaggagaaaatcagcttcctgtttggatacccactagacatttgaagttctacaatgaacccatcagagatgcaaagaaaagcacctccgcggagacggagacaccgcaatcgagcaccgttgactcacaagatgaacaaaatggtgacgtcagaagaacagatgaagttgccatccaccaagaaggcagagccgccaacttgggcacaactaaagaagctgacgcagttagctacaaaatatctagagaacacaaaggagcagctgcagctaactatacctactgggcctatgtgcctttcccgcccttaattcgggcagtcacatggatggataatcctatagaagtatatgttaatgatagtgtatgggtacctggccccatagatgatcgctgccctgccaaacctgaggaagaagggatgatgataaatatttccattgggtatcgttatcctcctatttgcttagggacagcaccaggatgtttaatgcctgcagtccaaaactggttggtagaagtacctattgtcagtcccatcagtagattcacttatcacatggtaagcgggatgtcactcaggccacgggtaaattatttacaagacttttcttatcaaagatcattaaaatttagacctaaagggaaaccttgccccaaggaaattcccaaagaatcaaaaaatacagaagttttagtttgggaagaatgtgtggccaatagtgcggtgatattacaaaacaatgaatttggaactattatagattgggcacctcgaggtcaattctaccacaattgctcaggacaaactcagtcgtgtccaagtgcacaagtgagtccagctgttgatagcgacttaacagaaagtttagacaaacataagcataaaaaattgcagtctttctacccttgggaatggggagaaaaaggaatctctaccccaagaccaaaaatagtgtacccaacagctctgaagagacagcaaccatcgagaacgggccatgatgacgatggcggttttgtcaaaaagaaaagggggaaatgtggggaaaagcaagagagatcagattgtcactgtgtctgtgtagaaagaatacccagggacacaaaaactgcggaaggccgcagggacctctgcctaggaaagccaggtattgtccaaggtttctccccatgtgatagtctgaaatatggcctcgtgggaagggaaagacctgaccgtcccccagcccgacacccgtaaaggggtgaaggtacgctcgagcgtggtcattgaggacaagtcgacgagagatcccgagtacgtctacagtcagccttacgaacaaggaactttagatctaaaagattggaaaagaattggtaaggaactaaaacaagcaggtaggaagggtaatatcattccacttacagtatggaatgattgggccattattaaagcagctttagaaccatttcaaacagaagaagatagcgtttcagtttctgatgcccctggaagctgtttaatagattgtaatgaaaagacaaggaaaaaatcccagaaagaaacggaaagtttacattgcgaatatgtagcagagccggtaatggctcagtcaacgcaaaatgttgactataatcaattacaggaggtgatatatcctgaaacgttaaaattagaaggaaaaggtccagaattagtggggccatcagagtctaaaccacgagggacaagtcctcttccagcaggtcaggtgcccgtaacattacaacctcaaaagcaggttaaagaaaataagacccaaccgccagtagcctatcaatactggcctccggctgaacttcagtatcggccacccccagaaagtcagtatggatatccaggaatgcccccagcaccacagggcagggcgccataccctcagccgcccactaggagacttaatcctacggcaccacctagtagacagggtagtgaattacatgaaattattgataaatcaagaaaggaaggagatactgaggcatggcaattcccagtaacgttagaaccgatgccacctggagaaggagcccaagagggagagcctcccacagttgaggccagatacaagtctttttcgataaaaatgctaaaagatatgaaagagggagtaaaacagtatggacccaactccccttatatgaggacattattagattccattgcttatggacatagactcattccttatgattgggagattctggcaaaatcgtctctctcaccctctcaatttttacaatttaagacttggtggattgatggggtacaagaacaggtccgaagaaatagggctgccaatcctccagttaacataggatgcagatcaactattaggaataggtcaaaattggagtactattagtcaacaagcattaatgcaaaatgaggccattgagcaagttagagctatctgccttagagcctgggaaaaaatccaagacccaggaagtgcctgcccctcatttaatacagtaagacaaggttcaaaagagccctatcctgattttgtggcaaggctccaagatgttgctcaaaagtcaattgccgatgaaaaagcccgtaaggtcatagtggagttgatggcatatgaaaacgccaatcctgagtgtcaatcagccattaagccattaaaaggaaaggttcctgcaggatcagatgtaatctcagaatatgtaaaagcctgtgatggaatcggaggagctatgcataaagctatgcttatggctcaagcaataacaggagttgttttaggaggacaagttagaacatttggaggaaaatgttataattgtggtcaaattggtcacttaaaaaagaattgcccagtcttaaacaaacagaatataactattcaagcaactacaacagtctgcaggtgtacccaacagctccgaagagacagcgaccatcgagaacgggccatgatgacgatggcggttttgtcgaaaagaaaagggggaaatgtggggaaaagcaagagagatcagattgttactgtgtctgtgtag

SEQ ID NO: 19114 - DNA, 4835 bp, Homo sapiens
  SIMILAR (1942)..(3900): 991254mologous to Homo sapiens Gag-Pro-Pol protein,accession number AF164614,Smith-Waterman Score=3397.
atggccaactttcaggagcacctgagctgctcctcttctccacacttacccttcagtgaaagcaaaaccttcaatggactacaagatgagctcacagctatggggaaccacccttctcccaagctgctcgaggaccagcaggaaaaggggatggtacgaacagagctaatcgagagcgtgcacagccccgtcaccacaacagtgttgacgagcgtaagtgaggattccagggaccagtttgagaacagcgttcttcagctaagggaacacgatgaatcagagacggcggtgtctcaggggaacagcaacacggtggacggagagagcacaagcggaactgaagacataaagattcagttcagcaggtcaggcagtggcagtggtgggtttcttgaaggactatttggatgcttaaggcctgtatggaatatcattgggaaggcatattccactgattacaaattgcagcagcaagatacttgggaagtgccatttgaggagatctcagagctgcagtggctgggtagtggagcccaaggagcggtcttcttgggcaagttccgggcggaagaggtggccatcaagaaagtgagagaacagaatgagacggatatcaagcatttgaggaagttgaagcaccctaacatcatcgcattcaagggtgtttgtactcaggccccatgttattgtattatcatggaatactgtgcccatggacaactctacgaggtcttacgagctggcaggaagatcacacctcgattgctagtagactggtccacaggaattgcaagtggaatgaattatttgcacctccataaaattattcatcgtgatctcaaatcacctaatgttttagtgacccacacagatgcggtaaaaatttcagattttggtacatctaaggaactcagtgacaaaagtaccaagatgtcatttgctggcacggtcgcatggatggcgccagaggtgatacggaatgaacctgtctctgaaaaagttgatatatggtcttttggagtggtgctttgggagctgctgacaggagagatcccttacaaagatgtagattcttcagccattatctggggtgttggaagcaacagcctccaccttccagttccttccacttgccctgatggattcaaaatccttatgaaacagacgtggcagagtaaacctcgaaaccgaccttcttttcggcagacactcatgcatttagacattgcctctgcagatgtacttgccaccccacaagaaacttacttcaagtctcagaaaccagagctccctggagaaatggttgattccatggctggggcaggaaacgtgcaaagtgatcctggaaacccgtgtgccagaaagttatcaccatggtcaggcatcatcgttgaaccagtgtttccagacgcagaagaaacatgtccttcattcaccaggctgagctttcacagtgcagtggttggtacgggactaaatgtgaggctgatgctctacacaaggaaaaacctgacctgcgcacaaaccatcaactcctcagcttttgggaacttgaatgtgaccaagaaaaccaccttcattgtccatggattcaggccaacaggctcccctcctgtttggatggatgacttagtaaagggtttgctctctgttgaagacatgaacgtagttgttgttgattggaatcgaggagctacaactttaatatatacccatgcctctagtaagaccagaaaagtagccatggtcttgaaggaatttattgaccagatgttggcagaaggagcttctcttgatgacatttacatgatcggagtaagtctaggagcccacatatctgggtttgttggagagatgtacgatggatggctggggagaattacagatggctattttaaatctatggaaactgaaaaggtagaagtggatggaaaaaggggagagaagaaatcaggcaaatggcgtatgttaactgacttaagggccgtaaacgccgtaattcaacccatggggcctctccaacccgggttgccctctccggccatgatcccaaaagattggcctttaattataattgatctaaaggattgcttttttaccatccctctggcagagcaggattgtgaaaaatttgcctttactataccagccataaataataaagaaccagccaccaggtttcagtggaaagtgttacctcagggaatgcttaatagtccaactatttgtcagacttttgtaggtcgagctcttcaaccagttagagaaaagttttcagactgttatattattcattatattgatgatattttatgtgctgcagaaacgaaagataaattaattgactgttatacatttctgcaagcagaggttgccaatgctggactggcaatagcatctgataagatccaaacctctactccttttcattatttagggatgcagatagaaaatagaaaaattaagccacaaaaaatagaaataagaaaagacacattaaaaacactaaatgattttcaaaaattactaggagatattaattggattcggccaactctaggcattcctacttatgccatgtcaaatttgttctctatattaagaggagactcagacttaaatagtaaaagaatattaaccccagaggcaacaaaagaaattaaattagtggaagaaaaaattcagtcagcgcaaataaatagaatagatcccttagccccactccaacttttgatttttgccactgcacattctccaacaggcatcattattcaaaatactgatcttgtggagtggtcattccttcctcacagtacagttaagacttttacattgtacttggatcaaatagctacattaatcggtcagacaagattacgaataataaaattatgtggaaatgacccagacaaaatagttgtccctttaaccaaggaacaagttagacaagcctttatcaattctggtgcatggcagattggtcttgctaattttgtgggaattattgataatcattacccaaaaacaaagatcttccagttcttaaaaatgactacttggattctacctaaaattaccagacgtgaacctttagaaaatgctctaacagtatttactgatggttccagcaatggaaaagcagcttacacagggccgaaagaacgagtaatcaaaactccatatcaatctgctcaaagagcagagttggttgcagtcattacagtgttacaagattttgaccaacctatcaatattatatcagattctgcctatgtagtacaggctacaagggatgttgagacagctctaattaaatatagcatggatgatcagttaaaccagctattcaatttattacaacaaactgtaagaaaaagaaatttcccattttatattactcatattcgagcacacactaatttaccagggcctttgactaaagcaaatgaagaagctgacttactggtatcatctgcactcataaaagcacaagaacttcatgctttgactcatgtaaatgcagcaggattaaaaaacaaatttgatgtcacatggaaacaggcaaaagatattgtacaacattgcacccagtgtcaagtcttacacctgcccactcaagaggcaggagttaatcccagaggtctgtgtcctaatgcattatggcaaatggatgtcacgcatgtaccttcatttggaagattatcgtatgttcatgtaacagttgatacttattcacatttcatatgggcaacttgccaaacaggagaaagtacttcccatgttaaaaaacatttattgtcttgttttgctgtaatgggagttccagaaaaaatcaaaactgacaatggaccaggatattgtagtaaagctttccaaaaattcttaagtcagtggaaaatttacacatacaacaggaatcccttataattcccaaggacaggccataattgaaagaactaatagaacactcaaagctcaattggttaaacaaaaaagggaaaaagacagtaaggagtataacacttcccagatgcaacttaatctagcaccctatactttaaattttttaaacatttatagaaatcagaccactacttctgcagaacaacattttactggtaaaaagaacagcccacatgagggaaaactgatttggtggaaagaaaacaaaagtaaaacatgggaaacagggaaggtgataacatgggggagaggtttttcttgtgtttcaccaggagaaaatcagcttcctgtttggatacccactagacatttgaagttctacaatgaacccatcggagatgcaaaaaaaagcacctccacggagatggtaacaccagtcacatggatggataatcctatagaagtatatgttaatgatagtgtatgggtacctggccccacagatgatcgctgccctgccaaacctgaggaagaagggatgatgataaatatttccattgggtatcgttatcctcctatttgcctagggagagcaccaggatgtttaatgcccacagtccaaaattggttggtagaagtacctattgtcagtcccatctgtagattcacttatcacatggtgtacccaacagctccaaagagacagcgaccatcgagaacgggccatgatgatgatggtggttttgtcgaaaagaaaagggggaaatgtggggaaaagcaagagagatcagattgttactgtgtctgtgtagaaagaagtggagattcaccgaaaattgatgagctctcctccttcacacgtaactttaaggcgatcatgtcggggacaccacttgcagagcttatagtttacaatgaatgccacgaaatgg

SEQ ID NO: 19115 - DNA, 4534 bp, Homo sapiens
  SIMILAR (2147)..(4198): 951254mologous to Homo sapiens Gag-Pro-Pol-Env protein,accession number AF164611,Smith-Waterman Score=3517.
gctccaagatgttgctcaaaagtcaattgccgacgaaaaagcccataaggtcatagtggagttgatggcatatgaaaacgccaatcctgagtgtcaatcagccattaagccattaaaaggaaaggttcccacaggtctctcgttccaccttacgagaaacacccacaggtgtggaggggcaacccaccccttcatctggtgcccaacgtggaggcttttctctagggtgaaggtactctcaagcgtggtcattgaggacaagtcgacgagagatcccgagtacgtctacagtcagccttgcgaacaaggaactttagatctaaaagattggaaaagaattggcgaggaactaaaacaagcaggtagaaagggtaatatcattccacttacagtatggaatgattgggccattattaaagcagctttagaaccatttcaaacaaaagaagatagcgtttcagtttctgatgcccctggaagctgtgtaatagattgtaatgaaaagacagggagaaaatcccagaaagaaacagaaagtttacattgcgaatatgtaacagagccagtaatggctcagtcaacgcaaaatgttgactataatcaattacagggggtgatatatcctgaaacgttaaaattagaaggaaaaggtccagaattagtggggccatcagagtctaaaccacgagggccaagtcctcttccagcaggtcaggtgcccgtaacattacaacctcaaacgcaggttaaagaaaataagacccaaccgccagtagcttatcaatactggccgccggctgaacttcagtatctgccacccccagaaagtcagtatggatatccaggaatgcccccagcactacagggcagggcgccatatcctcagccgcccactgtgagacttaatcctacagcatcacgtagtggacaaggtggtacactgcacgcagtcattgatgaagccagaaaacagggagatcttgaggcatggcggttcctggtaattttacaactggtacaggccggggaagagactcaagtaggagcgcctgcccgagctgagactagatgtgaacctttcaccatgaaaatgttaaaagatataaaggaaggagttaaacaatatggatccaactccccttatataagaacattattagattccattgctcatggaaatagacttactccttatgactgggaaagtttggccaaatcttccctttcatcctctcagtatctacagtttaaaacctggtggattgatggagtacaagaacaggtacgaaaaaatcaggctactaagcccactgttaatatagacgcagaccaattgttaggaacaggtccaaattggagcaccattaaccaacaatcagtgatgcagaatgaggctattgaacaagtaagggctatttgcctcagggcctggggaaaaattcaggacccaggaacagctttccctattaattcaattagacaaggctctaaagagccatatcctgactttgtggcaagattacaagatgctgctcaaaagtctattacagatgacaatgcccgaaaagttattgtagaattaatggcctatgaaaatgcaaatccagaatgtcagtcggccataaagccattaaaaggaaaagttccagcaggagttgatgtaattacagaatatgtgaaggcttgtgatgggattggaggagctatgcataaggcaatgctaatggctcaagcaatgagggggctcactctaggaggacaagttagaacatttgggaaaaaatgttataattgtggtcaaatcggtcatctgaaaaggagttgcccagtcttaaataaacagaatataataaatcaagctattacagcaaaaaataaaaagccatctggcctgtgtccaaaatgtggaaaaggaaaacattgggccaatcaatgtcattctaaatttgataaagatgggcaaccattgtcgggaaacaggaagaggggccagcctcaggccccccaacaaactggggcattcccagttcaactgtttgttcctcagggttttcaaggacaacaacccctacagaaaataccaccacttcagggagtcagccaattacaacaatccaacagctgtcccgcgccacagcaggcagcgccacatacaattaagacttttacattgtacttggatcaaatggctacattaattggtcagggaagattacgaataataacattgtgtggaaatgacccagataaaatcactgttcctttcaacaagcaacaagttagacaagcctttatcagttctggtgcatggcagattggtcttgctaattttctgggaattattgataatcattacccaaaaacaaaaatcttccagttcttaaaattgactacttggattctacctaaaattaccagacgtgaacctttagaaaatgctctaacagtatttactgatggttccagcaatggaaaagcggcttacacagggccgaaagaacgagtaatcaaaactccgtatcaatcagctcaaagagcagagttggttgcagtcattacagtgttacaagattttgaccaacctatcaatattatatcagattctgcatatgtagtacaggctacaagggatgttgagacagctctaattaaatatagcacggacgatcatttaaaccagctattcaatttattacaacaaactgtaagaaaaagaaatttcccattttatattactcatattcgagcacacactaatttaccagggcctttgactaaagcaaatgaacaagctgacttactggtatcatctgcattcataaaagcacaagaacttcttgctttgactcatgtaaatgcagcaggattaaaaaacaaatttgatgtcacatggaaacaggcaaaagatattgtacaacattgcacccagtgtcaagtcttacacctgtccactcaagaggcaggagttaatcccagaggtctgtgtcctaatgcgttatggcaaatggatggcacgcatgttccttcatttggaagattatcatatgttcatgtaacagttgatacttattcacatttcatatgggcaacttgccaaacaggagaaagtacttcccatgttaaaaaacatttattatcttgttttgctgtaatgggagttccagaaaaaatcaaaactgacaatggaccaggatattgtagtaaagctttccaaaaattcttaagtcagtggaaaatttcacatacaacaggaattccttataattcccaaggacaggccatagttgaaagaactaatagaacactcaaaactcaattagttaaacaaaaagaagggggagacagtaaggagtgtaccactcctcagatgcaacttaatctagcactctatactttaaattttttaaacatttatagaaatcagactactacttctgcaaaacaacatcttactggtaaaaagcacagcccacatgaaggaaaactaatttggtggaaagataataaaaataagacatgggaaatagggaaggtgataacgtgggggagaggttttgcttgtgtttcaccaggagaaaatcagcttcctgtttggatacccactagacatttgaagttctacaatgaacccatcggagatgcaaagaaaagggcctccacagagatggtaaccccagtcacatggatggataatcctatagaagtatatgttaatgatagtgtatgggtacctggccccacagatgatcgctgccctgccaaacctgaggaagaagggatgatgataaatatttccattgtgtatcgttatcctcctatttgcctagggagagcaccaggatgtttaatgcctgcagtccaaaattggttggtagaagtacctactgtcagtcctaacagtagattcacttatcacatggtaagcgggatgtcactcaggccacgggtaaattatttacaagacttttcttatcaaagatcattaaaatttagacctaaagggaaaccttgccccaaggaaattcccaaagaatcaaaaaatacagaagttttagtttgggaagaatgtgtggccaatagtgcggtgatattacaaaacaatgaattcggaactattatagattgggcacctcgaggtcaattctaccacaattgctcaggacaaactcagtcgtgtccaagtgcacaagtgtacccaacagctccgaagagacagcgaccatcgagaacgggccatgatgacgatggcggttttgtcgaaaagaaaagggggaaatgtggggaaaagcaagagagatcagattgttactgtgtctgtgtagaaagaagtggatattttaaggccaaggaaatgtcaaatgacttgccttttgttctggtaaatcagagaaaatgggcctatcacttaatgttaatagcacttggaatgccgactctagagatccccggtcgcggcgagatcatgaaaccagaattaccgcctctccactggactgatacccgtacccccagccaaaacgacacaccgcagtag

SEQ ID NO: 19116 - DNA, 4782 bp, Homo sapiens
  SIMILAR (390)..(2975): 961254mologous to Homo sapiens polymerase,accession number AF074086,Smith-Waterman Score=4335.
gcgaaaaaatcatgaccaagatgggatatataccaggaaagggactagggaaaaatgaagatggcattaaagttccaggggaggctaaaataaatcaagaaagagaaggaatagggtatcctttttaggggcggccactgtagagcctcctaaacccataccactaacttggaaaacagaaaaaccggtgtgggtaaatcagtggccgctaccaaaacaaaaactggaggctttacatttattagcaaatgaacagttagaaaagggtcacattgagccttcgttctcaccttggaattctcctgtgtttgtaattcagaagaaatcaggcaaatggcgtatgttaactgacttaagggccgtaaatgccgtaaacgccgtaattcaacccatggggccttctccaaccccgggttgcccttctccggcccatgatccccaaaaggatgggccctttaattataatggatctaagggattgcttttttacccatccctctggcgggagcaggattgcggaaaaatttgcctttactataccagccataaataataaagaaccagccaccaggtttcagtggaaagtgttacctcagggaatgcttaatagtccaactatttgtcagacttttgtaggtcgagctcttcaaccagttagagacaagttttcagactgttatattattcattatattgatgatattttatgtgctacagaaacgagagataaattaattgactgttatacatttctgcaagcagaggttgccaatgcaggactggcaatagcatctgataagatccaaacctctactccttttcattatttagggatgcagatagaaaatagaaaaattaagccaccaaaaatagaaataagaaaagacacattaaaaacactaaatgattttcaaaaattgctgggagatattaattggattcggccaactctaggcattcctacttatgccatgtcaaatttgttctctatcttaagaggagactcagacttaaatagtaaaagaatgttaaccccagaggcaacaaaagaaattaaattagtggaagaaaaaattcagtcagcgcaaataaatagaatagatcccttagccacactccaacttttgatttttgccactgcacattctccaacaggcatcattattcaaaatactgatcttgtggagtggtcattccttcctcacagtacagttaagacttttacattgtacttggatcaaatggctacattaattggtcagacaagattacgaataataaaattatgtggaaatgacccagacaaaatagttgtccctttaaccaaggaacaagttagacaagcctttatcaattctggtgcatggcagattggtcttgctaattttgtgggaattattgataatcattacccaaaaacaaagatcttccagttcttaaaaatgactacttggattctacctaaaattaccagacgtgaacctttagaaaatgctctaacagtatttactgatggttccagcaatggaaaagcagcttacacagggccgaaagaacgagtaatcaaaactcaatatcaatcggctcaaagagcagaattggttgcagtcattacagtgttgcaagattttgaccaacctatcaatattatatcagattctgcatatgtagtacaagctacaagggatgttgagacagctctaattaaatatagcatggatgatcagttaaaccagctattcaatttattacaacaaactgtaagaaaaagaaatttcccattttatattacacatattcgagcacacactaatttaccagggcctttgactaaagcaaatgaacaagctgacttactggtatcatctgcactcataaaagcacaagaacttcatgctttgactcatgtaaatgcagcaggattaaaaaacaaatttgatgtcacatggaaacaggcaaaagatattgtacaacattgcacccagtgtcaagtcttacacctgcccactcaagaggcaggagttaatcccagaggtctgtgtcctaatgcattatggcaaatggatgtcacgcatgtaccttcatttggaagattatcatatgttcacgtaacagttgatacttattcacatttcatatgggcaacttgccaaacaggagaaagtacttcccatgttaaaaaacatttattgtcttgttttgctgtaatgggagttccagaaaaaatcaaaactgacaatggaccaggatattgtagtaaagctttccaaaaattcttaagtcagtggaaaatttcacatacaacaggaattccttataattcccaaggacaggccatagttgaaagaactaatagaacactcaaaactcaattagttaaacaaaaagaagggggagacagtaaggagtgtaccactcctcagatgcaacttaatctagcactctatactttaaattttttaaacatttatagaaatcagactactacttctgcagaacaacatcttactggtaaaaagaacagcccacatgaaggaaaactaatttggtggaaagataataaaaataagacatgggaaatagggaaggtgataacgtgggggagaggttttgcttgtgtttcaccaggagaaaatcagcttcctgtttggatacccactagacatttgaagttctacaatgaacccatcagagatgcaaagaaaagcacctccgcggagacggagacatcgcaatcgagcaccgttgactcacaagatgaacaaaatggtgacgtcagaagaacagatgaagttgccatccaccaagaaggcagagccgccaacttgggcacaactaaagaagctgacgcagttagctacaaaatatctagagaacacaaaggtgacacaaaccccagagagtatgctgcttgcagccttgatgattgtatcaatggtggtaagtctccctatgcctgcaggagcagctgcagctaactataccaactgggcctatgtgcctttcccgcccttaattcgggcagtcacatggatggataatcctatagaagtatatgttaatgatagtgtatgggtacctggccccatagatgatcgctgccctgccaaacctgaggaagaagggatgatgataaatatttccattgggtatcgttatcctcctatttgcctagggagagcaccaggatgtttaatgcctgcagtccaaaattggttggtagaagtacctactgtcagtcccatcagtagattcacttatcacatggtaagcgggatgtcactcaggccacgggtaaattatttacaagacttttcttatcaaagatcatttaaatttagacctaaagggaaaccttgccccaaggaaattcccaaagaatcaaaaaatacagaagttttagtttgggaagaatgtgtggccaatagtgcggtgatattacaaaacaatgaatttggaactattatagattgggcacctcgaggtcaattctaccacaattgctcaggacaaactcagtcgtgtccaagtgcacaagtgagtccagctgttgatagcgacttaacagaaagtttagacaaacataagcataaaaaattgcagtctttctacccttgggaatggggagaaaaaggaatctctaccccaagaccaaaaataataagtcctgtttctggtcctgaacatccagaattatggaggcttactgtggcctcacaccacattagaatttggtctggaaatcaaactttagaaacaagagatcgtaagccattttatactgtcgacctaaattccagtctaacagttcctttacaaagttgcataaagcccccttatatgctagttgtaggaaatatagttattaaaccagactcccagactataacctgtgaaaattgtagattgcttacttgcattgattcaacttttaattggcaacaccgtattctgctggtgagagcaagagagggcgtgtggatccctgtgtccatggaccgaccgtgggaggcctcaccatccgtccatagttttgactgaagtattaaaaggtgttttaaatagatccaaaagattcatttttactttaattgcagtgattatgggattaattgcagtcacagctacgggtgctgtagcaggagttgcattgcactcttctgttcagtcagtaaactttgttaatgattggcaaaaaaattctacaagattgtggaattcacaatctagtattgatcaaaaattggcaaatcaaattaatgatcttagacaaactgtcatttggatggtgagaccagactcatgagcttagaacatcgtttccagttacaatgtgactggaatacgtcagatttttgtattacaccccaaatttataatgagtctgagcatcactgggacatggttagacgccatctacagggaagagaagataatctcactttagacatttccaaattaaaagaacaaattttcgaagcatcaaaagcccatttaaatttggtgccaggaactgaggcaattgcaggagttgctgatggcctcgcaaatcttaaccctgtcacttgggttaagaccattggaagtactacgattataaatctcatattaatccttgtgtgcctgttttgtctgttgttagtctgcaggtgtacccaacagctccgaagagacagcgaccatcgagaacgggccatgatgacgatggcggttttgtcgaaaagaaaagggggaaatgtggggaaaagcaagagagatcagattgttactgtgtctgtgtag

SEQ ID NO: 19117 - DNA, 2194 bp, Homo sapiens
  SIMILAR (197)..(2191): 941254mologous to Homo sapiens Gag-Pro-Pol protein,accession number AF164613,Smith-Waterman Score=3385.
ttcaatcaagaaaagacctttgatcaggagaagacttctcgtctcatttctggggacacattcaggatttctccaaagcaggtgaaggtacgctcgagcgtggtcattgaggacaagtcgacgagagatcccgagtacatctacagttagccttacggtaagcttgtgcgctcggaagaagctagggtgataatggggcaaactaaaagtaaaattaaaagtaaatatgcctcttatctcagctttattaaaattcttttaaaaagagggggagttaaagtatctacaaaaaaatctaatcaagctatttcaaataatagaacaattttgcccatggtttccagaacaaggaactttagatctaaaagactggaaaagaattggtaaggaactaaaacaagcaggtaggaagggtaatatcattccacttatagtatggaatgattgggccattattaaagcagctttagaaccatttcacacagaagaagatagcgtttcagttcctgacgaccctagaagctgtatagtagattgtaatgataagacaaggaaaaaatcccagaaagaaaccgaaagtttacattgcgaatatgtagcagagccggtaatggctcagtcaacgcaaaatgttgactataatcaattacaggaggtgatatatcctgaaacgttaaaattagaaggaaaaggtccagaattaatggggccatcagagtctaaaccacgaggcacaagtcctcttccagcaggtcaggtgctcgtaagattacaacctcaaaagcaggttaaagaaaataagacccaaccgcaagtagcctatcaatactggccgctggctgaacttcagtatcggccacccccagaaagtcagtatggatatccaggaatgcccccagcaccacagggcagggcgccataccatcagccgcccactaggagacttaatcctatggcaccacctagtagacagggtagtgaattacatgaaattattgataaatcaagaaaggaaggagatactgaggcatggcaattcccagtaacgttagaaccgatgccacctggagaaggagcccaagagggagagcctcccacagttgaggccagatacaagtctttttcgataaaaatgctaaaagatatgaaagagggagtaaaacagtatggacccaactccccttatatgaggacattattagattccattgcttatggacatagactcattccttatgattgggagattctggcaaaatcgtctctctcaccctctcaatttttacaatttaagacttggtggattgatggggtacaagaacaggtccgaagaaatagggctgccaatcctccagttaacatagatgcagatcaactattaggaataggtcaaaattggagtactattagtcaacaagcattaatgcaaaatgaggccattgagcaagttagagctatctgccttagagcctgggaaaaaatccaagacccaggaagtacctgcccctcatttaatacagtaagacaaggttcaaaagagccctaccctgattttgtggcaaggctccaagatgttgctcaaaagtcaattgccgatgaaaaagccggtaaggtcatagtggagttgatggcatatgaaaacgccaatcctgagtgtcaatcagccattaagccattaaaaggaaaggttcctgcaggatcagatgtaatctcagaatatgtaaaagcctgtgatggaatcggaggagctatgcataaagctatgcttatggctcaagcaataacaggagttgttttaggaggacaagttagaacatttggaggaaaatgttataattgtggtcaaattggtcacttaaaaaagaattgcccagtcttaaacaaacagaatataactattcaagcaactacaacaggtagagagccacctgacttatgtccaagatgtaaaaaaggaaaacattgggctagtcaatgtcgttctaaatttgataaaaatgggcaaccattgtcgggaaacgagcaaaggggccagcctcaggccccacaacaaactggggcattcccaattcagccatttgttcctcagggttttcagggacaacaacccccactgtcccaagtgtttcagggaataagccagttaccacaatacaacaattgtccctcaccacaagcggcagtgcagcagtag

SEQ ID NO: 19118 - DNA, 7391 bp, Homo sapiens
  SIMILAR (2417)..(5506): 981254mologous to Homo sapiens Gag-Pro-Pol-Env protein,accession number AF164611,Smith-Waterman Score=5417.
aacaaggaactttagatctaaaagattggaaaagaattggtaaggaactaaaacaagcaggtaggaagggtaatatcattccacttacagtatggaatgattgggccattattaaagcagctttagaaccatttcaaacagaagaagatagcatttcagtttctgatgcccctggaagctgtttaatagattgtaatgaaaagacaaggaaaaaatcccagaaagaaacggaaggtttacattgtgaatatgtagcagagccggtaatggctcagtcaacgcaaaatgttgactataatcaattacaggaggtgatatatcctgaaacgttaaaattagaaggaaaaggtcaggtgcccgtaagattacaacctcaaacgcaggttaaagaaaataagacccaaccgccagtagcttatcaatactggccgccggctgaacttcagtatcggccacccccagaaagtcagtatggatatccaggaatgcccccagcaccacagggcagggcgccataccctcagccacccactaggagacttaatcctacggcaccacctagtagacagggtagtgaattacatgaaattattgataaatcaagaaaggaaggagatactgaggcatggcaattcccagtaacgttagaaccgaagccacctggagaaggagcccaagagggagagcctcccacagttgaggccagatacaagtctttttcgataaaaatgctaaaagatatgaaagaaggagtaaaacagtatggacccaactccccttatatgaggacattattagattccattgctcatggacatagactcattccttatgattgggagattctggcaaaatcgtctctctcaccctctcaatttttacaatttaagacttggtggattgatggggtacaagaacaggtccgaagaaatagggctgccaatcctccagttaacatagatgcagatcaactattaggaataggtcaaaattggagtactattagtcaacaagcattaatgcaaaatgaggccattgagcaagttagagctatctgccttagagcctgggaaaaaatccaagacccaggaagtacctgcccctcatttaatacagtaagacaaggttcaaaagagccctatcctgattttgtggcaaggctccaagatgttgctcaaaagtcaattgccgatgaaaaagcccgtaaggtcatagtggagttgatggcatatgaaaacgccaatcctgagtgtcaatcagccattaagccattaaaaggaaaggttcctgcaggatcagatgtaatctcagaatatgtaaaagcctgtgatggaatcggaggagctatgcataaagctatgcttatggctcaagcaataacaggagttgttttaggaggacaagttagaacatttggaggaaaatgttataattgtggtcaaattggtcacttaaaaaagaattgcccagtcttaaacaaacagaatataactattcaagcaactacaacagggttttcagggacaacaacccccactgtcccaagtgtttcagggaataagccagttaccacaatacaacaattgtcccccgccacaagcggcagtgcagcagtagatttatgtactatacaagcagtctctctgcttccaggggagcccccacaaaaaatccccacaggggtatatggccccctgcctgaggggactgtaggactaatcttgggaagatcaagtctaaatctaaaaggagttcaaattcaaattaagtgtgtttgatccagactataaaggcgaaattcagttggttattagcttttcaattccttggagtgtcagtccaggaagacaggagtgctcaatatttactcctgccatatataaagggtggaaatagtgaactaaaaaaaataggagggcttggaagcactgatccaccaggaaaggctgtcatattgggcaaatcaagtctcagaggacagacctgtgtgtaaggccattattcaaggaaaacagtttgaagggttggtagacactggagcagatgtctctatcattgctaaagcaaatcactggccaaaaaattggcctaaacaaaaggctgttacaggacttgtcggcgtaggcacagcctcagaagtgtatcaaagtactgagattttacattgtttagggccagataatcaagaaagtactgttcagccaatgattacttcaattcctcttaatctgtggggtcgagatttattacaacaatggggtgcggaaatcaccatgcccgctccattatatagccccacgagtcaaaaaatcatgaccaagatgggatatataccaggaaagggactaggaataaaatgaagatggcattaaagttccagttgaggctaaaataaatcaagaaagagaaggaataggagcaggattgtgaaaaatttgcctttactataccagccataaataataaagaaccagccaccaggtttcagtggaaagtgttacctcagggaatgcttaatagtccaactatttgtcagacttttgtaggtcgagctcttcaaccagtgagagaaaagttttcagactgttatattattcattatattgatgatattttatgtgctgcagaaacgaaagataaattaattgactgttatacatttctgcaagcagaggttgccaatgctggactggcaatagcatccgataagatccaaacctctactccttttcattatttagggatgcagatagaaaatagaaaaattaagccacaaaaaatagaaataagaaaagacacattaaaaacactaaatgattttcaaaaattactaggagatattaattggattcggccaactctaggcattcctacttatgccatgtcaaatttgttctctatcttaagaggagactcagacttaaatagtcaaagaatattaaccccagaggcaacaaaagaaattaaattagtggaagaaaaaattcagtcagcgcaaataaatagaatagatcccttagccccactccaacttttgatttttgccactgcacattctccaacaggcatcattattcaaaatactgatcttgtggagtggtcattccttcctcacagtacagttaagacttttacattgtacttggatcaaatagctacattaatcggtcagacaagattacgaataacaaaattatgtggaaatgacccagacaaaatagttgtccctttaaccaaggaacaagttagacaagcctttatcaattctggtgcatggcagattggtcttgctaattttgtgggacttattgataatcattacccaaaaacaaagatcttccagttcttaaaattgactacttggattctacctaaaattaccagacgtgaacctttagaaaatgctctaacagtatttactgatggttccagcaatggaaaagcagcttacacagggccgaaagaacgagtaatcaaaactccatatcaatcggctcaaagagacgagttggttgcagtcattacagtgttacaagattttgaccaacctatcaatattatatcagattctgcatatgtagtacaggctacaagggatgttgagacagctctaattaaatatagcatggatgatcagttaaaccagctattcaatttattacaacaaactgtaagaaaaagaaatttcccattttatattacttatattcgagcacacactaatttaccagggcctttgactaaagcaaatgaacaagctgacttactggtatcatctgcactcataaaagcacaagaacttcatgctttgactcatgtaaatgcagcaggattaaaaaacaaatttgatgtcacatggaaacaggcaaaagatattgtacaacattgcacccagtgtcaagtcttacacctgcccactcaagaggcaggagttaatcccagaggtctgtgtcctaatgcattatggcaaatggatgtcacgcatgtaccttcatttggaagattatcatatgttcatgtaacagttgatacttattcacatttcatatgggcaacttgccaaacaggagaaagtacttcccatgttaaaaaacatttattgtcttgttttgctgtaatgggagttccagaaaaaatcaaaactgacaatggaccaggatattgtagtaaagctttccaaaaattcttaagtcagtggaaaatttcacatacaacaggaattccttataattcccaaggacaggccatagttgaaagaactaatagaacactcaaaactcaattagttaaacaaaaagaagggggagacagtaaggagtgtaccactcctcagatgcaacttaatctagcactctatactttaaattttttaaacatttatagaaatcagactactacttctgcagaacaacatcttactggtaaaaagaacagcccacatgaaggaaaactaatttggtggaaagataataaaaataagacatgggaaatagggaaggtgataacgtgggggagaggttttgcttgtgtttcaccaggagaaaatcagcttcctgtttggttacccactagacatttgaagttctacaatgaacccatcggagatgcaaagaaaagggcctccacggagatggtaacaccagtcacatggatggataatcctatagaagtatatgttaatgatagtatatgggtacctggccccatagatgatcgctgccctgccaaacctgaggaagaagggatgatgataaatatttccattgggtatcgttatcctcctatttgcctagggagagcaccaggatgtttaatgcctgcagtccaaaattggttggtagaagtacctactgtcagtcccatcagtagattcacttatcacatggtaagcgggatgtcactcaggccacgggtaaattatttacaagacttttcttatcaaagatcattaaaatttagacctaaagggaaaccttgccccaaggaaattcccaaagaatcaaaaaatacagaagttttagtttgggaagaatgtgtggccaatagtgcggtgatattataaaacaatgaatttggaactattatagattgggcacctcgaggtcaattctaccacaattgctcaggacaaactcagtcgtgtccaagtgcacaagtgagtccagctgttgatagcgacttaacagaaagtttagacaaacataagcataaaaaattgcagtctttctacccttgggaatggggagaaaaaggaatctctaccccaagaccaaaaatagtaagtcctgtttctggtcctgaacatccagaattatggaggcttactgtggcctcacaccacattagaatttggtctggaaatcaaactttagaaacaagagattgtaagccattttatactgtcgacctaaattccagtctaacagttcctttacaaagttgcgtaaagcccccttatatgctagttgtaggaaatatagttattaaaccagactcccagactataaacctgtgaacattgtagattgcttagtagcattgattcaacttttaattggcaacacggtattgtgctggtgagagcaagagagggcgtgtggatccctgtgtccatgggccgaccatgggaggcctcaccatccgtccatattttggctgaagtattaaaaggtgttttaaatagatccaaaagattcatttttactttaattgcagtgattatgggattaattgcagtcacagctacggctgctgtagcaggagttgcattgcactcttctgttcagtcagtaaactttgttaatgattggcaaaagaattctacaagattgtggaattcacaatctagtattgatcaaaaattggcaaatcaaattaatgatcttagacaaactgtcatttggatgggagacagactcatgagcttagaacatcgtttccagttacaatgtgactggaatacgtcagatttttgtattacaccccaaatttataatgagtctgagcatcactgggacatggttagacgccatctacagggaagagaagataatctcactttagacatttccaaattaaaagaacaaattttcgaagcatcaaaagcccatttaaatttggtgccaggaactgaggcaattgcaggagttgctgatggcctcgcaaatcttaaccctgtcacttgggttaagaccattggaagtacatcgattataaatctcatattaatccttgtgtacccaacagctctgaagagacagcgaccatcgagaacgggccatgacaacgatggcggttttgtggaaaagaaaagggggaaatgtggggaaaagcaagagagatcagattgtcactgtgtctgtgtagaaagaatggcagcattagattctcataggagcacaaaccctattgtgaactgcatatgccagggatctaggttgcatgctccttatgagaatttagtgcctgatgatccgtcactatctcctgtcacccctggatgggaccatctagttgcaggaaaacaagctcagggttcccacagattctatattacgttttctgagctgttcaatctttcagacaaccagcttgtgtctgaacatatgccaagccccactcctcaagatggaggaggagctgctgctcccggtggggactccccagtaggccactgggggaagccccacgacccagacagcaggcagggcccccagagacagctcatgcagcagatccgcagccccggggccctcaggcaccgccgcggctgccgccctcgctcagtcccgagcgcgtccaccctggccagccagctgcccccgctgaacctgcgccgggcgctccggctctccgttcgggccccagccaaccccgcgggctcaggctcccagttcctgtcccagcctgcgccggctccagcgcccccggctctccagctgctcttcccgactcctatccttggccgcccccagcgcggaaccgacccgcgaccctaccgccaacatcgcgggtctcgcctctcgcagcctttttggcgtccgcgcctcagcgttgaagccagggcccctcgtgagctcggcgcccagcctgtcaagtcctcttctgcctcagctctcacagcagtgtcttccccgcctgctggtcgccatcgcgccacagccaatgtctcctgttgctgtccgcccccgcgaagcgctgcaagggccagcgcccaacctgtcgctgcggaagaccggggcatagaacctgtcctggtgctgggcaagcgcttccgccccaagtccccgacctgggcaacctggaggagcccagagaatagcgctcaggacccagaggctggacagccagcccgcccgcccgtccctggccacgaggcgccccggacctga

SEQ ID NO: 19119 - DNA, 870 bp, Homo sapiens
  SIMILAR (305)..(138): 461254mologous to Homo sapiens Human secreted protein, SEQ ID NO: 6812,accession number G02731,Smith-Waterman Score=108.
ctagaccttgggtagctctgcctctgtggctttgcatggtgaagtctccatggtggctttcacgggtcggagttgggtgcctgtggcttttccagggttagtgttcaagcttccagtggctctaccattctcaggtctggagggtggcggctcccttcccataactctgccagagagtgccctggtgggaactctgtgtgggaactctaaccccacatttcccctcattattgtcctagtggaggtgctctgtgggggctctgcccctgcatcaggcctctgcctgggcacccaggcattccaatacatcctctgaaatctaggagaaagctgccaagactcctttgcttttgtgttctgtgtgcctacaggcttaacaccatgtagaaactgccaaggcttatgggttgcattctccaaagtggcatcctgagcttcacctgggaccctctgagccacagctggagctggtgcagctctgtgtgtattctcgttaatgataaattccaaatttaagtaattcctttgttcctgtatcttgccgtaggtgtttagaatcagccagacttcctcttgaatgctttgttgcttagaaatttcttccgctaggggaacatcacacaccggggatgtgatagttgagtccttccccaaactctccccccccattctccgtggagctggtaaagtggcttccacagtcttacttccaaatgaattatcaaggcaagaaggatgaacttcacgtattgagcccaagttagatctccttatgattataggtttacatggtgttcctaagaatctcttctcagcgtctgcattttcttcattggcagctgcatccactctcaagtcttcagctgtcat

SEQ ID NO: 19120 - DNA, 1413 bp, Homo sapiens
  SIMILAR (496)..(789): 661254mologous to Homo sapiens ribosomal protein L7,accession number X57958,Smith-Waterman Score=315.
tccccggtgtgtgatgttcccctagcggaagaaatttctaagcaacaaagcattcaagaggaagtctggctgattctaaacacctacggcaagatacaggaacaaaggaattacttaaatttggaatttatcattaacgagaatacacacagaagtttggaaaataagagtttggaaaatttgcagcctagccatgtggtagagaagaaaaaaaaaacattttcaggagaggaattcaagcaagctatagagcaatcacttgctggagagatttgtgtaactaaatggagccaagtgcaaatacccaagaccgtcgaaaaaggcctcaaaggaagcagacggattgacacagaaatagttcgtatattccacagcaatgaccggaattctgaatcttcttttgcaccagaggtggtagaaacaaagacaagcacgggagagacacctgccaagaataccacagctgtcagctgtggtcaccatagaaaccctttagagaaagtaaaggaattttgcagagctgaagataagtgcctgagaaagaagtttgcccataagatgcttcaaaaggcaaggaggaagctcatctatgaaaaagtgaaacactgtcacaaggaatataggcagatgtacagaactgaaattcaaatggcgacgatggcaagaaaagctggcaacttcttcgtacatccaaaacccaaattggcgtttgtcatcaggatcagtgctatcagtggtgtgagccccaagtggaaaaataaacaactttgtcctctaaatcatgtttttggacttggtatgggcgacttgcgggcgtttggcttagccgacgggacagggccttccgggggggagatcactggtatgagggacctacgcggccctctgtcggtgcgcgccccctcggcgggcgtcgctgaaattcccagacatttgattgtatttgaagatgtagttaatgggaagtttctacagacatccaggtgtgagatatctggaagtaagaataaagtttggcagacactgttaaaaaacaaaagagagaggcaaaggcttccaacaggatttggaaggcttgcagatcagagggcgtatggcgaagccaaaaataactgtggccaagtgggtctagtggagactctgtgggaaaggcaccttcttagaattggtgtctacattgccacatcttcccttgcggtgcccactctttcttcaaattacaatggcctggcccatgaccaatcctgctcagacactgtgcaaagaagcactggagcacctgaagcatgggacagagggtactgtgtgggcagaggagcccaaggcatccccatcttcttcctggacagaccccttacctcactgtttgatgaagcaagaggaagcagctctgcttccctacttcatgtctaa

SEQ ID NO: 19121 - DNA, 307 bp, Homo sapiens
  SIMILAR (12)..(275): 1001254mologous to Homo sapiens ribosomal protein L7,accession number L16558,Smith-Waterman Score=450.
acgcgggaaccatggagggtgtagaagagaagaagaaggaggttcctgctgtgccagaaacccttaagaaaaagcgaaggaatttcgcagagctgaagatcaagcgcctgagaaagaagtttgcccaaaagatgcttcgaaaggcaaggaggaagcttatctatgaaaaagcaaagcactatcacaaggaatataggcagatgtacagaactgaaattcgaatggcgaggatggcaagaaaagctggcaacttctatgtacctgcagaacccaaatttggcgtttgtcatcagaatcagaggtatca

SEQ ID NO: 19122 - DNA, 762 bp, Homo sapiens; identical to SEQ ID NO: 988
  SIMILAR (250)..(759): 921254mologous to Homo sapiens p40,accession number U93564,Smith-Waterman Score=805.

SEQ ID NO: 19123 - DNA, 570 bp, Homo sapiens
  SIMILAR (345)..(4): 821254mologous to Homo sapiens p40,accession number U93574,Smith-Waterman Score=478.
ttatttttgtgttgttctctgtatttcctgaattagaatgttggcctgccttgctagattggggaagttctcctggattatatcctgcagagtgttttccaacttggttccattctccccatcactttcaggtacaccaatcacacgtagatttggtcttttcacatagtcccatatttcttggaggctttgttcatttctttttattcttttttctctaaacttctcttctcgcttcttttcattcatttcatcttccatcactgataccctttcttccagttgatcgaatcggctactgaggcttgtgcattcgtcatgttcttgtgccctcagctgcaggtctgttggagtttgctggaggtccactccagacactgtttgcctgggtatcagcagcagaggctgcagaacagcagatatgggtgaacagcaaatgttgctgcctgatcgttcctctggaagttttgtctcagaggagtacctggccgtgtgaggtgtcggtctgaccctgtcttctgcgtcgctcatgctgggagctgtagactggagctgttcccattcagccat

SEQ ID NO: 19124 - DNA, 642 bp, Homo sapiens; identical to SEQ ID NO: 989
  SIMILAR (235)..(618): 721254mologous to Homo sapiens p40,accession number U93566,Smith-Waterman Score=457.

SEQ ID NO: 19125 - DNA, 1980 bp, Homo sapiens; identical to SEQ ID NO: 990
  SIMILAR (571)..(1977): 891254mologous to Homo sapiens putative p150,accession number U93572,Smith-Waterman Score=2199.

SEQ ID NO: 19126 - DNA, 456 bp, Homo sapiens
  SIMILAR (366)..(37): 761254mologous to Homo sapiens putative p150,accession number U93563,Smith-Waterman Score=426.
tcaatgcaggctcttttccggttccatatgaactttagttttttccaattctgtcattggtagcttgatgtggatggcattgaatatataggttaccttgggcagtatggccattttcacgatattgattcttcctaaccatgagcatggaatgctcttccatttgtttgtgtcctcctttatttcgctgagcagtggtttgtagatctccttgaagaggtccttcacatcctttgtaagttggattcctaggtattttattctctttgaagcaactgtgaatgggagttcactcatgatttggctctctgtttgtctcagctgcaggtctgttggagtttgctggaggtccactccagaccctgtttccctgggtatcaccagcagaggctgcagaacagcaaatattgcagaacagcaaatatcgctgagtgatccttcctctggaagcttcat

SEQ ID NO: 19127 - DNA, 475 bp, Homo sapiens
  SIMILAR (473)..(81): 1001254mologous to Homo sapiens Hb2E,accession number AF235097,Smith-Waterman Score=706.
caatctttgctgttctgcagcctctgctggtgatacccaggcaaacagggtctggagtggaactccaacaaactccagcagacctgaagtgtcatctggggccatggacggagaggggtgggggctaccagtggacccactgactcctggacatcaggatgctctgccatggcaaaggtgttatcatccatgttcttcgtcttcagttcctcctcggcaggcctgcgcctcaccggcttcatgcagctcttcagctgcctggcctcagcctccacgggaccctggcactcgggctgtggctccagctgcggcagctgctgctgctggggcagcccttcggcatcagtgggtgtgggagcgggtgcgatccggagcaggactgtgtagttgcggccgtggttgttggcccagaaagtgccctcaggggtctcatagcgcaccacgaagtcgaggcgcgccccatcgcccgcgccct

SEQ ID NO: 19128 - DNA, 642 bp, Homo sapiens; identical to SEQ ID NO: 994
  SIMILAR (232)..(639): 531254mologous to Homo sapiens p40,accession number U93567,Smith-Waterman Score=344.

SEQ ID NO: 19129 - DNA, 946 bp, Homo sapiens
  SIMILAR (165)..(25): 781254mologous to Homo sapiens PRO2221,accession number AF116695,Smith-Waterman Score=194.
tcatgcgtcatgtagttctcgtaccatgcttttcagctccatgaggtcatttaagttcttctctatgctgtttattctagttagccatttgtctaatcttttttcaaggtttttagcttctttgtgatgggttcgaacatcctcctttagctctttggtctttgatgatggtgacgtacacatggggttttggtgtgggtgtcctttctgtttgttagttttccttctaacagtcaggaccatcagctgcaggtctgttggagtttgctggaggtccactccagaccctgtttgcctgggtatcaccagcagaggctgcagcacagcaaatattgcagaacgacaaatgttgctgcctgatccttcctctggaagcttcatctcagaggggcacccagctttcagttcaatctcagactgctgtgctagcagtgaccgaggctccgtgggcgtgggaccctctgagctagatgcgggatataatctcctggtgtgccatttgctaagacttctgaagcctacttctatcaattcgtcaaaatcattctccatccagttttgtttccttgctgttgaggagttgtgatcctttggaggagaagaggtgctctggtttttggaattttcagcttttctgctctggtttctccccatctttgtggttttatctacctttggtctttgatgatggtcacctacagatggggttttggtgtggatgtcttttttgttgaggttgatgctattcctttctgtttgttagttttccttttaacagtcaggtccctcagctgcaggtctgttggagtttgctggaggtccactccagaccctgtttgcctgggtatcaccagcggaggctgcagaacagcaaatattgtagaacagcaaatattgctgcctgatcctctctggaagcttcatctcaaggcgcacctggctgtat

SEQ ID NO: 19130 - DNA, 5131 bp, Homo sapiens
  SIMILAR (2517)..(658): 941254mologous to Homo sapiens putative p150,accession number U93572,Smith-Waterman Score=3044.
tcagagagccttgggccagagttccaggggctctgagagtggctgccaggtgagctgaacagtccaatttccagtggggtcccgcacagatgggacacggcttaggaggaatcctgggctgcaggcattccttggcctggtggtcagatttctggcacttgtagcaagctcctggggaaggaggttctggaggaacgcctggccgctgcggttcaggcgtttggaagttcttgtgtgcggatttgaaattggtgagatgtttcttgggctggtcggtctgaggacctgaggtcgtaggtggatctttctcacggagcaaagagcaggaggacaggggattgatctcccaagggaggtcccccgatccgagtcacggcaccaaatttcatgcgtgtccgtgtgaagagaccaccaaacaagctttgtgtgagcaacatggctgtttatttcacctgggtgcaggtggggtgtttgctcttctggccgcactgcttcggcatttggatacttgggaactttgcaaatacttgcccaagattccagcatttcttgaatcagtggcacaccctgttcatcagcattcattaagcacctagtctctatgagagccaaggattggatctcagaaagtttcacagagaagacattggagcttggtctgttgtttcctgactttttaatgatcgccattctaactggtatgagatggtatctcaatgtggttttgatttgcatttctctgatggccagtgatgatgagcattttttcatgtgccttttggctgtataaatgtcttcttttgagaagtgtctgttcatatccttcacccacttgttgatggggttgtttgttcttttcttgtaaatttgtttgagttctttgtagattctggatattagccctttgtcagatgggtagattgtaaaaattttctcccattctgtaggttgcctgttcactgtgatggtagtttcttttgctgtgcagaagctctttagtttaattagatcccatttgtcaattttggcttttgttgccattgcttttggtgttgtagacatgaagtccttgcccatgcctatgtcctgaatggtattgcctaggttttcttctagggtttttatggttttaggtctaacatttaagtctttaatccatcttgaattaatttttgtataaggtgtaaggaagggatccagtttcagctttctcctacatatggctagccagttttcccagcaccatttattaaatagggaatcatttccccatttcttgtttttgtcaggtttgtcaaagatcagatggttgtagatatgtggcattatttctgagggctccgttctgttccattggtctatatctctgttttggtaccagtaccatgctgttttggttactgtagccttgtagtatagtttgaagtcaggtagtgtgatgcctccagctttgttcctttggcttaggattgacttggcaatgcgggctcttttttggttccatatgaactttaaagtagttttttccaattctgtgaagaaagtcattggtagcttgatggggatggcattaaatctataaattaccttgggcagtatggccattttcacgatattgattcttcctacccatgagcatggaatgttcttccatttgtttgtatcctcttttatttccttgagcagtggtttgtagttctccttgaagagatccttcacatcccttgtaagttggattcctaggtattttattctctttgaagcaattgtgaatgggagttcactcatgatttggctctctgtttgtctgttattggtgtataaaaatgcttgtgatttttgcacattgattttgtatcctgagactttgctgaagttgcttatcagcttatggagattttgggttgagacgatggggttttctcgatatacaatcatgtcatctgcaaacagggacaatttgacttcctcttgtcctaattgaatgccctttatttccttctcctgcctgattgccctggccagaacttccaacactatgttgaataggagtggtgagagagggcacccctgtcttgtgccagttttcaaagggaatgcttccagtttttgcccattcagtatgatattggctgtgggtttgtcatagatagctcttattattttgagatacgtcccatcaatacctaatttattgagagtttttagaatgaagggttgttgaattttgtcaaaggccttttctgcatctattgagataatcatatggtttttgtcattcgttctgtttatatcctggattacgtttattgatttgcatatgttgaacgagccttgcatcccagggatgaagcccacttgatcatggtggataagcttcttgatgtgctgctggattcggtttgccagtattttattgaggatttttgcatcaatattcatcaggggtattggtctaaaattctcttttttggttgtgtctctgccaggctttggtatcaggatgatgctggcctccagctcctccttgtacctctggtggaatttggctatgaatccatctggtcctggactttttttgattggtaagctattaattattgcctcaatttcagagcctgttattggtttattcagagattcaacttcttcctggtttagtcttgggagggtgtatgtgttgaggaatttatccatttcttctagattttctagtttatttgcatagaggtgtttatagtattctctgatggtagtttgtatttctgtgggatcagtggtgatatcccctttatcattttttattgcatctatttgattcttctctcttttcttctttattggtcttgctagtggtctatcaattttgttgatcttttcaaaaaaccagctcctggattcattgattttttgaaggattttttgtgtctctatttccttcagttttgctctgatcttagttatttcttgccttctgctagcttttgaatgtgtttgttcttgcttctctagttcttttaattgtgatgttagggtgtcaattttagatctttcctgctttctcttgtgggcatttagtgctatgaatttccctctacacactgctttgaatgtgtcccagagattctggtatgttgtgtctttgttctcgttggtttcaaataatgtatttatttctgccttcattttgttatgtacccagtagtcattcaggagcaggttgttcagtttccatgtagttgagcggttttgagtgagtttcttaatcctgagttcgagtttgattgcactgtggtctgagagacagtttgttataatttctgttgttttatatttgctgaggagtgctttacttccaactatgtggtcaattttggaataaatgtggtgtagtgctgagaagaatgtatattctgttgatttggggtggagagttctgtagatgtctattaggtccacttggtgcagagctgagttcaaatcctggatatccttgttaactttctgtctcgttgatctgtctaatgttgacagtggggtgttaaagtctcccattattaatgtgtgggagtctaagtctctttgtaggtctctaaggacttgctttatgaatctgggtgctcctgtattgggtgcatatatatttagggtagttagctcttcttgttgaattgatccctttaccatcatgtaatggccttctttgtctcttttgatctttgttggtttaaagtccgttttatcagagactaggattgcaacccctgcctttttttgttttccatttgcttggtagatctccctccatccctttattttgatcctgtgtgtgtctctgcacgtgagatgggtctcctgaatacagcacactgatgggtcttgactctttatccaatttgccagtctgtgtcttttaattggagcatttagcccatttacatttaaggttaatattgttatgtgtgaatttgatcctttggtctttgatgatggtgatgtacagatggggttttggtgtgggatgtcctttctgtttgttagttttccttctaacagtcaggaccctcagctgcaggtctgttggagtttgctggaggtccactccagaccctgtttgcctgggtatcagcagcagaggctgcagaacagcggatattggtgaacagcagatgttgctgcctgatcgttcctctggaagttttgtctcagaggagtagccagccatgtgaggtgtcaatctgccccatatgatgtattctgccatgggataacccttgccaaatgctggtgcagtgctcttggactccccagtctccagagctgtgagccaaatgcactgttctttataaattacccagtctgtggtattctgctccatgttgtaaagttgagggcacaatgggaagtaggacctaagtctccacagctcctcatataatgtactaggcagcgataataatggagtcctcttggggagtatggccattttcacaatattgattcttcttatccatgagcatggaatgttcttccatttgtttgtatcctcttttatttccttgagcagtggtttgtagttctccttgaagaggtccttcacatcccttgtaagctggattcctaggtattttattctctttgaagcaattgtgaatgggagttcactcatgatttggctctctgtttgtctgttattggtgtataagaaagcttgtaatttttgcacattgtttttgtatcctgagactttgctgaagttgcttatcagcttatggagattttgggttgagatgatggggttttctagatatacaatcatgtcatctgcaaacagggacaatttgacttcctcttttcctaattgaatgccctttatttccttctcctgcctgattgccctggccagaacttccaacactatgttgaataggagtggtgagagagggcatccctgtcttgtgccagttttcaaagggaatgcttccagtttttgcccattcagtatgatattggctgtgggtttgtcataaacagctcttattattttgagatacgtcccatcaatacctaatttattgagagtttttagcatgaagggctgttgaattttgtcaaaggcccaaaacagcat

SEQ ID NO: 19131 - DNA, 948 bp, Homo sapiens
  SIMILAR (241)..(318): 881254mologous to Homo sapiens Human secreted protein sequence SEQ ID NO:103,accession number Y87064,Smith-Waterman Score =117.
atggtcttagaaaaggctagagaagaggtagatccccccagtatgctgattcccccagtaacccagtgtgggcagctgcccaggtcacagtgcccacagccaaccctaagtagaatgttaacactggaggtagggataagcttgggcattattgtgctcatgatttcactctggccagacaccgtaaaggaataccaaagcagagaagccttgagtttcaagaagtacaacaagaacccaggtctgctgaagtttgctggagatccactccagaccctgtttgcctgggtatcaccagcagaggctgcagaacagcagatttctgccctttgtttcctttggaagcttcgtcccagaggggcacccaccagatgccagccactgctttcttatacgaggtgtctgtcagcccctgctggaagctttgtttacaccatgaggggaaaacctcctattcaagcctcagtaatggcagacgcctctccccccaccaagattgagcatcccaggacaacttcagactgctgtgttgccagcaagaatttcaagccagtggatcttagcttgctgtgctccatgggagtgggatctgctgagctagaccactgggctacctggcttcaatcccctttccagggtagtgaacggttctgtcttgctggtgttccaggcaccactggggtatgaaaagaaactcctgcagctagctcggtgtctgcccaaatggctgcccagttttgtgcttgaaacccaggaccctggtggtgtaggcacccaagggaatcctctgggtctgtgggttgcgaagaccatgggaaaagcgtagtatctgtgccggagtgcaccattcctcatggcacagtccctcatggcttcccttggctaggggagggagttcctcaaccccttgcacttcctgggtgaggagatgccccaccctgcatctgc

SEQ ID NO: 19132 - DNA, 1345 bp, Homo sapiens
  SIMILAR (222)..(392): 801254mologous to Homo sapiens zinc finger protein,accession number AF061261,Smith-Waterman Score=268.
tcatttttagttattctgatagtttttatgattggctttttgtttgactagaccagatttgactttaatgaaaacctaagtgttaacaaatagacatttcaccaaagcaacctgttatctcttcgcacttagtttgaattcatttttaatcctttaatagtccacagtaatattgtcctaaagagggtacattggattttaattttgctttcaatatgacggctgtcaatgttgccctgattcgtgataccaagtggctgactttagaagtctgtagagaatttcagagaggaacttgctctcgagctgatgcagattgcaagtttgcccatccaccaagagtttgccatgtggaaaatggtcgtgtggtggcctgttttgattctctaaagagtgtgacagctgtccccttcttgttcatggccttgggacttagccgtgaaccagaaacagtccctgcctccatggtgcagacattctcattgggagttggaggaggagcagggtcggtgtaacccgacgagaactgcaagtaccttcaccctcctccacacttaaaaacgcagctggagattaatgggcggaacaatctgattcaacagaagactgccgcagccatgttcgcccagcagatgcagcttatgctccaaaacgctcaaatgtcatcacttggttcttttcctatgactccatcaattccagctaatcctcccatggctttgaatcgcttagataccacatcctggggatgggcctcgttcctgcagaacttgtaccaaatacacctgttctgattcctgggaaacccacctctttgcaattgccagggagctgtttgggcccaaaactgatggcgtttcagataaactgggaggttttgccgaggaattttcagcgtgggaaattgttacccgtggggagaatgattggccgctatggctcaccctactgatgcttccatgattgaaggcgagtgataatactgtgacaatctgcatgggttacatcaaaggcaggaggacagtgggtgtctggggaataaaagccaagagctccaaacagaggattttggatacaaagggcagccaccagggaaatagctttgtgagagggacagactatctgattcccatttgtacaaacatgtccaaagcaaaaggcacagcatttctaaagtggatgcagaaattagtatacaatggcagttctggccagtgcagcccagcatttttctgttgtgcatggaaagaacacagtgaaaaggcaggcagggcatccggtgcaaagtgcaacagacatagacacacaaatccagttttcctgatgagagagggagctatctctt

SEQ ID NO: 19133 - DNA, 707 bp, Homo sapiens
  SIMILAR (61)..(519): 451254mologous to Homo sapiens ribosomal protein L26,accession number X69392,Smith-Waterman Score=207.
  misc_feature (1)...(707): n = a,t,c or g
atcgagaccctagaccagcgcggnggaanncatcaccgaagcgggagccggccaaaatgaaagtttaatcccctttgtgacttcccgaccgagagcaagaattcgcaaaagggcttttcaatgcacctttcccacattccgaagggaagattattgtccttcccccctctttccccaaagagcctgagaccagaaggtaccaaccgtgccgattcccatgcccccatcccgaaaaggatgattgaaagttccaggttgtaccgtggacacctttaagggtccgccaaattggccaaagtagtccccaggtttacaaggaagaaatatgttatctacattgaacgggctgcagcgggaaaaggcttaatggcacaactgtccaccgtaggcattcaccccagcaagcaggtggttatcactaaggctaaaactgggacaaagacccgcaaaaagatccctccgaaccggaaagcccaatctcgccaagtaggaaaggaaaaagggcaaatacaaggagagaacccattgagaagatgcaggaataaaagtaatacttatataacaagcaaagaaataaaactgtgaaacaaagaggaaaaaaacagaaaaaagatactagaacggaaagccaaatcttgccaaataagaaaaggaaaagggcgaatacaaggaagaaaccatcgggacgatgcgggagtgcggtcttc

SEQ ID NO: 19134 - DNA, 1517 bp, Homo sapiens
  SIMILAR (661)..(867): 761254mologous to Homo sapiens Human secreted protein clone yd165_1 protein sequence SEQ ID NO:166,accession number Y73472,Smith-Waterman Score=236.
tttcgtacggtgaggtcagcttcacattctcaggaactctccttctttgggtctggctgaagttgaggatctcttactctctaggccacggaattaacccgagcaggcatggaggcctctgctctcacctcatcagcagtgaccagtgtggccaaagtggtcagggtggcctctggctctgccgtagttttgcccctgggtgagtgttcctgggaggggctggtgctgggggcgaggaggcggctgggaagggcgggggtcctgtcccgggacccgtgggagagaaaatgggggacacccgcagccttgctgccctgtcctgtcttctcacagcaggcgtccaccctaactttccatcgtgtgggggagcaaatcatgtatatccagtgctgtgagtggctccagtcatggaggagcaaggatgagttctgcctggaagaatctgggaaggcttcatgggtggtcaggggaggaggtggggatgaggggctaagtatgaaccaaggagctagaaatacagcactggaagctggaagcagggggcttggagactgggagctggagtgcgtgtgggcagggtgtggcagcagccggcagaggccatttccccttggcagaacattcaccatgtgaccctgagcatgtctttgaactcctctgagctcctgtttcctctccagagaaaaggcgacccagctcctcttccctgcagttgtggctgtgcccatggtgctcagtgccatgggcttcactgcggcgggaatcgcctcgtcctccatagcagccaagatgatgtccgcggcggccattgccaatgggggtggagttgcctcgggcagccttgtggctactctgcagtcactgggtaagtatcctggcggggcttgcccacagtcctgcccacagagcttccccgacaggcatgtcccactctgtccaccctctgcttcttcccaggagcaactggactctccggattgaccaagttcatcctgggctccattgggtctgccattgcggctgtcattgcgaggttctactagctccctgcccctcgcccaattggagcctgaaccccgcaaaagaaacctgcttgggtaacgccctggacccccataaaggcccacagccagaaatgacatggacaagtggttccacttagcagccccaagaaagctggacattaagttgtcagtaaagagagcagaaagagtcagctttgccctataggaccctgaaggctcagccactagagcagcatgggctttggaggtgggcatgaaggtagattgagagcaggagggctggctggaagtctgcttaagaagcaggaaaaccccaggattccccctccagtagaccactggagagttatctttggagaggttgagtctctggactgctgtttgagcacgtgtgtcctggagggcgccctgttcccattggccctggatggcactctgccctcttctctctgggacctgtaagcaataaactgtttctgttatttcatgcat

SEQ ID NO: 19135 - DNA, 440 bp, Homo sapiens; identical to SEQ ID NO: 11731
  SIMILAR (201)..(395): 1001254mologous to Homo sapiens acidic ribosomal phosphoprotein (P1),accession number M17886,Smith-Waterman Score= 332.

SEQ ID NO: 19136 - DNA, 343 bp, Homo sapiens
  SIMILAR (123)..(215): 1001254mologous to Homo sapiens acidic ribosomal phosphoprotein (P1),accession number M17886,Smith-Waterman Score= 151.
tcggcacgagccaaggtgctcggtccttccgaggaagctaaggctgcgttggggtgaggccctcacttcatccggcgactagcaccgcgtccggcagcgccagccctacactcgcccgcgccatggcctctgtctccgagctcgcctgcatctactcggccctcattctgcacgacgatgaggtgacagtcacggaggataagatcaatgccctccagctgaggagaagaaagtggaagcaaagaaagaagaatccgaggagtctgatgatgacatgggctttggtctttttgactaaacctcttttataacatgttcaataaaaagctgaactttactgcta

SEQ ID NO: 19137 - DNA, 906 bp, Homo sapiens
  SIMILAR (187)..(519): 491254mologous to Homo sapiens acidic ribosomal phosphoprotein (P1),accession number M17886,Smith-Waterman Score= 179.
  misc_feature (1)...(906): n = a,t,c or g
tttcctcagttgcggccaaggtgctcggtccttccgaagaaggctaaggctgccgttggggtgaggccctcacttcatccggcgaactagcaccgcgttccggcagcgccagcccctacaattcgcccgcgcccatggccctctgtctccgaagctcgccctgcatcctaactcggcccctcattcctgcacgacgatgaggtgacagtcacggaggataagatccaaatgcccctcattaaagcagccggtgtaaatgttgagcctttttggcctgggcttgttttgcaaaggccctgggcaaacgttcaacattggggagcctcattcttgcaatgttagggggcccggtgggacctggctcccagccagctgggtgcttgcaaccagcagggaggttcctgccccccttccacttgttgctggttccagctggagggagaagaaaagtgggaagcaaaggaaaggaagattccgagggagttttgattgattgacatgggctttggtctttttgactaaacctcttttataacatgttcaataaaaaagctgaactttaaaaagnnnnnnnnnnnnnncctgcgggggggggccccctttaaaaaaaacaaattttcccccccggggcgggaaaaataaatttttttttaaggggccccnnnnnnnnnntcacgggccgggttttaaaaaccgggagaagggaaaaacccgggggttccccaaaaaaaagcccttggaaaaaaacanttnnaccgctaaaatccgtctaactctcatacacccccctattaatctcatgaccaatcagcaccaatcacaatcccacaaatccaatatcacctgtcactttcactacacctttactatataaccctactccttaaccactataatatcataccg

SEQ ID NO: 19138 - DNA, 479 bp, Homo sapiens
  SIMILAR (398)..(6): 1001254mologous to Homo sapiens Human secreted protein, SEQ ID NO: 7848,accession number G03767,Smith-Waterman Score=637.
gagggggcaaagcccagaatggcgtaggagaagagctgttgcttcagagaagggttcctggcataaccaatgatgaggctcccaaacacagttccaatcccagccccagaaccagccaccccaactgtggcagccccagctccaatgaacttggctgctgtgtcgatgtcccttgaaatggcgctggtttggaagctgcggctagagacaagtgaggtaaggggacatgagactgccaagctgctgaggctctcatctgtcagtatctccggtcgtttcagcaccactgcagatagcggacggctcagcagctgtgaggtgctcttgaccaaggagggagtggagacaaacttggagcaggcgaacattttcagggggtgaggagctgtggcaggagagaggatcagctcaggcatcacagcgccgcctgccagggctgtggcggtatccggccggttgctccacctggcgttcgagag

SEQ ID NO: 19139 - DNA, 458 bp, Homo sapiens
  SIMILAR (166)..(279): 1001254mologous to Homo sapiens ATP synthase subunit c precursor,accession number D13118,Smith-Waterman Score=187.
gggctgggattggaactgtgtttgggagcctcatcattggttatgccagagtctgactctgtcacccaggctggagtgcaactgtgtaatctcagctcactgcaacctctgcctctcgggttcaagcaattctcctgcctcagcctcccaagtagctgggattacaggaacccttctctgaagcaacagctcttttcctacgccattctgggctttgccctctcggaggccatggggctcttttgtctgatggtagcctttctcatcctctttgccatgtgaaggagccgtctccacctcccatagttctcccgcgtctggttggccccgtgtgttccttttcctatacctccccaggcagcctggggaacgtggttggctcagggtttgacagagaaaagacaaataaatactgtattaataagaaaaaaaaaaaaaaaaaaaaaaaaaaaaggcgg

SEQ ID NO: 19140 - DNA, 15040 bp, Homo sapiens
gagctcagccaaatccatgttgagtttagcaccatcactacccttcgggccttgtactctcacgaaggcactcagccaactgtggaaaagaaatatacacaggagactcaagaaacatcttattaatacagtatttatttgtcttttctctgtcaaaccctgagccaaccacgttccccaggctgcctggggaggtataggaaaaggaacacacggggccaaccagacgcgggagaactatgggaggtggagacggctccttcacatggcaaagaggatgagaaaggctaccatcagacaaaagagccccatggcctccgagagggcaaagcccagaatggcgtaggagaagagctgttgcttcagagaagggttcctggtagaaggagaagagaaaagactgaatttctagttcacacaaagaaaaggataaatatctaagatgggctcagggagaatccccctcttcaagattatctcacataataaagaagcttttagggtaacaccatcatgcccaaattcttgccctgattccccaaaggctctacaggaactgaatgaagggggagcaggcaatctaaaatcctgtaacatggcccaggtataatcatgaccttcactaatggttcacccatctcattaccacaaattaagacctcttggcccagacacttaatatccagggcccaaataggatggaagggtctatctagagcagtgttttcaaactttaagcagaactccaatatagtaaacatctaaaagccaaactgcaatggtacaaaagtagtggggaaattttaacggcttggtctcccctttattctctaagacagtctctggggcataacctcagaatcctaaggatttatggaacaccgctcttctagaagacaagagtaagagggacagattatgttctctcatttcaaatagtcagaagatctggggctttaagaaactacaaatgggctgggtgcggtggctcacacctgtaatcccagcactttgggaggccaaagcaggcggatcacttgaagccagaagttggagaccagcctggccaacatggtgaaaccccgtctctactaaaaatacaaaaattaggccaggcgcggtggctcacgcctgtaatcccagcactttgggaggccgagatgagtagattgcttgaggtcaggagttcgagaccagcctggccaacctggtgaaaccctgtctctaccaaaaatacaaaaattgctgggcgcagtggctcatgtctgtaatcccagcactttgggaggccgaagtgggcagatcacgaggtcaggaaatcgagaccatcctagctaatacggtgacaccctgtctctactaaaaatacaaaaaattagccaggcgtgttggcaggcgcttgtagtcccagctactcaggaggctgaggcaggagaacggcgtgaacccgggaggcagaggatgcagtgatccaagaccgcagccactgtactccagcctgggcgacagagcaagactctgtctcaaaaaaaaaaaagaaagaaaaaaaatacaaaaattagctgggggtagcggtgcgtacctgtaatcccagctacttgggaggctgaggcaagagaattgcttgaacccgagaggcagaggttgcagtgagctgagattacacagttgcactccagcctgggtgacagagtcagactctgtctcaaaaaaataaaataaaataaaataaaaaaataaaaaattagccgggcgtggtggtgggcacctgtaatcccagctacttgggaggctgaggcaggagaatcatttgaacccgggaggcagagattgcagtgggctgagattgtgccactgcacttcagtctgggagacagcgagactcagtctcaaaaaaaaaaaaaaaaaagaagttacaaatggtctatggggtttatgagttgaagtagtatggataaaggactcccagtgttgaaggcccatatataatctgtatttcccttactctgatacctccagaagtcttgatgggtaaggtaaatcgacaccaacatttaacagaatagtgaataaagcagcagtcagacttcttgtttaatacaaattcttaaaaagaactctatttctcaaaagacattaagagaacttcctggtctctagaggattaatttggttttaactgagttatccagagctgggagtactaaacagtcccaggtgtcagaaaccaggggctggctgcagtgccagttttcccaggagtgacagagggaaattcccagagatgggaaaaaatagcagtaaagccactatgttcactgagtctctagaacagggaaggtaaactttttctgtaaagggccacattgtaaataattttaggttttgtgggccgcatatagtctcttttgctttaaaacaaaaatgaagccttttaaaaatgcgaaactatttttttttttgagatggagtttcactcttttgcccaggctggagtgcagtggcgtgatctctactcactgcaacctccgccttcagggttcaagtgattttcctgcctcagcctcctgagtagctgggattacaggcatctgccaccatgcctggctaatttctgtatttttagtagagaaggggtttcaccatgttggccaggctagtctcgaactcctgacctcgtgatccgcccgcctcggcctcccaaagtgctgggattataggcgtaaggcaccacacccggccataaaattatttttagctcaatcatacaaaacctggctatggcccagatttggcccttaggccttagtttgccaacacatgctctagaccaaagctgttcatgaaactttcttcaatgacacaatgatataaacattctaatacatacatacatacacacacatatatatatatatatatatatatatatatatatatatatataaatttttttttttttgatggtctcactctgttgcccagactggaatgcagtggcaccatcttggctcactgtaacctctgtctcccgggttcaagcaattctcctgtctcatcctcccgagtagctgggactacaggcgcccaccacaacgcctggctaatttttgtatttttagcagagacagggtttcaccatattgaccaggctggtctcaaactcctgacgtcaggtgatccactcgccttgacctcccaaagtgcaggattacaggcatgaaccacctcgcccagcctatatttgtttttttcttttttttttttccccaaagtctcactctgtcacctaggctggagtacagtggcatgatctcggctcacagctcactgcaacctccacctcccgggttcaagcgattcttctgcctcagcctcctgaatagctgggattataggtgcacgccccccttacccaggtaatttttgtatttttagtagagatggggtttcgccatgttggccaggctggtctcgaactcctgacctcaagcgattcacctgccctggcctcccaaagtgctgggattagtgagccactgtgcccagccaaacattctatatttgcattgttgaatatggtagcctctagccacatctggctactgagcactcgaaatatggttagcgtgactgaagaactgaaaactgaaactatgtatttttaattaattaaaactaaaattcaggtcaagcgcgggggctcatgcctgtaatcctggcagttagggaggccgaggcaggtggatcacttgaggtcaggagtttgagaccagcctggccaacatggcgaaaccccatctctactaaaaccacaaaaattaggtgggcgtcattgtgtgtgcctgtaatcccagctacttgggaggctgaggcacaagaatcgcttgaacccagaggtagaggtgacagtgagctgagattgcgccactgcactccagcctgggaaacagagcgttactgtctcaaaacaaacaaacaaacaaacaacatgtagctagtggctacagtgtgggatagtatagttctagacccccaaatattttctgacctttggaaagcatatcagataaccagtggagggtccaacttatcttacctggcataacccaatgatgaaggctccccaaacacagtttccaatcccagccccagaaaccagccaccccaacttgtggcaagccccagcttccaattgaactttgggctgctgttgttcgatgttccctttgaaatgggcgctggttttggaagtttgcggttaaggagacaagttgaggttaagggggacatgagactgccaagcttgctgaggctctgtgaaaaagaggcaggtagaaggtaaagttttttgctttggtaacttttgtaccatttaaaaccctttaagctgccaaatcccattgtttctcccccaaacagaaaattgtttaacgccctaaaatgctggcaagtagaaccttttaacgtaggatgtagacttcaaatgcctttaagattcaggtgtggtcaagaagtgtaagactgaggccctagtctattcttgctgccccaaggagatcatcttcctaggactaaatgcttccaactgaagtcagtagactaggccaagtaataccagttagcagcagtgcacaggggcatgtgctgccagtggcaaaagctggagcactatagcatacagcgtattaagtgtcctccatctccacctaaagcccatggccttggccattcatgaattttagcctgtgatgactgtcctcagcattctacctcctggttctggcaggtaaccctccccacccatcacccccaaaaccacagtcccaactccactgtaaggtacctcatctgtcagtatctccggtcgtttcagcaccactgcagatagcggacggctcagcagctgtgaggtgctcttgacctagcaggaatgacatacaggggcaggaaggtcaaggaagactggagaggagtttcagaactatgccacgttgttacatcatcagacaagattttctttcctctcatggcctttccatcttcacatgtacgttagagttttggatcattcttccttttagcaaagtctaaattaaagaaccacaccatttctcttgcttctcagactttgctttaaggaaagaaagtctacttcctttgggccataagggagcatccaaccttgctatatccttttatagctcttgagaacaagaagaaatctaagcctcagaagcatttgcctcactcaacaagggaaatatatacagatgctcctcaacttaccatagggttatgtgccaataaatccatcatactttgaaaaaccatttaatactgctaacctaccaaacaccatagtctggccttcaatgtgctcaaaaagcttacactagcttacattagcttacagttaggtgaaatcacctagcaacacagtacaccgtagagtactggttgtttacccctgtgattgggcaggtgactgggagctgtgggttcctgctgagtattgcaacagagtattgtaccacacattgctagcttgggaaaagataaagattcctaattcgaagtatggtttctttctttctttcttttttttttttgagacggagtcttgctgtatcgccaggctggaatgcagtgtcgtgatctcggctcggctcactacaacctccacctcccaggttcaagcaattctcctgcctcagcctcccaagtagctgggactacaggcgccggcaaccacgcccagctaatttttgtatttttagtagagacaggttttcaccatattggccaggctggttttgaattcctgacctcaggtgatccacccacctcggcttcccaaggtgctgggattacaggcatgagccaccacgcccagcccgaagtatggtttctaatgaatgcatatcatttttgcatcatcataaagttaaaaaaaaaaaatcttaatctaaagttgggggccttctgtatgggtaatggtcagcccacaagaaagaagccagtaactttccctgaacacatccttttggaaaataggaacaaagattcatgctcaaaactcacctccttctggtagccttttctgactaaccccaagccagtgacaccaaaacagacacatggtgattcatagccagggctttaggcatcagataaagtgagattcaaatcttaattctattatcagcagtgtattctcaggataagtcacttaaacctttctaagcctgtattctcatttatgaaatcaaaatatcatctcttggggttgatttgaagagtaaatgagattatgtataccaattagtaaactcagtgagtgctaaggcacatggtaaatgctcaataaatggtactcctttttatttgtgaatgaaccaaccgcctcctctagctactatttcaaaaatttcttccatactgttgtttctgagtcaaatacttttccaatgtgtatttatgtaaattttagcttcctatccaaatttaagtcccagaatgaactccttagctatggctaactcaggacaagatcctacagacagtgcatactcagtccaagttatgtaatctacttatatttaccactctggatggccagcttacacgacatatagtttcaggagtaggaataacttgatcttggtctagattctcatctctattcttctcctaagatggctgggtaagaattaactgggcacagccaggcacggtggctcatgcctataatatcagcaatttaggaggccgaggacggcggatcacctgaggtcaggagttcaagaccagcctgaccaacatggagaaaccctgtctctactcggatcacgaggtcaggagtttgagaccagcccggccaacatggtgtaaccccatctctactaaaaatacaaaaattagctgggtatggtggcaggtgcctgtaaccccagctacttgggagtctgaggcaggtgaactgcttgaacccgggaggcggaggttgtggtggatcgcgccattgcagcctgggcaacaagagcgaaactctgtctcaaaaaaaaaaaaaaaaaaaaaattaactggccgccaagggatatggggcaggagagtatctagcaagcattcactctatcctgttacgcaatcatagcagagggccttccctccccaagaatctttcttacttatttacttatttatttattttttgagacagagtcttgctctgacgcccaggctggagtgcagtggtgcgatcttggctcactgcaacctctacctcctgggttcaagctattctgttgcctcagcctcctgagtagctgggattacaggcgcccgccaccatgcccaactggttttcgtttttttagtagagatggggtttcgccatgttggccaggctggttttgaactcctggcctcaagtgatctgcccgcctggacctcctctcccccagccttgctgtgaagaacaaggtctgatggaaagagagagacaagatgtctctcctttaaaactctcccagaaaagcaggtactcaccaaggagggagtggagacaaacttggagcaggcgaacattttcagggggtgaggagctgtggcaggagagctggaattacagaagcagtattgtaaacgctccttattcactaaactatatccttattagcagaaaaggggccctagaaagcttaactggcccagaaaacagtgactgaccttaagtcattggcagaaatagaattaaaaccctgaagtcatgacttcttccagaaaccccacacagctcccaagatttccttataatgaagtgacttcccctggtctgaacaagtgaacacttgggttcaggtaagacctgttacccatttccatagcctcatgatttgcagttgccacaggaattttcccagagtgtcttttgcctaagttttccttagtttttattcaaaaggaacgcttctcaagacttcatcatctggacctttaaaagttgccgtttaggctgggcacgtggttcacacctgtaatcccagcactttgggaggccgaggcgggcggatcacgaggtcaggagttcgagaccagcctgaccaacatggtgaaaccccacctctactaaaaatacaaaaattagccaggtgtggtagcacgcgcctgtaatcccagctactcaggaggctgaggcaggagaattgcttgaacccaggaggcggaggttgcagtgagacgagaccacgccactgcactccagcctgggtgacagagcgagaccccatctcaaaacaaacaaacaaacaaacaaacaaacaaaaagttgccctttagagtctttgtagttttgggagatatttgttgaaggccaagacactggaaggtctccaacaatctctttgctgatccctggaagtatctgattcctgaaaatacttcaatttcctgtattaataagatgaggaagatcaaggaggaactctgttattagtctatccaaaaggtattagtggctgggcgcagtggctcacgcctgtaatcctagcactttaggaggctgaggcgggtagatcacgaggtcaggagttcgagaccaggctgaccaacatggagaaaccccgtctctactgaaaatacaaaattagtcgggcatggtggtgcatgcctgtaatcccagctactcaggaggctgaggcaggagaattgcttgaatccaggaggcagaggctgcggtgagccaagattgcgccattgtactccagcctgggcaacaagagggaaactgtctcaaaaaaaaaaaaaaaagtattaaattgtgtctccccaagatctaaagaagatctgacaccctataggtatctaagttggtagaagtgaacttacctcaaacagaaggtgagttaaaaacctaaaggcagggtttctccaagtgaagtgagaagcccatctgaactagaattatctgggtggtgtacgtattaaaaaatgcatattcttgggcgcaacttggaccttcctggtcaagatctctgggggagctaggttcagtggctcattcctgtaatcccaacactgagaagctggggcggaaagataacttgaagccaggagtttgagaccagcctgggcaaacatcaagacctcatctctacaaaacataaaattagccaggtgaggtggaagtgcacctgtagtcccagctactccagaagctgaggcaggaggactgcttgaacccaggagctggaggcttcagtgagctatgatcacgccagttgtccagtatgggcaacaacgtgaaaccctgtctataaacaaacaaaaaagatctctgggaataaggctcaagtgccctgtatttcaaacaagtttcccagatgattattaggtatacttaacgcaagagcgtgaccctaaacccagtcttgaaactgtggtagtggtagaggatagacttgaacttggatcttttaagttacatgctttctaatatgtcacaggctgaaatactcagtgaatgcttagggctattaaataccacttcattaaatgaactgaactcagattgtcccaggttaaaacacttctgaatccaacatcttaattgctcttaatttattttttgcccaggctattgtggaactcctggcatcaaaagatcttcccaccttggcctcccagtgttgggattacaggtgtgagccaccacacccagccttaattacttttaagttaatggatgtcttcaactcttgtcctatctagaactctgatttttgcctatatgtaactctaacccaattttgctgccgtactattcaggttttcttgggtcaaaatccaatagttctttaaggcttttagaaaaagaaggggtggttcttttctaagggaattataccttattatcttctttgtaaaatgcagctcttagggggattaagtatgttcatttacaaattaacatacataaagagtttaatgtggtgctggcatataataaacccacaacaaggggtggcaattaagtgatcccaccattggctatctaaccatggcaactctgcaattgttagcctacaacttgggcaaaggcactatccagaatcaggactccaaaatcatcacgggctttttcctcagtgtagatgagtcacaggggtagtaacttaactattcctttccttaaaccttcttttccttgtaacagcagaatctggggaggttaattaatccttcacaggaaagctggcaggcagggtctcatgctggccccactagcttggccttaccccacctttctgggcctgctgcctcaacagaaaccctcatctctagcccaccatttgtgacttttacaacttcaccagcgtgccgggatgcgagaaaggtactggtaaataactagtgattccaaagcaaccagcctctctcttctgccttagctatcccaagccacaacctaacgggaggcgatgttttggctttttttcccacttctaccatgttcaaggtttactttttaaattgaggggtgctgactagagggattggtgactttagacgatccactatctccattgctcggagcacctgaggttctggggcctaaagtctggagatttcagaataaagaaggcacaagtcaggatgagaagagaaagcagagataggaggggagagcctgggggttgtcacaatctgaaagggccagagggcgagaaaagagtgtttgcagggactgggtggaacaggtgaaaagcagcactccaggatctaactttggccagctccaaggtatcctccccctgcgagacatccaagatggcgccaggcccgcgcggttggaggtcaccggcacgcggaagagccaactctaaggctaagggatagcggaagcaagaaagggcgagaggaccagggtgggagcacgcaaggtaagcgcctcaaagcatccgcgcaaggtgaggtgtcccgcgcgcgtgcgcagcgcacagagggctctaggtcccaaggccttacctgctcccactgcagagaagacagagaggggcggagcagcgggaagagcgaaaggaaggctcagcgcatgcgtgacccgggccaacgagtcgctcagccacggatagagtgattgcaacatacaggatcagctcaggcatcacagcgccgcctgccagggctgtggcggtatccggccggttgctccacctggcgttcgagaggagaaactacagggagcgccgactgcagaaatgaggccaactccgcggagtaagccgatccgtaacgtggactgcggtttggtctgtaccgcgtttgggatctcggacttgcgtcccctttccgagcatgcgcagtcgtcacactgccaaaacaaaactcctactcagaattcagtgttaacatacggtcgggattggggttcagtgcctaaaatgcagcaggaggaagatcttgggagtcctgctttctgtcgcgccgggactctggcatcactggatggcaaaccggctccatgggcgaatagtcagcaaaatgccgcagctgcttctggtggcttcgccctttcccccactccccgtttcctcctttccattccggtgataaaccatgagagaagcagcatcagcgagccagaagatagggttaaatatgatccgaatccctctttcctggctcctgggacagtctaggaataacgggcacctgcgacccgctgtaaggttgcgaggtcactccaggcttgcccgagcctctgctcaggtttcaactacgcgagttgggataagcagcgccctcccctcccgcccccatgctctcctgaacgtgggttttctctcccctttcgctcgcccttcccctgatggaaggaggtgggggaggcttcctggccctcatctttcctaggcctccttgtctcccagacaggacctgccctgccctttggaacagggcgacaaggcctatccagttccaaacccctgccgtccctgcatcgtgcttgaacgcagcacgagaaagacgggaaaagctcaccaaaccccataaaaaataaaaaataaaaagaaagccgcggctgtaaataaaggcaaatccgccactctctgaggggccgtttgtcctcccctccttggccccgtccttcccgccgccccctcccggctcccgggccccgcggcgccccggccccgagctcctccatttaatcggatttgggagaaggggaggataaatcacggcagcagctttacggtcccggaggagaggcgagccgcagacaggcacaccccggccggcgataaaaaccgccgctgaaagcccacggagcaatttcccgggaccccgagcgacgccattacaggaatgtaattttgcccggatgaggccccgagtttaattatcctcgcggaggaatttcaatgcggccaatccatcttgcaggcgggcggcagagggatttatatgggcccgttatttcacaccgatcctccatctgcatttttatggccctgagctcctgaaagggaggggaaggagtggggagaaataggagaagcgggcgagaagaggagggtggtagactgcctgtctttcctaaattcgcatttccagctccatcaggattctcacaggttcctctgaaatccccaaatctccagttttagttgttgattgcgccccgagcgggcaggtacgtgggaaatggaactgggatctttgggaatcaatcaacaggtatttatcaagtaccaagtggtgccaggcactgtggagatgctgttaggagaaagacaggctagcaaagacacaagtttatcccctgaggtctccagacatctccattcccaccaaaacggaattcttttaagctgtcagcttcacatcctcagtggcagagaaagtccacagttcttaggagccaccacccccaaacggctgttgcagctgttgcgacaatttagacactcagatatggctaacaatcccagaggaggatcagagaaggggcctgggaggaagctaaagctggctctttccaaaagttgttacagcctgcgatgtttaacactcccttgccctcatagaataatgggttctgcgttcagacaaatctgggttcccaaattgctgtgtgatcttgagctagctgtttaaccccctctaaatctatttcctcctatgtaaattgagaagaataatagtacttatcacacagccaatattgggataatacatatgaagcttttagcaaggtacttggtacccagtaagagttcagtaattgctagcattaaaatcatcatcgtcaccaccaccaccaccaccaccaccatcaccaccatcatcaccatcatcatcactgcttctatagttaagggcattgcaactcaattctgcactgctacctatatggactgtttattgcaaggtccttgagatagtatctcctgaaagagactcaactacactttaaaaacgttttcacctgcataagtcatacaaaacaagttattttacttgctggtgagtggagatctgaggggaggctgagaatcctgggactattactacgaggcttgaagcaagaaatcaaatccgcaagggagcagtgaggctccaaaaaggaggtttgtaaggggaggggtgaatttgaagacagcaaaagatccaagagaagcttagctgagggtcggaggatcttcttaactataggcttggggaagggtccttctttcacttcacaaagggaaaaccggggtccaggaaggaaagggtgtggagacagaactatcctttccaatcagtccctttcttttcctaccagaccatataacaaggttggactgattggccagtttttttaatgactgtgagtggcagattctgactggttggcagcctccctgcccagtggtgacgaagaaatgagattgatctttcctttcttaggattggttaacaaccctcaggggggccacagactcattttaattgactggataggctaagagagaggttcagcttctctcatatagaaattccaagtgtccttttctacaaaggtcaccaaggaagggttttgatttgtttatatatgtttctttggacaagaaaccatagcttagagcagaaaaatcaagatactcatgcaggcatgccacaatgagaaagagccacgaaagaaacaggagtgattttaaaaacgagagagagagagagagagagagagagagagagagagagaccagggcacagagaaatgcgaagaaaaaatattgctagagagaagaggaagggtttaaatggtttgatttccattcctgatggcttaagatgaggatactttatgatgtgttttgctagatgcacatgttgccagcaagtggcatggatagaacagctgtcttcgaggcaggagactggagtctagtcctagccctgctactaaatagttgaataactatgctagttacttcatctctcgaagctttagtttcctcatttggaaaaatcagggagagaagtaggtgatctctaagatttcatccagtgttaactttccaggattttctttctttctgctaaacaggcacttttctgcaagttaaagtggaaactttgcactgccaatactttatacatattgagcttctctatttattagtgattgttaatttcaagctcctgggctgtgatgggctggtgggaactgactgatatattttctacttttccttgctaaatcaattccctaagacatcaggactgtgagacatcggtaaacctccctacttctaaagaaagaaaacagtagatgaaggaagggaaaggatcactggtatccaggcttctgagggaggaatcagtaggagagatggtggcagagggatgaccaaaaacatttttgctggggaagaacttcaccttcctttgaatttgtttattttttaatttattttattttttggagacagggtcttgttctgttacccaggctggggtgcggtgacacgatcatggctcactgcag

SEQ ID NO: 19141 - DNA, 687 bp, Homo sapiens
  SIMILAR (184)..(288): 771254mologous to Rattus sp. mitochondrial precursor receptor,accession number D63411,Smith-Waterman Score=138.
tcaaacttgcacaaatatagtaaatgaactaacgattttaatcttcagaaccctggatcttgctttccaagtgcctgtcccgccggcgtcgggtctgagcggctccctgtgctcggatggtttgtgggcaaccgctcctttcccccaccgccgcagtccacactcagcgttctggggaagaggctgggtcggaacggagccatcgccgctggagtattcggggcccttttcatcgggtactgcatctacttcgaccgcaaaagactgaagtgaccccaacttaaagatgctgaagctgtccagaaattcttcctggaagagatatagctttggtgaagagatcctagctaaaggtgtagaccacctgacaaatccaagtgctttcttcggtaaccaaaccatttccccctccaaatggattcctttgggcccttccttaggttccaggcctaaggttttttgatagaaagccctcattcctttgggaatccccctttgtttccccatgcccctaaaggggtgactcaacctttccagctgtactcgcattcccagagcagcactgctgcccccttgcttaaaagcacggttgcccccaggaaccaggccagggcagttttgaatctcaggaagaaaaatggtagaaggaggcacagggacaaggcgagagaaggccatcaggatcat

SEQ ID NO: 19142 - DNA, 420 bp, Homo sapiens
  SIMILAR (409)..(194): 981254mologous to Homo sapiens acyl-Coenzyme A dehydrogenase- 8 precursor,accession number AF126245,Smith-Waterman Score=384.
ccaaagctgaggccaggggtccccttctcaacaactatgcatgagatgcccttggggcctggtcctcctgttcggcacatgaccacatagatgtctgactcaccagcaccactgatgaaggccttggagccattgaggatgtaatgatctccctgtttcttagcggaggtcagaagagaggcagcatcactcccacttccttctggtcccactctgccatatttggagccatctctcgggcagcaaagtcaaaggccactttttgaaattctttctgctcttcattaagtcccatggaagggtcgatgcaggaggtcaagctccggtggccggtctggacgaggacccggagaccgccgggcaggcagccgaggcgcgccccgaaacgccggcagccgctccacagcatagccgccgcag

SEQ ID NO: 19143 - DNA, 488 bp, Homo sapiens
  SIMILAR (133)..(327): 921254mologous to Homo sapiens HSPC144,accession number AF161493,Smith-Waterman Score=300.
  misc_feature (1)...(488): n = a,t,c or g
agcacacacaccacatattgggaaggttgtcgtactacaagcgccggacttcttagaaagcatgagcctggagaagaagccttctctaccatagcancttcaaaaaagccaggcatcgcaggactcataaaggtgaatgtacagtttgttcggatgatgaaacgttcaattccctgggctgagctcaatccctatcatcaagctcacaaagctactggtggccccttaaaaaatatggttctcttcactcgccagagattatcaatccagcccctgacccaggaagagtttgattttgttttgagcctggaggaaaaggaaccaagttaactgagatactgctgctggaatgggcgagacattgctgcaaagaagtcaagcttttttcagacaaaaggtgtgagggggcttgcttggtatgcttacctgggcttgtgtacctcagtggtttttgtgtacttttttcaataaaatatcaaagttgaaga

SEQ ID NO: 19144 - DNA, 585 bp, Homo sapiens
  SIMILAR (523)..(374): 881254mologous to Homo sapiens HSPC144,accession number AF161493,Smith-Waterman Score=213.
gttttgttttttttttttcttcaactttgatattttattgaaaaaagtacacaaaaaccactgaggtacacaagcccaggtaagcataccaagcaagccccctcacaccttttgtctgaaaaaagcttgacttctttgcagcaatgtctcgcccattccagcagcagtatctcagttaacttggttccttttcctccaggctcaaaacaaaatcaaactcttctacaaaaaaaaaaaagggaaaaaggaaggattagtttttaatgtccccttcttgaacaggaaagttgtgccaggcacaggtacatcttacatggtactaaggcgagcagtcattcgttcaaaactatttaccaggtgccaagcactatagagtactgggtaatagtaacaggtaactctggcgagtgaagagaaccatattttttaaggggccaccagtagctttgtgagcttgatgataggatttgagctcagccaggggaatgaaacgtttcatcatccgaacaaactgtacatccacctatgtgacaacagtgtacatgacagaaagacgtgtctaggctgactgtgcccactgtattt

SEQ ID NO: 19145 - DNA, 1306 bp, Homo sapiens
  SIMILAR (879)..(4): 931254mologous to Homo sapiens acyl-Coenzyme A dehydrogenase- 8 precursor,accession number AF126245,Smith-Waterman Score=1371.
ctactcctgaagcaggcttctagagatcagtatcctcatcacttcattgctaccttctagaatctggtggaccctggagtcccgcacgtactgctgaacagcgtaatccttcaggtagccgtagcccccgtgcatctgcaaggcctggttgcagatggcaaagcattcatctgtagcaaagagcttggccatggagcacaaggccactgcatccttcctctcctcctgcagagccactgctgcattgcggaccatcagccgcgcggccaccagccttgttgccatatcagccagtgtgaattgcaagtactggttactggccagaggctctccaaactgcttccggacattgaggtggtctcgggtgaggatgacagaggcgtgggcagcccccagggagcaggaagcaatattgatcctccctccgttcagtcctctcacggcaatgaggaagccctgcccctcgctcccaattctgttggccacagggacagcacagtcttcgaagatcacagctcgtgttggctgggagttccaccccacctttttctccttcttgccaaagctgaggccaggggtccccttctcaacaactatgcatgagatgcccttggggcctggtcctcctgttcggcacatgaccacatagatgtctgactcaccagcaccactgatgaaggccttggagccattgaggatgtaatgatctccctgtttcttagcggaggtcagaagagaggcagcatcactcccacttcctggttcagtgaggcagtaggaagcaaacttctcccatggtaacagaacggtgggcaaaaatttgtgccctctgttccctcatttcccgaaagctaatcaaatccatcccaggcacacatgttgtggatgccttcatataggctgtggtgctggtgcagcctgttagccaaggcttcaaaaatgacagaggtatcaagacgtgacagcccagacccgcccacatctgtttgtatgtagacccctccgaagcctagctgggctgccttccgcatcacatccactgggaacagctccttctggtcccactctgccatatttggagccatctctcgggcagcaaagtcaaaggccactttttgaaattctttctgctcttcattaagtcccatggaagggtcgatgcaggaggtcaagctccggtggccggtctggacgaggacccggagaccgccgggcaggcagccgaggcgcgccccgaaacgccggcagccgctccacagcatagccgccgcagctccgcgttcagctaagagtctgaacgccttcg

SEQ ID NO: 19146 - DNA, 864 bp, Homo sapiens
  SIMILAR (173)..(616): 841254mologous to Homo sapiens MDS012,accession number AF182413,Smith-Waterman Score=612.
ggcacgagcgctgcacagcctgcggcgcaacggaggcggaccgcagtcgagtctgcagagtgttgggtctgtagccagcaaattacttcatcatctagattatccattcagttgatcctaattagcaaggataacaagaatcgtccgcactaaagtcccctgcagcgtgaccatgtcgagaccccggaagaggctggctgggacttctggttcagacaagggactatcaggaaaacgcaccaaaactgagaactcaggtgaggcattagctaaagtggaggactccaaccctcagaagacttcagccactaaaaactgtttgaagaatctaagcagccactggctgatgaagtcagagccagagagccgcctagagaaaggtgtagatgtgaagttcagcattgaggatctcacagcacaggccaaacagacaacatgctgggatggtgttcgtaactaccaggcttcggtaacttccttagagccatgaagctgggagaagaaagccttcttctacccatagcaacttgcaaagaagccaggcatcgcaggactcatgaagatcgtgaaagaggcttacccagaccacacacagttttgagaaaaacaatccccattatgacccatctagcaaagaggacaaccctaagtggtccatgaagagtttgattttgttttgagcctggaggaaaaggaaccaagttaactgagatactgctgctggaatgggcgagacattgctgcaaagaagtcaagcttttttcagacaaaaggtgtgagggggcttgcttggtatgcttacctgggcttgtgtacctccagtggtttttgtgtacttttttcaataaaatatcaaagttgaag

SEQ ID NO: 19147 - DNA, 1180 bp, Homo sapiens
  SIMILAR (332)..(994): 551254mologous to Homo sapiens My005 protein,accession number AF059619,Smith-Waterman Score=468.
  misc_feature (1)...(1180): n = a,t,c or g
aaggatttccacctccacgctctgcccgaagccgaagaagctcatcgcaccgccgggccgggcgggtctcgcttccatgggacttaatgaagagcagaaagaatttcaaaaagtggcctttgactttgctgcccgagagatggctccaaatatggcagagtgggaccagaaggacaggaaggctgatggaaaagggggagcagtgacccaggaagttcaggcccagctgctggtgaagcacgggcagaagctagtctcccgattccagctcagcagcttttcctacgtggattccgtaaggaccacacagtccaaacaagagcatctccagacagacaagggactatcaggaaaacgcaccaaaactgagaactcaggtgaggcattagctaaagtggaggactccaaccctcagaagacttcagccactaaaaactgtttgaagaatctaagcagccactggctgatgaagtcagagccagagagccgcctagagaaaggtgtagatgtgaagttcagcattgaggatctcaaaggcacagccccaaacagacaacatgctgggatgggtgttcgtaactacccaggctcggaacttccttagagccatgaagctgggagaagaaggccttcttctaccataagcaactgcaaaagagccaggcatcgcaggactcatgaagatcgtgaaaagaggctttacccagaccacacacagtttgagaaaaaacaancccccccattatgacccccatcctagcaaagagggacaacccctaagtggccccatgggtggatggtacagtttggttcgggatgatgaaacgtttccattcccccctggctgagcctcaaatccctatcatcaagctcacaaagcctactggtggcccccttaacaaatatggttctcttcactcgcccagagattatcaatcccagcccctgaccccaggaagagtttgattttgttttgagccctggaggaaaaggaaccaagttaactgagatactgctgctggaatggacgagacattgctgcaaagaagtcaagcttttttcagacaaaaaggtgtgaaaaaagcttgcttggtatgcttacctggggcttgcgtaccctcagtggtttttgtgtacttttttcaataaaatatcaaagttgaagaacaaaaaaaaaaaa

SEQ ID NO: 19148 - DNA, 1055 bp, Homo sapiens
  SIMILAR (48)..(725): 641254mologous to Homo sapiens dJ553F4.1 (peroxisomal membrane protein PMP 24 ),accession number AL050349,Smith-Waterman Score=594.
gggtgcgcttacagttcctaaccccgaccctgcgcgcagcccgcactatggcagccccgccgcagctaagggctctgctcgtagtcgtcaacgcactgctgcgcaagcgccgctaccacgctgcgttggccgtgcttaagggcttccggaacggggctgtctatggagccaaaatccggggcccctcacggcgctgggtcatgacctttctcttccgggaatgggcagcctccagggagaagctgtgggccatactgcagggccacatatatccactcctgggaacctgggcacggtttgtgtttcaccttacaagggtcttccgttgccctgcagttccttacattacaagggcaaggacctacccaggcacacgcatttcctggggcgggcctttccttcgggggtatcctgggtgtttgggagaaaacaataaacattcaacagccagatcaaacatgtacctgttgtcaacgcgtccctgtttgccctgaagccgccctggctgtaagaagaaagggcctacatccctgaaaccccaggtgggacccgtttcccgctgcctcactgcggtggtgtgggggctggtgctgtggctctttgagtatcaccgatccaccctgcagccctcgctgcagtcctccatgacctacctctatgaggacagcaatgtatggcacgacatctcagacttcctcgtctataacaagagccgtccctccaattaatgcagccctgaggtgtctggctgtggctcaagatttggccccatgcagaccctcccaaaggatactgccttctcaagatcataggcctcagactccaactggtgttatcccagggttccgtttgctgaagtaaaaacactgattttaaaacccaagtgggtacctttgtatggtggcacaagtggccgaatcaggctgaggaatcctacggcttggttccaactgtgcagctgacttctgtgagactggggccagccacactactctgtaggcctcaggggtcaaggagctcagaggagggccctgaggtctctttacggcgggtat

SEQ ID NO: 19149 - DNA, 852 bp, Homo sapiens; identical to SEQ ID NO: 9383
  SIMILAR (1)..(480): 961254mologous to Homo sapiens laminin-binding protein,accession number J03799,Smith-Waterman Score=781.

SEQ ID NO: 19150 - DNA, 1310 bp, Homo sapiens
  SIMILAR (369)..(1079): 511254mologous to Homo sapiens pot. lamimin-binding protein (AA 1 - 300),accession number X15005,Smith-Waterman Score=444.
gggaatctggctgcaggaaaaaccatccaagcgcaagacagagatgctgtgggcatcctcagttccagaactggggaatccatggaaaacctgcagaaaaacttgctgcccaagcagaggaggcgaacgagggaaactttcacaatgtccggagcccttgatgtcctgcaaatgaaggaggaggatgtccttaagttccttgcagcgaggaacccatttggggggcacccaatttttactctccaggggacacggctacttctataaaggaaaaagtgtgggctctcttttatcataaatccaaagagggcccgggaagagccttctgctgccagcccgtcaaattgtgccccataaaaccccttcctgatgtcagtgttatatcctccgggaatactggccaggtttgtggaacagtgagggcctgtgcttgaagtttgctgctgccactggaagccactccaaattgctggccggcttcactcctggaacctttcactaacccagatccaaggcagccttcccgggagccgcggccttcttgtggttacctgacccccaggggctgacccaccagccctctcacggagtgcatcttatgttaacctaccctaccatttgcgctgtggtaacaccagattctcatactgcgatatgtggacattgccatcccatgcaacaacaaggggagctcactcagtgggtttgatgtggtggatgctggctcggggaagtttctgcgccatgcgtggcaccattttcccgtgaacacccatggggaggtcatgcctgatctgtacttctacagagatcctgaagagattgaaaaagaagagcaggctgctgcttaagaagccaggtgaccaaggaggaatttcagggtgaatggactgctcccgctcctgagttccactgctactcagcctgaggttgcagactggtctgaaggtgtacagggtgcccctctggtgccctattcagcaattccccctactgaagactggagctctcagcctgccatggaagactggtctgcagctcccactgctcaggccactgaatggtgtagcaggacgagcctcagacaaaacccctcagacaccgagttaaagaaggaagggctttattcggccaggagcatcagcaagactcatgtctcaaaaaccgagcttcccaatcagggaaccaagaaatgtagcaggacgagccacagacaaaacccctcagtcaccgagttaaagaaggaagggctttatttggccaggagcatcggcaagactcacatctcaaaaacagagctccccgagtga

SEQ ID NO: 19151 - DNA, 2495 bp, Homo sapiens
  SIMILAR (1002)..(1439): 471254mologous to Homo sapiens cytokeratin 18 (424 AA),accession number X12883,Smith-Waterman Score=202.
  misc_feature (1)...(2495): n = a,t,c or g
cacctggtcactctgggccccctacaccctggattggctcctcccaaaggaaggcctcttgtttactcctagatgactcagccttagccacatccgcttaaccctccaatagtccccattccgccagagccagtgtctcctcctctttacaggcctttccttacctccctccatgctgtccacttcctctgtaaagctctcaaccctgtccccttccccctctctcctgggaaagagccctcccatgcctagctgctgctcttagggaccctgtggctaggtgcgcggatggaaatccagccctcaggtcctcgatgatcttgaagtaatggctccagtctctgacctggggtcccttcttctccaagtgctcccggattttgctctccagcctccggttctcggtctccaggctcctcactctgtccaggtggaggaggtgctggcgagtttgaaatttgggagtcttgaccgggcgcagtggctcacgcctgtaatctcagcactttgggaggccgaggcgggtggatcacctgaggtcaggagttcaagaccagcctggccaacatggcaaaaccccatctctactaaaaatacaaaaattagccaggcatggtggtggaccacctgtagtcccagctactcgggagggtgaggctcaagaatcgcttgagcctgggaggtggaggtttgtagtgagctgaaatcgcgtcactgcactccagactggatgagagagtgagattctgcctcaaaaagcaaaaaacaaacaaagctgggcacgggggctcatgcctgtaatcctagcactttgggaggctgaggcgggtggatcacctgaggtccagagttggagaccagcctggccaacatggcgaaaccccgtctctactaaaaatacaaaaattaggtcatcagcaaagcctgagtcctgtcctcttgctctcctccccggacagcatgagccttcaccactcgctccaccttctccactaactacccggtccctgggttctgtccaggcgcccagctatggcgcccggccgcgtcaagcagcgcgaccagcgtcgtatgcaggcgctgggggctctggttcccggatctccgtgtcccgctccaccagcttcaggggcggcactggggtccgggggcctggccaccggcantagcccgggggtcatggcaggaatgggatggcatccagaacgagaaggagaccatgcaaagccctgaacgaccgccttggcctcttaccttggacaagagtgaaggagcctggaagaccggagaacccggaagcttggaagagcaaaattccgggaacactttggaagaaagaagggaccccaggtcaagagactgggagccatttacttcaagatcatccgaggaccttgagggcttcagattctttcgcaaaatacttgttggacaatgccccgcatccgtttctgcaagatttgacaatgccccgtctttgctgcttgattgattttaggagttcaagtattgaggacagagctggcccatgtgcccagtcttgttggagaacgacattccattgggctccgcaaaggtcatttgatgacaccaattatcacaccgacttgcagctgggagacagagattcgaggctcctcaaggagggagctgctctttcaatgaagaaggaaccacgaagaaggaagttaaaggcctacaagcccagattgccagctctgggtttgaccgtggagggtagattgccccaaaatctcaggacctcgcaaaagatcatggcagacatccggggcccaatatgaccgagctggctcggaaagaacccgagaaggaagcttagacaaagtactggtcctcagcagatttgagggagagcaccacagtgggtcacccacacaagtctgcttgaggttggaagcttgctgaagacgacgcttcacagaagctgagacgtaccagtccagtccttggaagatcgaccctggacttccatgagaaaatctgaaaggccagctttggagaacagcccttgaggggaggtggaggcccccctacggcccttacaagattggagccagcttcaaacggggattcctgcttgccacctttggagtcaagagcttggcacaagacaccgcgcacagaggggacagcgcccaggcccccagggagtatgagggcccttgctgaaccatcaagggtcaagcttggaagctgagatctgccaccttacccggccgccttcttggaagattggcgaggactttaatctttggtgattcctttggacgaacgcaactccatgcaaaccatccaaaagaccaccaccccgcccggataagttggattgggcaaagtggtgtcttgagaccaattgacaccaaaagttctgaaggcattaagccagcaagaagcagtggtacccttttggggaagcaggaggccaataaaaagtttcagagttcaaaaaaaaaaaaaagaaaaagaaagttttg

SEQ ID NO: 19152 - DNA, 2110 bp, Homo sapiens
  SIMILAR (396)..(1097): 281254mologous to Mycobacterium tuberculosis proline-rich mucin homolog,accession number AF071081,Smith-Waterman Score=110.
atgacttctcggaaccagctggtgcagaaggtgctgcaggagctgcaggaagcagtggagtgcgaaggcctggagggtctcataggtgcttccttggaggccaagcaggtcctgtcttccttcactctccccacctgccgggagggaggccctggcctccaggtgctggaagtggactcggtggccctgagcctgtatccagaagatgctccacggaacatgctgccgctggtgtgcaagggggagggcagcctgctgttcgaggcggccagcatgctgctgtggggtgacgcacgcctcaaccctgcagctgcgggcccgcaccgtggtagagatgctgctgcacagacactactacctcccgggcatgatcgactccaaagtgatgctgcaggccgtgcgctactccctatgctctgaggagtcccctgagatgaccagcttgccccccgccacgctggaggccatcttcgatgccgacgtcaaggcctcctgtttccccagcagcttctccaacgtgtggcacttgtatgctctcgcctctgtcctccagcggaacatctactccatctaccccatgcgcaacctcaagatccggccctacttcaaccgtgtcatccggccccgccgctgcgaccacgtgccctccacgctgcacatcatgtgggctggccagcccctcaccagccacttcttccgccaccagtactttgcccctgtggtggggctggaagaggtggaggctgaaggtgcccctggcgtggccccagctcttccagccctggccccactctcatcgccggccaagaccctggagctgctcaaccgtgaacctggcctcagctactctcacctctgtgagcgctacagcgtcaccaaaagcaccttctaccgctggcggcggcagtcccaggagcaccggcagaaggttgctgcccgcttctccgccaagcacttcctgcaggacagcttccaccgggggggcgtcgtgccacttcagcagttcctccagcggttcccggagatctcccgctcaacctactatgcctggaagcatgagctgctgggctctggcacctgcccggccttgccccccagggaggtgctgggcatggaggagctagagaagctgccggaggagcaggtggctgaggaggagctggagtgctccgcactggcggtgtcaagccctggaatggtcttaatgcagcgggccaagttgtacctggagcattgcatctccctgaacacactggtaccctatcgctgcttcaaacgcaggttccctggcatctcacggtccacttattataattggcggcgaaaggccctccggaggaaccccagcttcaagccggcaccagccctctctgctgctgggactccccagctagcatctgttggggaaggggctgtaattccttggaagagtgaggcggaagagggggcagggaatgccacaggtgaggaccctcccgcccccggggagctcctgccactaaggatgcccctgtcccgttggcagaggcgtctgcgcagggctgcccgcaggcaggtgctgagtgggcatctccctttctgccgcttccgcctccgctaccccagcctgtcaccttctgccttttgggtctggaagagtcttgctcggggttggcccagaggcctgtccaaacttcaggtgccggtccccaccttgggcaaaggggggcaggaggctgaggagaagcaggagaaggaggctggcagggatgtgacagctgtgatggccccacctgtgggggcttcttcagaagatgtagagggagggccttccagagagggggccctgcaggagggggccacagcccagggccagccccacagtgggcccttgctgagccaacctgtggtggcagcagcgggtggcagggatggccggatgctggtgatggacatgatcgctaccacgaagttcaaggcccaggccaagctgttcttgcagaagcgcttccagtccaagagctttccctcctacaaggagttcagtgccctctttcccctcactgcccgctccacatactacatgtggaagcgagccctctatgacggcctgaccctggtagatggctga

SEQ ID NO: 19153 - DNA, 1464 bp, Homo sapiens
  SIMILAR (119)..(646): 571254mologous to Homo sapiens alpha 4 protein,accession number Y08915,Smith-Waterman Score=344.
  misc_feature (1)...(1464): n = a,t,c or g
ggagggggaattcccggctgcggtattcgcacgaggacgagttacagctgccgcggctccccgagctgttcggaaactgtagacagttactggaggaagtagaagtggcgacttgaccccgccggtttccgggatagtccaggagaagggtgttcaagggctttggacctccttgaggagggctgccgaaatgttattcccagtccaccttgttcggccgcgaatgtagattttggaaagatttgtcccccacgcacttgattaccttttggggtccaggcttttcaaggagccctcaccatggaaacaagtcaaccccagcaagcgtcttagatcattttgcagcggggctcgagaacactttataaaactacttaacttcagtgccattggttatcatgtggggcagagttttgagcttgcccaaaaccattgaacaactctgctgaaaatcacactgccaattcctccatggcttatcctagtctcgttgctatgggcatctcaaagacaggctaaaatacagagatacaagcagaagaaggagttggagcataggttgtctgcaatgaaatctgctgtggaaagtggtcaagcagatgatgagcgtgttcgtggatattatcttcttcaccttcagaggtggggttgatatcagcttagaagagattgagagcattgaccaggaaataaagatcctgagagaaagagactcttcaagagaggcatcaacttctaactgcatctcgccaggagaggcctccagtgaaaccctttcattctcacttcggaacatggcttcatagccaaagtanctttggagctggttattccaagggctggccaacttatggacggtgagtgagctggtatgaagcaacatcggaaattatggagcacttatccggatcaggggaatatgccaagggcagcaccagagggaatttcagaaaaagcagctcagcaacaggaagatcaagaagaaaaggaggaagaggatgatgaaccaaacaacttccacagagcccgggagtggggatgactggaagtgacacccatccttaggggcctatgggaaccgacagaacatgggctgatcttcccacaacaccacaggactgcaggggtgcaccaacgtcccctgcccaaggaaaaccatgcagtcctcccctccgccggtctcctggcttcagctctgtacaaccgagggcaaagatgctaaatcttgctttgcattcagtaaagtgtcaagtgatttaagtgtgtatttgtacccctagatgatatgaaccagcagtcttgttttggcatcatccctcatcatgttgtattccagcttcttcgagtggaaggaaaagagtgctgagaaatggctctgtataatctatggctatccgaattctctgaaaaaataataaaagtcccctctattatatgagcctgtccagaaaaaaaaaaaaaaaa

SEQ ID NO: 19154 - DNA, 262 bp, Homo sapiens
  SIMILAR (5)..(160): 801254mologous to Schizosaccharomyces pombe 40s ribosomal protein s4,accession number AL357232,Smith-Waterman Score=242.
  misc_feature (1)...(262): n = a,t,c or g
agccatggctcgtggtcccaagaagcatctgaagcgggtggcagctccaaagcattggatgctggataaattgaccggtgtgtttgctcctcgtccatccaccggtccccacaagttgagagagtgtctccccctcatcattttcctgaggaacagacttattgacaagacgggagagaatttccgtctgatctatgacaccaagggtcgctttnctgtacatcgtattacacctgaggaggccaagtacaagttgtgcaaa

SEQ ID NO: 19155 - DNA, 1163 bp, Homo sapiens
  SIMILAR (787)..(993): 461254mologous to Homo sapiens Sequence encoded by clone 61,accession number R05881,Smith-Waterman Score=94.
  misc_feature (1)...(1163): n = a,t,c or g
ctgggcggacagctgaaaatccggcgcgcgcagtctccagccccaatttctacgcgcaccggaagacggaggtcctctttccttgcctaacgcagccattggctcgtggtcccaagaagcatctgaaagcgggtggcagctccaaagcatttggatgctggataaattgacccgtgtgtttgctcctcggtccatccaccgggtccccacaagttgagagtagtgtctctcccgcatcattttccctgaggaacagacttaaggtatgccctggacaggagatgaagtaaagaagattatgcatgcagcgggttcattaaaaatcgatgggcaagggtccgaacttgatataaacctacccctgctgggattcatgggatgtccatcagcatttgacaagaccggggaagagaatttcccgtcttgatctaattgacacccaaggggtccgcttttgctggtacatccgtatttaaccaccctggaggaaggccaagttacaagtttggtgccaaaagtgaggaaagatcctttgtgggccaacaaagagggaatncccctcatctgggttgactcattgatgccccgcaccccatcccgcctaccccccgattccccctcatccaaggtgaaatggataccccattccagattgaatttaagaagacctggccaagattaacctgatttccatccaaagttccgaacactggtaaaccctgtgtatgggtgacctggagggtgcctaaccctagggaagaaattgggtgttgatcaccccaacagagagagggcaccctgggatctttttgaccgttggttcacggtgaaaggatgccaatggccaacaagcttttggccacttcggacttttccaacattttttggttattggcaagggcaacaaaacccatgggatttctctttccccgaggaaagggtatccgccttcaccatttgcttgaagagagagacaaaagactggcgggccaaacagagccagtggggtgaaatggggtccctgggggttgacattgttcagatcttttggtaccgtaattaaaaatattgtaaagtcgagtggcaaagctgttgccattggcatctttcacgtgaaccacgtcaaaagatccagggtgcctctctctgttggtgatcacacc

SEQ ID NO: 19156 - DNA, 298 bp, Homo sapiens
  SIMILAR (101)..(298): 831254mologous to Homo sapiens folate receptor 3 (gamma),accession number U08471,Smith-Waterman Score=370.
gggtggtggacgccctgccccctcccacagctctggtccccttcaagggtaaagctgctgagatacgtggctgacaggagtattctgtctcctccccactcaggtcaaccagagctggcgcaaagagcgctggtgggaggactgtcgcacctcctacacctgcaaaagcaactggcacaaaggctggaattggacctcagggattaatgagtgtccggccggggccctctgcagcacctttgagtcctacttccccactccagccgccctttgtgaaggcctctggagccactccttc

SEQ ID NO: 19157 - DNA, 558 bp, Homo sapiens
  SIMILAR (391)..(525): 1001254mologous to Homo sapiens folate receptor 3 (gamma),accession number U08471,Smith-Waterman Score=282.
atggcctggcagatgatgcagctgctgcttctggctttggtgactgctgcggggagtgcccagcccaggagtgcgcgggccaggacggacctgctcaatgtctgcatgaacgccaagcaccacaagacacagcccagccccgaggacgagctgtatggccagacccatgatgtgcaaggggtcttgcaggaagaccaagagttggaacatccaaggaaaagcaagtgtgaagtcgggctggcagggaagcatgttctgtgtcagccggcactgggcgtgggccagggtgtgggaggtgggtgggagctcctcaagggccctccccaggaagtgttcctctggatgacctacctggggcagaggagccagaatatggaggagatggctgtggtcaaccagagctggcgcaaagagcgcattctgaacgtgcccctgtgcaaagaggactgtgagcgctggtgggaggactgtcgcacctcctacacctgcaaaagcaactggcacaaaggctggaattggacctcagctccatctgcagtatgcgaccctctcctgtga

SEQ ID NO: 19158 - DNA, 1044 bp, Homo sapiens
  SIMILAR (222)..(971): 591254mologous to Homo sapiens folate receptor 3 (gamma),accession number U08471,Smith-Waterman Score=670.
aaggaaaagcagcaaaccagatggagaaggaaggccaaaaagataagtagaaagctggaccatgagctccttgagggcagggactgaatggttactatgtccccagggcccagcatgaccttctcctggattcctcatcttccttctgtgacctgtgtctccatcagtttctcctccggcatctttttcttacaggattcttacctcaggaatagatggacatggcctggcagatgatgcagctgctgcttctggctttggtgactgctgcggggagtgcccagcccaggacgtgcgcgggccaaggacggacctgctcaatgtctgcatgaacgccaagcaccacaagacacagcccagccccgaggacgaagctgtatggccagtgcagtccctcggaagaaagaatgcctgctgcacggccagccaccagccaggagctgcacaaggacacctcccgcctgtacaactttaactgggaatcactgtggttaaaaatggaaccccacctgcaaagcgcccactttatccccaggacagctgtctcctatgagtgcctcaccccaaccctggggccctgggatccggcagttcaaccagagctggcgcaaagagcgatttttgaacgttgcccctgtgcaaagaggactgtgagcgctggtgggaggactgtcgcacctcctacacctgcaaaagcaactggcacaaaggctggaattggacctcaaggaataaataagggtcggcccggggccttttgaagcacttttgagtcctacttccccactccagccgccctttgtgaaggcctctggagccactccttcaaggtcagcaactatagtcgagggagcggccgctgcatccagatgtggtttgactcagcccagggcaaccccaatgaggaggtggccaagttctatgctgcggccatgaatgctggggccccgtctcgtgggattattgattcctgatccaagaagggtcctctggggttcttccaacaacctattctaatagacaaatccacatgaaaaaaaaaaa

SEQ ID NO: 19159 - DNA, 2888 bp, Homo sapiens
  SIMILAR (453)..(1307): 491254mologous to Homo sapiens unnamed protein product,accession number AK026946,Smith-Waterman Score=614.
cccagccagcatgggtcggcgcccagcggcccgcccgagcactccggccgcagaaccagagtgccgccctgaggcctgctgagaacacaacaccctcccgaccgcgccaccgcgaccccctagccgggcgcgtccttgcagggcctgggctgtctccctcccactctcagaaataaggcacacgcctgggcattcgtgggccaacgggccttggctaaaccgtccccacatttgtcagcgccacagcaacatcctcagagtctgagcgaactgcgcccagcgcgggcacggagcctcccaccgccagcaacctgcggccccggagaaggcagcgagcgcagtgacagcgcctcaccgccaccagctcctggaccaccatggccaagaaccgcagggacagaaacagttggggtggattttcggaaaagacatatgaatggagctcagaagaggaggagccagtgaaaaaggcaggaccagtccaagtcctcattgtcaaagatgaccattcctttgagttagatgaaactgcattaaatcggatccttctctcggaggctgtcagagacaaggaggttgttgctgtatctgttgctggagcatttagaaaaggaaaatcattcctgatggacttcatgttgagatacatgtacaaccaggaatcagttgattgggttggagactacaatgaaccattgactggtttttcatggagaggtggatctgaacgagagaccacaggaattcagatatggagtgaaatcttccttatcaataaacctgatggtaaaaaggttgcagtgttattgatggatactcagggaacctttgatagtcagtcaactttgagagattcagccacagtatttgcccttaggcacaatgatccagcttcaatacaggtatataacttatcccaaaatgtccagggaggatgatcttcaggcacctccagcttttcacttgagtatgggcaggactgggcaatgggagggaaacatttcctggaagccattttcaggagtctggattatttctttgttcgagactgggagtttcccatacgaattttcatatggagccgatggtggtgccaaattcttggaaaaacgcctcaaggtctcagggaaccagcatgaagaactacagaacgtcagaaaacacatccattcctgtttcaccaacatttcctgttttctgctacctcatcctgggcttaaaagtagctaccaatccaaactttgatgggaaaattgaaagaaatagatgatgaatttcatcaaaaactttgaaaatacttgattccttgggcttactttaggtcccgaggagcctaggatatttaaaggagatccaatgggggattaaaaattcacctggccggggtctggtggagtacttcaaggcttatataaagatctatcaaggtgaagaattaccacatcccaaatccatgttacaggccacagcagaagctaacaatttagcagccgtggcaactgccaaggacacatacaacaaaaaaatggaagagatttgtggtggtgacaaaccatttctggccccaaatgacttgcagaccaaacacctggcaacttaaggaaggaatctgtggaagctattccgaggggtgaagaaaatgggtggggaagaatttagccggcgttacctgcagcagttggagagtgaaatagatgaactttacatccaatatatcaagccacaatgatagcaaaaaataccttcccatgcagctcgtacccccagcccacactgttttgtagtcatcctttaatcacatatgtgattgctggtgtgactggattcattggtttggacatcatagctagcctatgcaatatgataatgggactgacccttatcaccctgtgcacttgggcatatatccggtactctggagaataccgagagctgggagctgtaataggacccaggtggctgcagctctgtgggaccagggaagtacaaatgaggccttggaacaagctttaccagtgccagcaggcaacccccacagacatcctgtatccatccaagcctttccccctacacccaaaggtcgggaatcttactgaacaaatccagaaaaggaaaaaaatggtaatgccaaaattttaagaaataccaggtgccatgacccaattgtccaattaaatattccagttttatgtcctcccatgcaaacattccaaagtgccttcccatcagaacaggagtaaaatacctaaacaccctctgaagactgcaaactggattagttccttttacttcagtgtttaataagcagatgtatgtatgcatggttatactattttgttaacatgtacaatttcctgatttttcttcaaaaatgctgttataaagtatttgtctatttatgataacagtacacggtgttctgcttgaatttacataaattcatacatactgggttataattaaatcatgtgatattccacgtttggatatgctcatttaatttctacagaaaaaattctaaattatttcacattagcccatttgttaaaacacagccatccataacctcagcaggctggatttaatctgtatcatccctatatatatcacaatccttatttttaagcacattttagagttcccttagttgcctttatgcaaaaaccagatattgcttttacatggtttaatagaatataaacctcttgataaaaaatgcacaaaaaatcactttgtatatgtgagtttcactgcattgtatattttttcatttggtacacaaagaatgtattcttcataggtttattcttttaatatgtgaactattattaaagtttactctggttcctaagattaaaaacaaatgcttactgaatttgaaaaaaaaa

SEQ ID NO: 19160 - DNA, 591 bp, Homo sapiens
  SIMILAR (402)..(76): 691254mologous to Mus musculus Pro-Pol-dUTPase polyprotein,accession number Y12713,Smith-Waterman Score=375.
ttatttaggaagctgcattaactccttacgtccacttagggaacacacatcaaatgcctctgctacattaagttctccattgtggagtagtagactggtttcatctcggtagtcggggtcagttaccccagcaaacactgtaactcccttcttagcctgttgacttagaggtaggaggagcccagagtggccaggtagcaatcttaacttccagtttaatggaattgttgttgtgtctcgtggtggcagcattcctccctctggaattaagacctctaggccagcagaacgtaatgtcatgggaacaggaagcaaaaattcttctagtaggttactaggggtgatggtgagtggtgccacttccacttccaccacttgattcctggacctgtgaatcctggcttcgatcacacatcctgactggggaatctgaaaatccagatcacaagaggatttaaccttacaccagtgatttgccagagggtcctgggccttgggccacagactgaaggctgcattgtcggcttccctacttttgaggttttggaactcggactggcttccttgctcctcagcttgcagatggcccat

SEQ ID NO: 19161 - DNA, 4325 bp, Homo sapiens
  SIMILAR (786)..(2165): 951254mologous to Homo sapiens protocadherin,accession number AJ276803,Smith-Waterman Score=2199.
atggctgaaaggggccaacataaagcttgggctgtggcttcagagggtggaagccccaagctttggcagtttccatgtggtgttgagcctgcaggtgcacagaagtctagaattgaggtttgggaacctccttctagatttcagaagatgtacggaaatgcctggatgcccaggaagaagtttgctgcaggggtggtgccctcatggagaacctctgctagggcagtgcagaaggcaaatgtggggttggagccccaacacacagtccctactggggtaccgcctagtggagctgtgagaagaggaccaccgtcctccagaccccagaatggcagatccactgacagcttgcactgtgaacctggaaaagccacagacactcaatgccagcccgtgaaagcagccaggaagaaggctgtaccctgcaaagccacaggggtggagctgcccaaggctttgggaacccacctcttgcatcagcaccttgcacttctccttgctgctgccatgtgaagaaggatgtgtttgcttcctcttctgccatgattgtgcatgtaggctggcaacagatcagtatctccctgggatggagcttccagaggaaggatctggctgttatctttgctgtttcatggccttcactggtgatactttcaggatttttaaacttgacctgctttcatttgaacacctgcaagcatgcgttactaaactatctctataagtatggacgaattttgaatagtcacagtgattataaacaaaagaagaaaacagtgagaatcagtcagagagaaagtgttgtgcgggttaatacaacaaactgtcacaagtgtttgttgtccgggacgtacattttcgcggtcctgctagtatgcgtggtgttccactctggcgcccaggagaaaaactacaccatccgagaagaaattccagaaaacgtcctgataggcaacttgttgaaagaccttaacttgtcgctgattccaaacaagtccttgacaactactatgcagttcaagctagtgtacaagaccggagatgtgccactgattcgaattgaagaggatactggtgagatcttcactaccggcgctcgcattgatcgtgagaaattatgtgctggtatcccaagggatgagcattgcttttatgaagtggaggttgccattttgccggatgaaatatttagactggttaagatacgttttctgatagaagatataaatgataatgcaccattgttcccagcaacagttatcaacatatcaattccagagaactcggctataaactctaaatatactctcccagcggctgttgatcctgacgtaggcataaacggagttcaaaactacgaactaattaagagtcaaaacatttttggcctcgatgtcattgaaacaccaggaggagacaagatgccacaactgattgttcaaaaggagttagatagggaagagaaggatacctacgtgatgaaagtaaaggttgaagatggtggctttcctcaaagatccagtactgctattttgcaagtgagtgttactgatacaaatgacaaccacccagtctttaaggagacagagattgaagtcagtataccagaaaatgctcctgtaggcacttcagtgacacagctccatgccacagatgctgacataggtgaaaatgccaagatccacttctctttcagcaatctagtctccaacattgccaggagattatttcacctcaatgccaccactggacttatcacaatcaaagaaccactggatagggaagaaacaccaaaccacaagttactggttttggcaagtgatggtggattgatgccagcaagagcaatggtgctggtaaatgttacagatgtcaatgataatgtcccatccattgacataagatacatcgtcaatcctgtcaatgacacagttgttctttcagaaaatattccactcaacaccaaaattgctctcataactgtgacggataaggatgcggaccataatggcagggtgacatgcttcacagatcatgaaatccctttcagattaaggccagtattcagtaatcagttcctcctgggggacttgcagcatatcttggacttatggaggtccacaaaaggaatatgccattaaattactgggctggcagatgctggggcaaacctcctttgaatcagtcagcaatgctcttcatcaaagtgaaagatgaaaatgacaatgctccagttttcacccagtctttcgtaactgtttctattcctgagaataactctcctggcatccagttgacgaaagtaagtgcaatggatgcagacagtgggcctaatgctaagatcaattacctgctaggccctgatgctccacctgaattcagcctggattgtcgtacaggcatgctgactgtagtgaagaaactagatagagaaaaagaggataaatatttattcacaattctggcaaaagataacggggtaccacccttaaccagcaatgtcacagtctttgtaagcattattgatcagaatgacaatagcccagttttcactcacaatgaatacaacttctatgtcccagaaaaccttccaaggcatggtacagtaggactaatcactgtaactgatcctgattatggagacaattctgcagttacgctctccattttagatgagaatgatgacttcaccattgattcacaaactggtgtcatccgaccaaatatttcatttgatagagaaaaacaagaatcttacactttctatgtaaaggctgaggatggtggtagagtatcacgttcttcaagtgccaaagtaaccataaatgtggttgatgtcaatgacaacaaaccagttttcattgtccctccttccaactgttcttatgaattggttctaccgtccactaatccaggcacagtggtctttcaggtaattgctgttgacaatgacactggcatgaatgcagaggttcgttacagcattgtaggaggaaacacaagagatctgtttgcaatcgaccaagaaacaggcaacataacattgatggagaaatgtgatgttacagaccttggtttacacagagtgttggtcaaagctaatgacttaggacagcctgattctctcttcagtgttgtaattgtcaatctgttcgtgaatgagtcggtgaccaatgctacacctgattaatgaactggtgccgcaaaagcatttgaagcaccagtgaccccaaatacttgagatagctgatgtatcctcaccaactagtgactatgtcaagatcctggttgcagctgttgctggcaccataactgtcgttgtagttattttcatcactgctgtagtaagatgtcgccaggcaccacaccttaaggctgctcagaaaaacatgcagaattctgaatgggctaccccaaacccagaaaacaggcagatgataatgatgaagaaaaagaaaaagaagaagaagcattcccctaagaacctgctgcttaatgttgtcactattgaagaaactaaggcagatgatgttgacagtgatggaaacagagtcacactagaccttcctattgatctagaagagcaaacaatgggaaagtacaattgggtaactacacctactactttcaagcctgacagccctgatttggcccgacactacaaatctgcctctccacagcctgccttccaaattcagcctgaaactcccctgaatttgaagcaccacatcatccaagaactgcctctcgataacacctttgtggcctgtgactctatctccaattgttcctcaagcagttcagatccctacagcgtttctgactgtggctatccagtgacaaccttcgaggtacctgtgtccgtacacaccagaccgcctgttgacttagaggtaggaggagcccagagtggccaggtagcaatcttaacttccagtttaatggaattgttgttgtgtctcatggtggcagcattcctccctctggagttaagacctctaggccagcagaacgtaatgtcatgggaacaggaagcaaaaattcttctagtaggttactggggtgatggtgagtggtgccacttccacttccaccacttgattcctggacctgtgaatcctggctatgagaggaagcagtaccatatattggacagtgattcagaggatacacagccttctggagaactttgccccatccctgtaaggccattcacaattctatcaatccagctgcttcaggatgatggggaacactgtggaactaaacaaggctttcaacctgctgtacaattaggtttgctccctcataaaacactgaaatga

SEQ ID NO: 19162 - DNA, 723 bp, Homo sapiens
  SIMILAR (516)..(635): 701254mologous to Drosophila acanthoptera ribosomal protein 49,accession number U66458,Smith-Waterman Score=145.
ccttccgctctcttcctcggcgctgcctaccgaggtggcagccatcttcctttctcgggcatcatggcccgcccttcagacccccttgtgaagccccaaagatcgtcaaaaaagagaacccaagaaagttcatccgggcacccagtcagaccggatatgtcaaaattaagcgttaactgggcggaaaaccccagaggccattgacaacaagggttcgttagaagattccaagggccagatcttgatgccccaacattggttatggaagcaacaaaaaaaacaaagcacatgcatgcccagtggcttccggaagttcctggttcaacaacgtcaaggagccggaaattgctgcggatgttgcaacaaatcttactgtgccgagatcgctcacgatgtttcctccaagaaaccgcaaagccattcgtgggaaaggagcttgcccaattgggcccttcaggagttcacccaaccccattgccagggttgcgcagttgaaagaaaattgagtaaggcagctcatgtgcaacaaatcttactgtgccgagatcgctcacaatgtttcctccaagaaccgcaaagccatcgtggaaagagctgcccaactggccatcagagtcaccaaccccaatgccagggcgcagtgaagaaaatgagtaggcagctcatttgcacgttttctgtttaaataaatgtaaaaactgcaaaaaaaaaaaaaaaaaaaaa

SEQ ID NO: 19163 - DNA, 484 bp, Homo sapiens
  SIMILAR (484)..(266): 901254mologous to Anas platyrhynchos lactate dehydrogenase B- 4/epsilon crystallin,accession number J03869,Smith-Waterman Score= 360.
tttcacactacaatagttaattttatttgttcaagagctcagattgcaagcattaaaccaagcataggctttgattctgtgagcccaaattcacatattgaagaagatcaaagcaaactgtgatccatgtacatggatgaaaactaaaggctcgagttaatcacattgtagtttttaaatttctacagcctatgtcccacagggtatctgcacttttcttgagctgagcaacctcatcatcctttagcttctggttgataacgctggttaatccaatagcccagttggtatatccttttagcttgatgacttcataggcactttcaaccaccatcttatgcacttccttccaattttcactatcattggcagttcccatttctggattcaattcctggagagaaacacctgccacattcacaccactccacacagccacacttgagtcgccatgttcccccaaaatccatccatggcagctgct

SEQ ID NO: 19164 - DNA, 927 bp, Homo sapiens
  SIMILAR (1)..(540): 1001254mologous to Methylomonas aminofaciens transposase,accession number AB026428,Smith-Waterman Score=959.
atgtgcgaactcgatattttacacgactctctttaccaattctgccccgaattacacttaaaacgactcaacagcttaacgttggcttgccacgcattacttgactgtaaaactctcactcttaccgaacttggccgtaacctgccaaccaaagcgagaacaaaacataacatcaaacgaatcgaccgattgttaggtaatcgtcacctccacaaagagcgactcgctgtataccgttggcatgctagctttatctgttcgggcaatacgatgcccattgtacttgttgactggtctgatattcgtgagcaaaaacgacttatggtattgcgagcttcagtcgcactacacggtcgttctgttactctttatgagaaagcgttcccgctttcagagcaatgttcaaagaaagctcatgaccaatttctagccgaccttgcgagcattctaccgagtaacaccacaccgctcattgtcagtgatgctggctttaaagtgccatggtataaatccgttgagaaactgggttggtactggttaattcaagccgaaaaaatcagcgctcgacacggactcattgtcaccacccgtcacctaaaatctactcagcgttcggcaaaggagccatgggttctagcaactaacttacctgttgaaattcgaacacccaaacaacttgttaatatctattcgaagcgaatgcagattgaagaaaccttccgagacttgaaaagtcctgcctacggactaggcctacgccatagccgaacgagcagctcagagcgttttgatatcatgctgctaatcgccctgatgcttcaactaacatgttggcttgcggcgttcatgctcagaaacaaggttgggacaagcacttccaggctaacacagtcagaaatcgaaacgtactctcaacagttcgcttag

SEQ ID NO: 19165 - DNA, 1611 bp, Homo sapiens; identical to SEQ ID NO: 2241
  SIMILAR (475)..(1608): 1001254mologous to Methylomonas aminofaciens transposase,accession number AB026428,Smith-Waterman Score=1980.

SEQ ID NO: 19166 - DNA, 222 bp, Homo sapiens
  SIMILAR (195)..(94): 281254mologous to Trypanosoma brucei membrane-bound acid phosphatase 1,accession number AJ303100,Smith-Waterman Score=56.
cacactacaatagttaattttatttgttcaagagctcagattgcaagcattaaaccaagcataggctttgattctgtgagcccaaattcacatattgaagaagatcaaagcaaactgtgatccatgtacatggatgaaaactacaatgtgattaactcgagcctttagttttcatccatgtacatggatcacagtctgctttgatcttcttcaatatgtgag

SEQ ID NO: 19167 - DNA, 1174 bp, Homo sapiens
  SIMILAR (1)..(1032): 991254mologous to Methylomonas aminofaciens transposase,accession number AB026428,Smith-Waterman Score=1806.
atgtgcgaactcgatattttacacgactctctttaccaattctgccccgaattacacttaaaacgactcaacagcttaacgttggcttgccacgcattacttgactgtaaaactctcactcttaccgaacttggccgtaacctgccaaccaaagcgagaacaaaacataacatcaaacgaatcgaccgattgttaggtaatcgtcacctccacaaagagcgactcgctgtataccgttggcatgctagctttatctgttcgggcaatacgatgcccattgtacttgttgactggtctgatattcgtgagcaaaaacggcttatggtattgcgagcttcagtcgcactacacggtcgttctgttactctttatgagaaagcgttcccgctttcagagcaatgttcaaagaaagctcatgaccaatttctagccgaccttgcgagcattctaccgagtaacaccacaccgctcattgtcagtgatgctggctttaaagtgccatggtataaatccgttgagaagctgggttggtactggttaagtcgagtaagaggaaaagtacaatatgcagacctaggagcggaaaactggaaacctatcagcaacttacatgatatgtcatctagtcactcaaagactttaggctataagaggctgactaaaagcaatccaatctcatgccaaattctattgtataaatctcgctctaaaggccgaaaaaatcagcgctcgacacggactcattgtcaccacccgtcacctaaaatctactcagcgtcggcaaaggagccatgggttctagcaactaacttacctgttgaaattcgaacacccaaacaacttgttaatatctattcgaagcgaatgcagattgaagaaaccttccgagacttgaaaagtcctgcctacggactaggcctacgccatagccgaacgagcagctcagagcgttttgatatcatgctgctaatcgccctgatgcttcaactaacatgttggcttgcgggcgttcatgctcagaaacaagcgtttccagattgcgattcatccgctgttcatcgccttcggtattgcaaaggacgagactataaccgcgttcgaagcagctgcgttcaacgccacgcaccagttctgaatagaaagattggtactggcagtgatcaacatgccaatg

SEQ ID NO: 19168 - DNA, 2415 bp, Homo sapiens
  SIMILAR (948)..(4): 981254mologous to Escherichia coli, LBB84, plasmid pXT107, IS10L/R-1, Peptide PlasmidTransposonInsertionMutant, 402 aa transposase,accession number S67119,Smith-Waterman Score=1604.
tcataatttccccaaagcgtaaccatgtgtgaataaattttgagctagtagggttgcagccacgagtaagtcttcccttgttattgtgtagccagaatgccgcaaaacttccatgcctaagcgaactgttgagagtacgtttcgatttctgactgtgttagcctggaagtgcttgtcccaaccttgtttctgagcatgaacgcccgcaagccaacatgttagttgaagcatcagggcgattagcagcatgatatcaaaacgctctgagctgctcgttcggctatggcgtaggcctagtccgtaggcaggacttttcaagtctcggaaggtttcttcaatctgcattcgcttcgaatagatattaacaagttgtttgggtgttcgaatttcaacaggtaagttagttgctagaatccatggctcctttgccgacgctgagtagattttaggtgacgggtggtgacaatgagtccgtgtcgagcgctgattttttcggcctttagagcgagatttatacaatagaatttggcatgagattggattgcttttagtcagcctcttatagcctaaagtctttgagtgactagatgacatatcatgtaagttgctgataggtttccagttttccgctcctaggtctgcatattgtacttttcctcttactcgacttaaccagtaccaacccagcttctcaacggatttataccatggcactttaaagccagcatcactgacaatgagcggtgtggtgttactcggtagaatgctcgcaaggtcggctagaaattggtcatgagctttctttgaacattgctctgaaagcgggaacgctttctcataaagagtaccagaacgaccgtgtagtgcgactgaagctcgcaataccataagccggttttgctcacggatatcaaaacagtccaccagttccatgggcatcgtattgccccaaccgaataagcacccttccatgtcatctttctgtggttttaaatgacattctctgggtttccagaaagataatttacatttctccagagacacattgagcaccagttttcctgtagaggtgcagatggagctacatttgaattggctggtgaagacggtaggagagaaaagcatggggcacagatggaagcgattggcccgggggattgaaaactccccaaaaactgctcggagaaatttcagagcgtggagcaccgcggctcggaccgtaccgtgaacgcgagccagccgcgagctccctgccccaacatcccacccactcccgtgcctttgctggccctttgtcccaggctctggaaaagtaagttgggccactaaccggctgggcagcatggctttcttccccctaggagctgaccggccgcggactccgagggaggacattggcttttgtttcaaaaccgagcccagctgctgactaagggctgcattagcccagcctcctcctccctgggcggctgcacgtgctggctggctcctccactctgggttaccttcctccgcgacttggcgggaggggtccccccagggggcgtagggacgcaccgcgtggggtcgggtgctttggaacgccaaagtgtatttacgttgtgggccgtcgcgtaacacgaggacaatatgctgccagctggagttgcttgcgctatccgggtcgtgctcgcgtcttccgggtccctgtagctcacactctgtgcttaacgcgtctgtgacattctctctctgctcgtgtgatcctttcgccacaaagcgcatccaatctctgaccactccaattaccataaccaccctctgcttcccatgaacttgcgccaacgcggatccttgaggccccgtggtgaagacaatctgggctggacgtgccacactggggtcttctgaaagtaggcgcagcatctgcagctcctcatgcccggccacgggtccagcggttacggggtcaagggccaaagcggcaaatgctatacgtggcataacggtgtaagcggcaaatgccgccacgaaggcagcaccaaacaccatatagccggtaaaacggcgtagtggtcgatcgcggtagaagcgcaatggggccgtaaggcgagcgaacgggagacggggtggaccgggcgttgcgcacagtacagccgaactaggtgcgatgaaccgcgttacgcgagcgcaggagaggtaaaccgcgcctaaagagagtgaatgaacgcgggacgaactgtccggtctaatagcgctccccacatcctcgcgttctactcggcgcgcgagtggttccgacgttttcatgcccggcatttcactgtctcctagatatacgtcggcgttaagcggcgatcctgtcacggtatccatcttagaagagcttgaagatttggtgagaggcacggaagcttcatgcttctccatccccat

SEQ ID NO: 19169 - DNA, 1295 bp, Homo sapiens
  SIMILAR (1295)..(225): 1001254mologous to Methylomonas aminofaciens transposase,accession number AB026428,Smith-Waterman Score=1893.
cttttctttttcctccttcgtgcagctgggtcttcatcctcattgtactcccttggcatcctagaagagacgagaaattcactgatagcaaaatattgccacagccccagaaaccccaagaagtctccttgaggatttttagaaagacctagaatactgatcaaagtaacactttcaatcaagcagaaatccacatcaatatttgtaggtgggcagttctcaaagtttcgatttctgactgtgttagcctggaagtgcttgtcccaaccttgtttctgagcatgaacgcccgcaagccaacatgttagttgaagcatcagggcgattagcagcatgatatcaaaacgctctgagctgctcgttcggctatggcgtaggcctagtccgtaggcaggacttttcaagtctcggaaggtttcttcaatctgcattcgcttcgaatagatattaacaagttgtttgggtgttcgaatttcaacaggtaagttagttgctagaacccatggctcctttgccgacgctgagtagattttaggtgacgggtggtgacaatgagtccgtgtcgagcgctgattttttcggcctttagagcgagatttatacaatagaatttggcatgagattggattgcttttagtcagcctcttatagcctaaagtctttgagtgactagatgacatatcatgtaagttgctgataggtttccagttttccgctcctaggtctgcatattgtacttttcctcttactcgacttaaccagtaccaacccagcttctcaacggatttataccatggcactttaaagccagcatcactgacaatgagcggtgtggtgttactcggtagaatgctcgcaaggtcggctagaaattggtcatgagctttctttgaacattgctctgaaagcgggaacgctttctcataaagagtaacagaacgaccgtgtagtgcgactgaagctcgcaataccataagtcgtttttgctcacgaatatcagaccagtcaacaagtacaatgggcatcgtattgcccgaacagataaagctagcatgccaacggtatacagcgagtcgctctttgtggaggtgacgattacctaacaatcggtcgattcgtttgatgttatgttttgttctcgctttggttggcaggttacggccaagttcggtaagagtgagagttttacagtcaagtaatgcgtggcaagccaacgttaagctgttgagtcgttttaagtgtaattcggggcagaattggtaaagagagtcgtgtaaaatatcgagttcgcacat

SEQ ID NO: 19170 - DNA, 1435 bp, Homo sapiens
  SIMILAR (1435)..(233): 991254mologous to Methylomonas aminofaciens transposase,accession number AB026428,Smith-Waterman Score=2080.
catgacgtttaaaatagacagtatccaggttggtgcctacggtcatgctggctttcgcgtccggcttccatttatcgtcggacagatagcgcagcacgttctccatgaagttcttcatgtcatccgggtcgctgttgagcgtacactgcccatctttattaacgcccccgttccagctgtaaccgttcgggcaacgcaaaatgctgttgtagtgtgggttaccgataaccatcagtttgccctcaccgacatgtgtgaataaattttgagctagtagggttgcagccacgagtaagtcttcccttgttattgtgtagccagaatgccgcaaaacttccatgcctaagcgaactgttgagagtacgtttcgatttctgactgtgttagcctggaagtgcttgtcccaaccttgtttctgagcatgaacgcccgcaagccaacatgttagttgaagcatcagggcgattagcagcatgatatcaaaacgctctgagctgctcgttcggctatggcgtaggcctagtccgtaggcaggacttttcaagtctcggaaggtttcttcaatctgcattcgcttcgaatagatattaacaagttgtttgggtgttcgaatttcaacaggtaagttagttgctagaacccatggctcctttgccgacgctgagtagattttaggtgacgggtggtgacaatgagtccgtgtcgagcgctgattttttcggcctttagagcgagatttatacaatagaatttggcatgagattggattgcttttagtcagcctcttatagcctaaagtctttgagtgactagatgacatatcatgtaagttgctgataggtttccagttttccgctcctaggtctgcatattgtacttttcctcttactcgacttaaccagtaccaacccagcttctcaacggatttataccatggcactttaaagccagcatcactgacaatgagcggtgtggtgttactcggtagaatgctcgcaaggtcggctagaaattggtcatgagctttctttgaacattgctctgaaagcgggaacgctttctcataaagagtaacagaacgaccgtgtagtgcgactgaagctcgcaataccataagtcgtttttgctcacgaatatcagaccagtcaacaagtacaatgggcatcgtattgcccgaacagataaagctagcatgccaacggtatacagcgagtcgctctttgtggaggtgacgattacctaacaatcggtcgattcgtttgatgttatgttttgttctcgctttggttggcaggttacggccaagttcggtaagagtgagagttttacagtcaagtaatgcgtggcaagccaacgttaagctgttgagtcgttttaagtgtaattcggggcagaattggtaaagagagtcgtgtaaaatatcgagttcgcacat

SEQ ID NO: 19171 - DNA, 1177 bp, Homo sapiens
  SIMILAR (1)..(1026): 1001254mologous to Escherichia coli, LBB84, plasmid pXT107, IS10L/R-1, Peptide PlasmidTransposonInsertionMutant, 402 aa transposase,accession number S67119,Smith-Waterman Score=1805.
atgtgcgaactcgatattttacacgactctctttaccaattctgccccgaattacacttaaaacgactcaacagcttaacgttggcttgccacgccttacttgactgtaaaactctcactcttaccgaacttggccgtaacctgccaaccaaagcgagaacaaaacataacatcaaacgaatcgaccgattgttaggtaatcgtcacctccacaaagagcgactcgctgtataccgttggcatgctagctttatctgttcgggcaatacgatgcccattgtacttgttgactggtctgatatccgtgagcaaaaacggcttatggtattgcgagcttcagtcgcactacacggtcgttctgttactctttatgagaaagcgttcccgctttcagagcaatgttcaaagaaagctcatgaccaatttctagccgaccttgcgagcattctaccgagtaacaccacaccgctcattgtcagtgatgctggctttaaagtgccatggtataaatccgttgagaagctgggttggtactggttaagtcgagtaagaggaaaagtacaatatgcagacctaggagcggaaaactggaaacctatcagcaacttacatgatatgtcatctagtcactcaaagactttaggctataagaggctgactaaaagcaatccaatctcatgccaaattctattgtataaatctcgctctaaaggccgaaaaaatcagcgctcgacacggactcattgtcaccacccgtcacctaaaatctactcagcgtcggcaaaggagccatggattctagcaactaacttacctgttgaaattcgaacacccaaacaacttgttaatatctattcgaagcgaatgcagattgaagaaaccttccgagacttgaaaagtcctgcctacggactaggcctacgccatagccgaacgagcagctcagagcgttttgatatcatgctgctaatcgccctgatgcttcaactaacatgttggcttgcgggcgttcatgctcagaaacaagagcgcaccgggccgatcgggcgagtggccatggcgggcgccgagaactggccgggccagcagctggagctggacgaggacgaggcgtcttgttgccgctggggcgcgcagcacgccggggcccgcgagctggctgcgctctactcgccag

SEQ ID NO: 19172 - DNA, 456 bp, Homo sapiens
  SIMILAR (160)..(390): 941254mologous to Escherichia coli valyl tRNA synthetase,accession number J03497,Smith-Waterman Score=347.
ggtacgtaacgcgcgtctaggaagaacttcggccggggcaaaacgctggaagctgatactgcgtggatccagcgcggtatgcagagcggtggtgttaatgagaacgcggtggcttccggcaaagcgcgggggcgtcaggaaaagaatcaccgtgcatgcctgccggataacaaaggtccggtttccggtccgaagatcatcgacggtgcagagcttctgatcccgatggctggcctcatcaacaaagaagatgagctggcgcgtctggcgaaagaagtggcgaagattgaaggtgaaatcagccgtatcgagaacaaactggcgaacgaaggctttgtcgcccgcgcaccggaagcggtcatcgcgaaagagcgtgagaagctggaaggcttgtttctgagcatgaacgcccgcaagccaacatgttagttgaagcatcagggcgattagcagcat

SEQ ID NO: 19173 - DNA, 903 bp, Homo sapiens; identical to SEQ ID NO: 17825
  SIMILAR (451)..(900): 961254mologous to Escherichia coli, LBB84, plasmid pXT107, IS10L/R-1, Peptide PlasmidTransposonInsertionMutant, 402 aa transposase,accession number S67119,Smith-Waterman Score=740.

SEQ ID NO: 19174 - DNA, 1218 bp, Homo sapiens
  SIMILAR (1218)..(148): 1001254mologous to Methylomonas aminofaciens transposase,accession number AB026428,Smith-Waterman Score=1893.
attctcatctccaaaatggtgcagggttgccatgaggattgtgttccggaagtccttctttgcttgcttggggtgtggatgtaggaagggtcctactggcatgagtgagtggtccactactgctacccaggccaggcaaggacttccgtttcgatttctgactgtgttagcctggaagtgcttgtcccaaccttgtttctgagcatgaacgcccgcaagccaacatgttagttgaagcatcagggcgattagcagcatgatatcaaaacgctctgagctgctcgttcggctatggcgtaggcctagtccgtaggcaggacttttcaagtctcggaaggtttcttcaatctgcattcgcttcgaatagatattaacaagttgtttgggtgttcgaatttcaacaggtaagttagttgctagaacccatggctcctttgccgacgctgagtagattttaggtgacgggtggtgacaatgagtccgtgtcgagcgctgattttttcggcctttagagcgagatttatacaatagaatttggcatgagattggattgcttttagtcagcctcttatagcctaaagtctttgagtgactagatgacatatcatgtaagttgctgataggtttccagttttccgctcctaggtctgcatattgtacttttcctcttactcgacttaaccagtaccaacccagcttctcaacggatttataccatggcactttaaagccagcatcactgacaatgagcggtgtggtgttactcggtagaatgctcgcaaggtcggctagaaattggtcatgagctttctttgaacattgctctgaaagcgggaacgctttctcataaagagtaacagaacgaccgtgtagtgcgactgaagctcgcaataccataagtcgtttttgctcacgaatatcagaccagtcaacaagtacaatgggcatcgtattgcccgaacagataaagctagcatgccaacggtatacagcgagtcgctctttgtggaggtgacgattacctaacaatcggtcgattcgtttgatgttatgttttgttctcgctttggttggcaggttacggccaagttcggtaagagtgagagttttacagtcaagtaatgcgtggcaagccaacgttaagctgttgagtcgttttaagtgtaattcggggcagaattggtaaagagagtcgtgtaaaatatcgagttcgcacat

SEQ ID NO: 19175 - DNA, 2217 bp, Homo sapiens
  SIMILAR (1162)..(2214): 991254mologous to Methylomonas aminofaciens transposase,accession number AB026428,Smith-Waterman Score=1834.
atgtggggtattggttcgaggacccccatctataacaaaatccttgtatactcaagtcctgaggtcagctgtgagaaacccaagtatgtgaaaagtcagacctctacacacacaggttttgaatcccacaaacgctatattttttatctgcgtttggttggaaaaaatctgcatgtcagtgccatgggcttggggaagagccaggagagaaggaagaaggctttgaagagccagccccagcagcctgctgacagttttccttctctccccactgtggaaggactgactaccagtggagaggtggcagcaggcttttggctaagtggagaggctctctcttcctgtgtagtttgtggagaggcagcgttgactcaagtctctgcccatagaatggctttcctcaagtcctatgtggcagatgacatcaagggtgaggggaaggagagtctggttgggccctggctgaggagaaaagctcttttttcatttgctgctgagcaccagagccagtccctgattgggggcttgagcttgcttcctgtcatcagttacagaatattagatagtgtgcaactttggggcttggctgtggggaatgccaagaatagttacaagataagcagtggatttaaaaacagagtgtattttgcactgtctgatgagtacattgtgtctccgaagttgagattccacatagtgagccttggaaaacaactgctgctctgcgaccctggcatgtggagagggccaaatgtgaactgtgttgacagcactggctacacacccctgcaccatgctgctttgaatggccataaggatgtggtcgaggttcttctgaggaacgatgcgctgaccaacgtggctgactcaaaaggctgctaccctctgcatttggcagcctggaaaggagatgcccagatagtgcggttgctcatccatcaagggccttcacacaccagagtcaatgaacagaatgctcttgagatcaaagaactcaaaaagtacggcccctttgacccttatatcaatgccaagggtcctcctcatcatgctgactgttgtctgcttcagtccatctgcttttggcttgtctgggaatgggaaaatgcagctgcagtgggttttggctttatttttaaaacccatactaatttgggaaatgcgagaccaaaacataacatcaaacgaatcgaccgattgttaggtaatcgtcacctccacaaagagcgactcgctgtataccgttggcatgctagctttatctgttcgggcaatacgatgcccattgtacttgttgactggtctgatattcgtgagcaaaaacgacttatggtattgcgagcttcagtcgcactacacggtcgttctgttactctttatgagaaagcgttcccgctttcagagcaatgttcaaagaaagctcatgaccaatttctagccgaccttgcgagcattctaccgagtaacaccacaccgctcattgtcagtgatgctggctttaaagtgccatggtataaatccgttgagaagctgggttggtactggttaagtcgagtaagaggaaaagtacaatatgcagacctaggagcggaaaactggaaacctatcagcaacttacatgatatgtcatctagtcactcaaagactttaggctataagaggctgactaaaagcaatccaatctcatgccaaattctattgtataaatctcgctctaaaggccgaaaaaatcagcgctcgacacggactcattgtcaccacccgtcacctaaaatctactcagcgtcggcaaaggagccatgggttctagcaactaacttacctgttgaaattcgaacacccaaacaacttgttaatatctattcgaagcgaatgcagattgaagaaaccttccgagacttgaaaagtcctgcctacggactaggcctacgccatagccgaacgagcagctcagagcgttttgatatcatgctgctaatcgccctgatgcttcaactaacatgttggcttgcgggcgttcatgctcagaaacaaggttgggacaagcacttccaggctaacacagtcagaaatcgaaacgtactctcaacagttcgcttaggcatggaagttttgcggcattctggctacacaataacaagggaagacttactcgtggctgcaaccctactagctcaaaatttattcacacatggttacgctttggggaaattatga

SEQ ID NO: 19176 - DNA, 867 bp, Homo sapiens
  SIMILAR (574)..(864): 761254mologous to Danio rerio lactate dehydrogenase B4,accession number AF067202,Smith-Waterman Score=393.
atggaggtggatatcagacctcaaagcagttctggaacagatgcaggttcccaccttcccaccccagggcagctgagcagacccagagcctgggtaaacaagaaaggcttatcagtggaaaagaaatttttagaaattcctggaaaagataaagaggatagaatggagttgctgggaaaaccaatcacagctgagacctattacccagattcactcaaaagaagtaatggaagcgataatggaagtttaaaaataacgaagcagaacctggcaagggccgtaccaggtgttgtgcaaacaaaggactatgtgaacatttttaattctctggctgatgaacttgctcttgtggatgttttggaagataagcttaaaggagaaatgatggatctgcagcatgggagcttatttcttcagacacctaaaattgtggcagataaagattattctgtgactgccaattctaagattgtagtggtaactgcaggagtccgtcagcaagaaggggagagtcggctcaatctggtgcagagaaatgttaatgtcttcaaattcattattcctcagatcgtcaatgcctatgaagtcatcaagctaaaaggatataccaactgggctattggattaagtgtggctgatcttattgaatccatgttgaaaaatctatccaggattcatcccgtgtcaacaatggtaaaggggatgtatggcattgagaatgaagtcttcctgagccttccatgtatcctcaatgcccggggattaaccagcgttatcaaccagaagctaaaggatgatgaggttgctcagctcaagaaaagtgcagataccctgtgggacatccagaaggacctaaaagacctgtga

SEQ ID NO: 19177 - DNA, 1210 bp, Homo sapiens
  SIMILAR (1210)..(182): 1001254mologous to Methylomonas aminofaciens transposase,accession number AB026428,Smith-Waterman Score=1811.
ctggaaacctgaaaccgaaggtcgtatccgaaagcgcaacaacactctgctgcgtgtaccgaagactgtttctctctcgggtatctagcacccgcgcggtaccttccagccccgtggtgaagacctgcagaaagtggctagaggagcccatgagttgacaaggcagcacgattcgcacagtgccttgtttctgagcatgaacgcccgcaagccaacatgttagttgaagcatcagggcgattagcagcatgatatcaaaacgctctgagctgctcgttcggctatggcgtaggcctagtccgtaggcaggacttttcaagtctcggaaggtttcttcaatctgcattcgcttcgaatagatattaacaagttgtttgggtgttcgaatttcaacaggtaagttagttgctagaacccatggctcctttgccgacgctgagtagattttaggtgacgggtggtgacaatgagtccgtgtcgagcgctgattttttcggcctttagagcgagatttatacaatagaatttggcatgagattggattgcttttagtcagcctcttatagcctaaagtctttgagtgactagatgacatatcatgtaagttgctgataggtttccagttttccgctcctaggtctgcatattgtacttttcctcttactcgacttaaccagtaccaacccagcttctcaacggatttataccatggcactttaaagccagcatcactgacaatgagcggtgtggtgttactcggtagaatgctcgcaaggtcggctagaaattggtcatgagctttctttgaacattgctctgaaagcgggaacgctttctcataaagagtaacagaacgaccgtgtagtgcgactgaagctcgcaataccataagtcgtttttgctcacgaatatcagaccagtcaacaagtacaatgggcatcgtattgcccgaacagataaagctagcatgccaacggtatacagcgagtcgctctttgtggaggtgacgattacctaacaatcggtcgattcgtttgatgttatgttttgttctcgctttggttggcaggttacggccaagttcggtaagagtgagagttttacagtcaagtaatgcgtggcaagccaacgttaagctgttgagtcgttttaagtgtaattcggggcagaattggtaaagagagtcgtgtaaaatatcgagttcgcacat

SEQ ID NO: 19178 - DNA, 1089 bp, Homo sapiens
  SIMILAR (1)..(801): 1001254mologous to Tn10 delivery vector pHV1248 transposase,accession number AF307747,Smith-Waterman Score=1406.
atgcccattgtacttgttgactggtctgatattcgtgagcaaaaacgacttatggtattgcgagcttcagtcgcactacacggtcgttctgttactctttatgagaaagcgttcccgctttcagagcaatgttcaaagaaagctcatgaccaatttctagccgaccttgcgagcattctaccgagtaacaccacaccgctcattgtcagtgatgctggctttaaagtgccatggtataaatccgttgagaagctgggttggtactggttaagtcgagtaagaggaaaagtacaatatgcagacctaggagcggaaaactggaaacctatcagcaacttacatgatatgtcatctagtcactcaaagactttaggctataagaggctgactaaaagcaatccaatctcatgccaaattctattgtataaatctcgctctaaaggccgaaaaaatcagcgctcgacacggactcattgtcaccacccgtcacctaaaatctactcagcgtcggcaaaggagccatgggttctagcaactaacttacctgttgaaattcgaacacccaaacaacttgttaatatctattcgaagcgaatgcagattgaagaaaccttccgagacttgaaaagtcctgcctacggactaggcctacgccatagccgaacgagcagctcagagcgttttgatatcatgctgctaatcgccctgatgcttcaactaacatgttggcttgcgggcgttcatgctcagaaacaaggttgggacaagcacttccaggctaacacagtcagaaatcgaaacggaagtcttctgaccaactggccctccgtccctcctaccataaaggaggaggaaaacagtgaggaggaacttgcagcagccaccacatcgaaggaacaggagcccatcggtacagatctggacgcagtgcgaacaccagagcccttggaggaattcccgaagcgtgaggaccaggaaggctccccaccagaaacgagcctgccttacaagtgggtggtggaggcagctaacctcctcatccctgctgtgggttctagcctctctgaagccctggacttgatcgagtcg

SEQ ID NO: 19179 - DNA, 552 bp, Homo sapiens
  SIMILAR (304)..(549): 971254mologous to Plasmid R100 transposase of Tn10,accession number AP000342,Smith-Waterman Score=405.
atgggagtgaatgacttgtggcaaattttggagcctgttaagcaacacatccccttgcgtaatcttggtgggaaaaccattgcagttgatctgagtctctgggtgtgtgaggcacacccagtcaaaaaaatgatgggcagcgtcatgaagaaacacctcagggattttgccgatttcggaaccaccatcaaacaggattttcgcctgctggggcaaaccagcgtggaccgcttgctgcaactctctcagggccaggcggcctaccccatacccgacgaccaggttcagagcgttttgatatccatgctgctaatcgccctgatgcttcacctaacatgtgggcttgcgggcgttcatgctcagaaacaaggttgggacaagcacttccaggctaacacagtcagaaatcgaaacgtactctcaacagttcgcttaggcatggaagttttgcggcattctggctacacaataacaagggaagactcactcgtggctgcaaccctgcttactcaaaatctattcacacatggttacgttttggggaaattatga

SEQ ID NO: 19180 - DNA, 1200 bp, Homo sapiens
  SIMILAR (1)..(1026): 1001254mologous to Escherichia coli, LBB84, plasmid pXT107, IS10L/R-1, Peptide PlasmidTransposonInsertionMutant, 402 aa transposase,accession number S67119,Smith-Waterman Score=1805.
atgtgcgaactcgatattttacacgactctctttaccaattctgccccgaattacacttaaaacgactcaacagcttaacgttggcttgccacgccttacttgactgtaaaactctcactcttaccgaacttggccgtaacctgccaaccaaagcgagaacaaaacataacatcaaacgaatcgaccgattgttaggtaatcgtcacctccacaaagagcgactcgctgtataccgttggcatgctagctttatctgttcgggcaatacgatgcccattgtacttgttgactggtctgatatccgtgagcaaaaacggcttatggtattgcgagcttcagtcgcactacacggtcgttctgttactctttatgagaaagcgttcccgctttcagagcaatgttcaaagaaagctcatgaccaatttctagccgaccttgcgagcattctaccgagtaacaccacaccgctcattgtcagtgatgctggctttaaagtgccatggtataaatccgttgagaagctgggttggtactggttaagtcgagtaagaggaaaagtacaatatgcagacctaggagcggaaaactggaaacctatcagcaacttacatgatatgtcatctagtcactcaaagactttaggctataagaggctgactaaaagcaatccaatctcatgccaaattctattgtataaatctcgctctaaaggccgaaaaaatcagcgctcgacacggactcattgtcaccacccgtcacctaaaatctactcagcgtcggcaaaggagccatggattctagcaactaacttacctgttgaaattcgaacacccaaacaacttgttaatatctattcgaagcgaatgcagattgaagaaaccttccgagacttgaaaagtcctgcctacggactaggcctacgccatagccgaacgagcagctcagagcgttttgatatcatgctgctaatcgccctgatgcttcaactaacatgttggcttgcgggcgttcatgctcagaaacaagtgccgcaagccaaaggcaacaatgtggttatcacaagctacatgacaaacagaggcttcttcgaggataaaaaggcaacatttgcgccaagcttcttaatgaacatcaaaggcaataaaacatccgttgtcaaaaacagcatcctggagcaaggacagctgacagtcaactaa

SEQ ID NO: 19181 - DNA, 888 bp, Homo sapiens
  SIMILAR (1)..(459): 981254mologous to Methylomonas aminofaciens transposase,accession number AB026428,Smith-Waterman Score=794.
atgtgcgaactcgatattatacacgactctctttaccaattctgccccgaattacacttaaaacgactcaacagcttaacgttggcttgccacgcattacttgactgtaaaactctcactcttaccgaacttggccgtaacctgccaaccaaagcgagaacaaaacataacatcaaacgaatcgaccgattgttaggtaatcgtcacctccacaaagagcgactcgctgtataccgttggcatgctagctttatctgttcgggcaatacgatgcccattgtacttgttgactggtctgatattcgtgagcaaaaacgacttatggtattgcgagcttcagtcgcactacacggtcgttctgttactctttatgagaaagcgttcccgctttcagagcaatgttcaaagaaagctcatgaccaatttctagccgaccttgcgagcattctaccgacgtcggcaaaggagccatgggttctagcaactaacttacctgttgaaattcgaacacccaaacaacttgttaatatctattcgaagcgaatgcagattgaagaaaccttccgagacttgaaaagtcctgcctacggactaggcctacgccatagccgaacgagcagctcagagcgttttgatatcatgctgctaatcgccctgatgcttcaactaacatgttggcttgcgggcgttcatgctcagaaacaaggttgggacaagcacttccaggctaacacagtcagaaatcgaaacgtactctcaacagttcgcttaggcatggaagttttgcggcattctggctacacaataacaagggaagacttactcgtggctgcaaccctactagctcaaaatttattcacacatggttacgctttggggaaattatga

SEQ ID NO: 19182 - DNA, 1527 bp, Homo sapiens
  SIMILAR (1359)..(904): 991254mologous to Methylomonas aminofaciens transposase,accession number AB026428,Smith-Waterman Score=787.
ttaaaggtggtgtttagagtgaatcacgaacagacgaaacatcggtaatacttttgcgagtaaattcacttccgccgatggcacaaagccaatggttaattgtctttcttcctgaacaattttccgcgcccgtaatttggcattttccgcttgttcgaggattgccagcgcgtcctggagaaaacattctcccgccgccgtcaacgcgactttgcgcttatccctcaccagtaacggaacaccgacacagttttcaagatcgcggatctggctgcttaacgaaggctgtgaggtatgcagtttttccgccgcacgggtaaagttcagtgcctgcgccactgcgacgaaatagcgtaaatgccgtagttccatcaccttccccttgttatcgaaaaaacgtctcagctggtagaaattaacttcaacccggtagctaccgtcataaccagtcgtcagtgtgagttgatgatagcgcaggatctcccgtcctgtttcgctgatatcaagactggcaatatcatcatccacaccattaagctcgctgaaggttgccatggtggcggtcaaccccggctgaaagagcgtcagcaagatctggcagcggcggtttcgatttctgactgtgttagcctggaagtgcttgtcccaaccttgtttctgagcatgaacgcccgcaagccaacatgttagttgaagcatcagggcgattagcagcatgatatcaaaacgctctgagctgctcgttcggctatggcgtaggcctagtccgtaggcaggacttttcaagtctcggaaggtttcttcaatctgcattcgcttcgaatagatattaacaagttgtttgggtgttcgaatttcaacaggtaagttagttgctagaacccatggctcctttgccgacgccagcttctcaacggatttataccatggcactttaaagccagcatcactgacaatgagcggtgtggtgttactcggtagaatgctcgcaaggtcggctagaaattggtcatgagctttctttgaacattgctctgaaagcgggaacgctttctcataaagagtaacagaacgaccgtgtagtgcgactgaagctcgcaataccataagccgtttttgctcacggatatcagaccagtcaacaagtacaatgggcatcgtattgcccgaacagataaagctagcatgccaacggtatacagcgagtcgctctttgtggaggtgacgattacctaacaatcggtcgattcgtttgatgttatgttttgttctcgctttggttggcaggttacggccaagttcggtaagagtgagagttttacagtcaagtaaggcgtggcaagccaacgttaagctgtctttagagcacaggagatgaatcgaaaaaggccggcactttcgccaatattcgcatccgtaatgaatggtgcgtggcgcgcggatggtagccaggaagtcgtaccctgccgttgtcgtatcgacaccgcgacggagttgacctactaccagaacgacggcattttgcat

SEQ ID NO: 19183 - DNA, 1488 bp, Homo sapiens; identical to SEQ ID NO: 5169
  SIMILAR (595)..(996): 971254mologous to Tn10 delivery vector pHV1248 transposase,accession number AF307747,Smith-Waterman Score=683.

SEQ ID NO: 19184 - DNA, 735 bp, Homo sapiens
  SIMILAR (399)..(268): 931254mologous to Arabidopsis thaliana bacterial IS- element,accession number AC068901,Smith-Waterman Score=209.
ttacgcacaaactgacgataaccgacgaaatcttatattgaacggtacgccgctacggcgtgtcaaagtcttagtttttgacatagagtacccctgataaaaagtatatgggtataacagcacactggcttgatccctacaacgtggctctaaaagactccggtcctcacttgtggaaagaacgggcttgtccttgtcgtagcggctcttgcagccgtaggcggagcaggactgcaccatccttccggtcctcaggcacttcacttttttcaagtctcggaaggtttcttcaatctgcattcgcttcgaatagatattaacaagttgtttgggtgttcgaatttcaacaggtaagttagttgctagaacccatggctcctttgccgacgaccagactttgtttttcatgaccttggcagtttcaggagaactatggactccttccccttggagacccaacagtatcagaacttcttgagggaccgagtgccgtctataggcagggaaagccccaagggcttctccggggaagcgcagtctgaagaaacggagcccaggcctggtgagagagagaccacccagggcagggggtgaaagtcccgcttcatcttcctcctccttagagcggtgtgctcgggcggcatcacacccagccagcgcgagtgtgaactcaagtgcacgggcagccttgaccgggctggagctgagtgaggggtcaccctgcagtggcttcat

SEQ ID NO: 19185 - DNA, 879 bp, Homo sapiens
  SIMILAR (1)..(546): 781254mologous to Pseudomonas aeruginosa transposase,accession number AF133697,Smith-Waterman Score=765.
atgtgcgaactcgatattttacacgactctctttaccaattctgccccgaattacacttaaaacgactcaacagcttaacgttggcttgccacgcattacttgactgtaaaactctcactcttaccgaacttggccgtaacctgccaaccaaagcgagaacaaaacataacatcaaacgaatcgaccgattgttaggtaatcgtcacctccacaaagagcgactcgctgtataccgttggcatgctagctttatctgttcgggcaatacgatgcccattgtacttgttgactggtctgatattcgtgagcaaaaacgacttatggtattgcgagcttcagtcgcactacacggtcgttctgttactctttatgagaaagcgttcccgctttcagagcaatgttcaaagaaagctcatgaccaatttctagccgaccttgcgagcattctaccgagtaacaccacaccgctcattgtcagtgatgctggctttaaagtgccatggtataaatccgttgagaagctgggttggtactggttaagtcgacgaatgcagattgaagaaaccttccgagacttgaaaagtcctgcctacggactaggcctacgccatagccgaacgagcagctcagagcgttttgatatcatgctgctaatcgccttgatgcttcaactaacatgttggcttgcgggcgttcatgctcagaaacaaggttgggacaagcacttccaggctaacacagtcagaaatcgaaacaacacggccagccgggctgctctgcagacacccatttggacagccgacggctggaggcgtctggcaggaggagcatgtggtccctggcagccactcgccagccccgctgtcgttgacagctga

SEQ ID NO: 19186 - DNA, 1336 bp, Homo sapiens
  SIMILAR (1)..(1035): 991254mologous to Methylomonas aminofaciens transposase,accession number AB026428,Smith-Waterman Score=1812.
atgtgcgaactcgatattttacacgactctctttaccaattctgccccgaattacacttaaaacgactcaacagcttaacgttggcttgccacgcattacttgactgtaaaactctcactcttaccgaacttggccgtaacctgccaaccaaagcgagaacaaaacataacatcaaacgaatcgaccgattgttaggtaatcgtcacctccacaaagagcgactcgctgtataccgttggcatgctagctttatctgttcgggcaatacgatgcccattgtacttgttgactggtctgatattcgtgagcaaaaacgacttatggtattgcgagcttcagtcgcactacacggtcgttctgttactctttatgagaaagcgttcccgctttcagagcaatgttcaaagaaagctcatgaccaatttctagccgaccttgcgagcattctaccgagtaacaccacaccgctcattgtcagtgatgctggctttaaagtgccatggtataaatccgttgagaagctgggttggtactggttaagtcgagtaagaggaaaagtacaatatgcagacctaggagcggaaaactggaaacctatcagcaacttacatgatatgtcatctagtcactcaaagactttaggctataagaggctgactaaaagcaatccaatctcatgccaaattctattgtataaatctcgcactaaaggccgaaaaaatcagcgctcgacacggacacattgtcaccacccgtcacctaaaatctactcagcgtcggcaaaggagccatgggttctagcaactaacttacctgttgaaattcgaacacccaaacaacttgttaatatctattcgaagcgaatgcagattgaagaaaccttccgagacttgaaaagtcctgcctacggactaggcctacgccatagccgaacgagcagctcagagcgttttgatatcatgctgctaatcgccctgatgcttcaactaacatgttggcttgcgggcgttcatgctcagaaacaaggacttgatgtgtgggacagctggccgctgcaaaacgctgacggaacagtagctgaatacaacggctatcacgttgtgtttgctcttgcgggaagcccgaaagacgctgatgacacatcaatctacatgttttatcaaaaggtcggcgacaactcaatcgacagctggaaaaacgcgggccgtgtctttaaagacagcgataagttcgacgccaacgatccgatcctgaaagatcagacgcaagaatggtccggttctgcagcctttacatctgacggaaaaatccgtttattctacactgactattccg

SEQ ID NO: 19187 - DNA, 1575 bp, Homo sapiens
  SIMILAR (793)..(1572): 991254mologous to Escherichia coli similar to ~start codon is not identified yet,accession number D90869,Smith-Waterman Score= 1348.
atggggagtgtgaccaagtcaaggggacccactgactcatccgctttcttccagataaaccgagactactccttccttgactacatcctgggaggctgccagctcatgttcaccccctgggccaggcttctccagagtacgtgctgcgagcaatgttcaaagaaagctcatgaccaatttctagccgaccttgcgagcattctaccgagtaacaccacaccgctcattgtcagtgatgctggctttaaagtgccatggtataaatccgttgagaagctgggttggtactggttaagtcgagtaagaggaaaagtacaatatgcagacctaggagcggaaaactggaaacctatcagcaacttacatgatatgtcatctagtcactcaaagactttaggctataagagcctgactataagcaacccaatctcaggccaaattctattgtataaatctcgctctaaaggccgaaaaaatcagcgctcgacacggactcattgtcaccacccgtcacctaaaatctactcagcgtcggcaaaggagccatggattctagcaactaacttacctgttgaaattcgaacacccaaacaacttgttaatatctattcgaagcgaatgcagattgaagaaaccttccgagacttgaaaagtcctgcctacggactaggcctacgccatagccgaacgagcagctcagagcgttttgatatcatgctgctaatcgccctgatgcttcaactaacatgttggcttgcgggcgttcatgctcagaaacaagcatttaggtttatgcgtcttgtcgatggaacagcaatcagtgcgcccgggggcggcagcgctgaatggcgactacatatgggatatgatcctcatacctgtcagttcactgattttgagctaaccgacagcagagacgctgaacggctggaccgatttgcgcaaacggcagacgagatacgcattgctgaccggggattcggttcgcgtcccgaatgtatccgctcacttgcttttggagaagctgattatatcgtccgggttcactggcgaggattgcgctggttaactgcagaaggaatgcgctttgacatgatgggttttctgcgcgggctggattgcggtaagaacggtgaaaccactgtaatgataggcaattcaggtaataaaaaagccggagctccctttccggcacgtctcattgccgtatcacttcctcccgaaaaagcattaatcagtaaaacccgactgctcagcgagaatcgtcgaaaaggacgagtagttcaggcggaaacgctggaagcagcgggccatgtgctattgctaacatcattaccggaagatgaatattcagcagagcaagtggctgattgttaccgtctgcgatggcaaattgaactggcttttaagcggctcaaaagtttgctgcacctggatgctttgcgtgcaaaggaacctgaactcgcgaaagcgtggatatttgctaatctactcgccgcatttttaattgacgacataatccagccatcgctggatttcccccccagaagtgccggatccgaaaagaagaactaa

SEQ ID NO: 19188 - DNA, 2187 bp, Homo sapiens
  SIMILAR (559)..(1671): 841254mologous to Salmonella typhi putative IS10 transposase,accession number AF223162,Smith-Waterman Score=1600.
atggcgacaccggacgcggggctccctggggctgagggcgtggagccggcgccctgggcgcagctggaggcccccgcccgcctcctgctgcaggcgctgcaggcggggcctgagggggcgcggcgcggcctgggggtgctccgggcgctgggcagccgcggctgggagcccttcgactggggtcgcttgctcgaggccctgtgccgggaggagccggtcgtgcaggggcctgacggccgtctggagctattctggggtacttgtataactccggatcttcggaggtttacatacagtactcggagtgaggagcaggaccgacggacagagcagacatgcatacagacaaccagaaccacagagggcctcgagcccggagcggtcctccgcacagttgccactcgctacctgcacccgtactcaccgttacccaactccatcactgtccccttctcattaacactttgcctcggtgcgacttccccttctgctgtcctctacccaggtcctgctcaaacagagttactgtgttgccttgtgaagatggagtccctggagccagatgcacaggttctaatgctgggcttaacgttggcttgccacgcattacttgactgtaaaactctcactcttaccgaacttggccgtaacctgccaaccaaagcgagaacaaaacataacatcaaacgaatcgaccgattgttaggtaatcgtcacctccacaaagagcgactcgctgtataccgttggcatgctagctttatctgttcgggcaatacgatgcccattgtacttgttgactggtctgatattcgtgagcaaaaacgacttatggtattgcgagcttcagtcgcactacacggtcgttctgttactctttatgagaaagcgttcccgctttcagagcaatgttcaaagaaagctcatgaccaatttctagccgaccttgcgagcattctaccgagtaacaccacaccgctcattgtcagtgatgctggctttaaagtgccatggtataaatccgttgagaagctgggttggtactggttaagtcgagtaagaggaaaagtacaatatgcagacctaggagcggaaaactggaaacctatcagcaacttacatgatatgtcatctagtcactcaaagactttaggctataagaggctgactaaaagcaatccaatctcatgccaaattctattgtataaatctcgctctaaaggccgaaaaaatcagcgctcgacacggactcattgtcaccacccgtcacctaaaatctactcagcgtcggcaaaggagccatgggttctagcaactaacttacctgttgaaattcgaacaccccaacaacttgttaatatctattcgaagcgaatgcagattgaagaaaccctccgagacttgaaaagtcctgcctacggactaggcttacgccatagccgaacgagcagctcaaagcgttttgatatcatgctgctaatcgccctaatgcttcagactacatgtggggtgcgggcgttcatgctcagaaaaaagatggacttgctgtgtgcccagctgcagctccctcagctctcagacctcggtctcctgcggctctgcacctggctgctggccctttcacctgatctcagcctcagcaatgctactgtgctgaccagaagcctctttcttggacggccaggatctgaacaataccgtcgtgctttcgagcttgccgatcagcttggtttaaaacacccggattgcattgagcatgtatttccgacctatgctgatgagcaatgtactcatgttcttaccgaagaggattttttcagcactgaagaacgagaaggcgttgatcgctgcattggtgtgatttgttcttcgacaatgactactgatgaaggtgccaagaacaatgaagaaagccccacagccactgttgctgagcagggagaggatattacctccaaaaaagacaggggagtattaaagattgtcaaaagagtggggaatggtgaggaaacgccgatgattggagacaaagtttatgtccattacaaaggaaaattgtcaaatggaaagaagtttgattccagtcatgatagaaatgaaccatttgtctttagtcttggcaaagagacttgctctgttattggggctggaatgcaatggcaccatcataactcactacagcattga

SEQ ID NO: 19189 - DNA, 780 bp, Homo sapiens
  SIMILAR (696)..(271): 781254mologous to Plasmid R100 transposase of Tn10,accession number AP000342,Smith-Waterman Score=526.
ctctcctctctgtggatcctgaatacgagtaaatctcaaatctccatgttcccagtgtgcatttacactatagatccgaagctgagaaagttcaaatgatgcattgaaggcttttgctccaattctgatgactatagaatttacagaaacagaaattccctcaactactttttcagcaaagccgtattcacatgtgtgaatagattttgagtaagcagggttgcagccacgagtgagtcttcccttgttattgtgtagccagaatgccgcaaaacttccatgcctaagcgaactgttgagagtactgtttcgatttctgactgtgttagcctggaagtgcttgtcccaaccttgtttctgagcatgaacgcccgcaagccaacatgttagttgaagcatcagggcgattagcagcatgatatcaaaacgctctgagctgctcgttcggctatggcgtaggcctagtccgtaggcaggacttttcaagtctcggaaggtttcttcaatctgcattcgcttcgaatagatattaacaagttgtttgggtgttcgaatttcaacaggtaagttagttgctagaatccatggctcctttgccgacgctgacacataatccagggtcgacctcgggcaccagttctcatggtttgtatttgtgggaaatccagttctagaagaattgtctcctttgtctttccaatgtctctccaccttccggggctcctcttcctcataaagctgcaagctccacgggtcatcagaatcccacccccactccat

SEQ ID NO: 19190 - DNA, 1314 bp, Homo sapiens
  SIMILAR (1314)..(289): 1001254mologous to Escherichia coli, LBB84, plasmid pXT107, IS10L/R-1, Peptide PlasmidTransposonInsertionMutant, 402 aa transposase,accession number S67119,Smith-Waterman Score=1805.
ctaggtgttggtgtgggggaatgcaacatcaaacccattgtcatctggagttgtagcaagggtttcctgcctaaataatttctttttaactcctgtatcattataacccttcttcacgtgcttccgcattcccatggtgttgaacttcaagctgtcatggggagtggctgtgttctcctcccattccttggaattccctctttgatggaacgtgttcaccatgtaagcccacacagaattttctagaaagatggtagaatcaagaaggtggtagggggtggcttgctcttgtttctgagcatgaacgcccgcaagccaacatgttagttgaagcatcagggcgattagcagcatgatatcaaaacgctctgagctgctcgttcggctatggcgtaggcctagtccgtaggcaggacttttcaagtctcggaaggtttcttcaatctgcattcgcttcgaatagatattaacaagttgtttgggtgttcgaatttcaacaggtaagttagttgctagaatccatggctcctttgccgacgctgagtagattttaggtgacgggtggtgacaatgagtccgtgtcgagcgctgattttttcggcctttagagcgagatttatacaatagaatttggcatgagattggattgcttttagtcagcctcttatagcctaaagtctttgagtgactagatgacatatcatgtaagttgctgataggtttccagttttccgctcctaggtctgcatattgtacttttcctcttactcgacttaaccagtaccaacccagcttctcaacggatttataccatggcactttaaagccagcatcactgacaatgagcggtgtggtgttactcggtagaatgctcgcaaggtcggctagaaattggtcatgagctttctttgaacattgctctgaaagcgggaacgctttctcataaagagtaacagaacgaccgtgtagtgcgactgaagctcgcaataccataagccgtttttgctcacggatatcagaccagtcaacaagtacaatgggcatcgtattgcccgaacagataaagctagcatgccaacggtatacagcgagtcgctctttgtggaggtgacgattacctaacaatcggtcgattcgtttgatgttatgttttgttctcgctttggttggcaggttacggccaagttcggtaagagtgagagttttacagtcaagtaaggcgtggcaagccaacgttaagctgttgagtcgttttaagtgtaattcggggcagaattggtaaagagagtcgtgtaaaatatcgagttcgcacat

SEQ ID NO: 19191 - DNA, 1357 bp, Homo sapiens
  SIMILAR (403)..(813): 881254mologous to Cloning vector pZC320 SopA,accession number U26464,Smith-Waterman Score=631.
atggaggaaactgcccccctgattcaattatctccacctggccccacccttgacacatggggactgttgcaattcaagcttttgggctcttggacttacaccagtggtttgccagggccccccagccttcgaccacagattgaaggctacactgttggcctccctacttttgaggttttggaacttggactggcttccttgctcctcagtttgcagacagcctattgtggaacttcaccttgtgatcgtaacccgccacctccatttgcacaagcccaagtccagtctagccttccagtggatgagtcatggcacagctatggctatggctctacccaacagtcagctaatcccccgaagcagagccttttcactgaccagcagctgcccacctacacatgggatctggctctgaaggggctacgtgttttgctcgtggaaggtaacgacccccagggaacagcctcaatgtatcacggatgggtaccagatcttcatattcatgcagaagacactctcctgcctttctatcttggggaaaaggacgatgtcacttatgcaataaagcccacttgctggccggggcttgacattattccttcctgtctggctctgcaccgtattgaaactgagttaatgggcaaatttgatgaaggtaaactgcccaccgatccacacctgatgctccgactggccattgaaactgttgctcatgactatgatgtcatagttattgacagcgcgcctaacctggcgtcggcaaaggagccatgggttctagcaactaacttacctgttgaaattcgaactcccagacgaacttgttaatatctattcgaagcgaatgcagattgaagaagccttccgagacttgaaaagtcgtggctacgaggctaggcctactagctccagcttcattcacaaatgattccgctctggggaatctacgagtgcatcgaatcgttttttcttcggcaccttcttcgggaggtgccgtctggtaaacacgatccagtaaagaaagatgcttaaacgttgtctctctccgctcaccctggttaatcaggttgcgcttattgtgttgctttctactgctattggactggcagggatggcggtttctggctggctggtgcaaggcgttccaggcagcgcccatgcgatcaacaaagcgggatcgtgcgcatgcaaagttaccgtctgttggcggcagtgccattaagcgagaaagacaagcctcgagcagcagaacgagacggacaactggcgcaattacagaaccattcggcgcgtaatcactaatcgccgcgctgttcagttttccgttaatcagttgttccagttcggtgtttttcat

SEQ ID NO: 19192 - DNA, 2434 bp, Homo sapiens
  SIMILAR (1574)..(1044): 1001254mologous to Salmonella typhi putative IS10 transposase,accession number AF223162,Smith-Waterman Score=939.
gtatcttccaggtggaagctttaggaaccaatatgcaatttgccccaggctttgttctgctttggcaatcatggaagcatagagatggagcctgggtccccccgacttttcccgctgacctgcagggggtatggaacatgagcaagaaaacacattgacgccgtagaaactcattgaggccatttggagctcgtagttcatcacaggatctagtttgaggcataatgagcgacttggagctagcacttcatcaggagagtactgaccctctgcaagaggcttcctatgaacattacccttcgaaaactcacatctccctctctttcctgttgacacatgagcactgaaggaacctcccggaccttcagcattccacttgacaatggcttcattaggaaaagctctatccacagtcacaccaataactagatgtgtaattaacttgctttcccacaccatccccctaaagggtggcagtaaggatggctgagagagagttaccattatttctgttttacagatgagaaaactgaggtatggaaaaaggtgcccatttcccaaggtcatcagggtgctgctcatcagagccacaaacaagatctgtgtgactccagagcctttgttcttcattctgcggaggaggaaactgaggatcagagagaaaatgtgtttgcctgagcctcgatgtccaataagcaaaagagccaggactccctttctaatctttgattcctggtccagctcagtgaccaaaacactgtgtccttttttagagatcattaaagccacggtgtttcgatttctgactgtgttagcctggaagtgcttgtcccaaccttgtttctgagcatgaacgcccgcaagccaacatgttagttgaagcatcagggcgattagcagcatgatatcaaaacgctctgagctgctcgttcggctatggcgtaggcctagtccgtaggcagcgacttttcaagtctcggaaggtttcttcaatctgcattcgcttcgaatagatattaacaagttgtttgggtgttcgaattttcaacaggtaagttagtggctagaacccatggctcctttgccgacgctgagtagattttaggtgacgggtggtgacaatgagtccgtgtcgagcgctgattttttcggcctttagagcgagatttatacaatagaatttggcatgagattggattgcttttagtcagcctcttatagcctaaagtctttgagtgactagatgacatatcatgtaagttgctgataggtttccagttttccgctcctaggtctgcatattgtacttttcctcttactcgacttaaccagtaccaacccagcttctcaacggatttataccatggcactttaaagccagcatcactgacaatgagcggtgtggtgttactcggtagaatgctcgcaaggtcggctagaaattggtcatgagctttctttgaacattgctctgaaagcgggaacgctttctcataaagagtaacagaacgaccgtgtagcgcgactgacgctcgcaataccataagtcgtttttgctcacgaatatcagaccagtgaccgagattcccccagtagcggcgagcgtacggggagcagcccagagcctgaatcagtgtgtgtgttagtggaagcgtctggaaaggcgcgcgatacagggtgacagccccgtacacaaaaatgcacatgctgtgagctcgatgagtagggcgggacacgtggtatcctgtctgaatatggggggaccatcctccaaggctaaatactcctgactgccgcttgacagcttttacaacatctccgttatcccaggcgttaatatttcccgggcgagcaatgtaaggtgtatcggggaattgtgctttcagttctggaactaatgggccgttaggaccggtttcaaaactggtggtaagaatagttggtaagttgaaatacttagccaggtcacccagcgccagcacgttatttctaaacttatcgggttcgatatcccgtacaagggaaagtaaaccagcctggtgatcaacaagcaaaacggcagcatcatttttatcaagacgaacatacggtttggtcatcctcttctcctttcgagagtcagtggtacgtctgaaatcgatcagacgcgatgcattgctccgattccgcttcagctccgctggcaagttggatggctccgggctgccgacgtgcacctcctctagcgccttactccaaggagtaacttgccttaacgacagttccgacacatttgagagaagtaaacgagagctacgtgtatataggaggcatggcacagcgtccagatcagtgaggacaacaactgtctcagtggggtctctatatcctccgtagaacctcgcaacctcataaccaaatgcataataggcatgggctacgataactagtgacc

SEQ ID NO: 19193 - DNA, 1516 bp, Homo sapiens
  SIMILAR (1012)..(137): 951254mologous to Methylomonas aminofaciens transposase,accession number AB026428,Smith-Waterman Score=1468.
ctggagtgggccccagagtccagggtatagctgatccctgggaaaaagcaggagccagttctggagccctacagagggtgtggccagaaggccgtggattgggagcaagggctgcgagagctggaattttcagggcttgtttctgagcatgaacgcccgcaagccaacatgttagttgaagcatcagggcgattagcagcatgatatcaaaacgctctgagctgctcgttcggctatggcgtaggcctagtccgtaggcaggacttttcaagtctcggaaggtttcttcaatctgcattcgcttcgaatagatattaacaagttgtttgggtgttcgaatttcaacaggtaagttagttgctagaacccatggctcctttgccgacgctgagtagattttaggtgacgggtggtgacaatgagtccgtgtcgagcgctgattttttcggcctttagagcgagatttatacaatagaatttggcatgagattggattgcttttagtcagcctcttatagcctaaagtctttgagtgactagatgacatatcatgtaagttgctgataggtttccagttttccgctcctaggtctgcatattgtacttttcctcttactcgacttaaccagtaccaacccagcttctcaacggatttataccatggcactttaaagccagcatcactgacaatgagcggtgtggtgttactcggtagaatgctcgcaaggtcggctagaaattggtcatgagctttctttgaacattgctctgaaagcgggaacgctttctcataaagagtaacagaacgaccgtgtagtgcgactgaagctcgcaataccataagtcgtttttgctcacgaatatcagaccagtcaacaagtacaatgggcatcgtattgcccgaacagataaagctagcatgccaacggtatacagcgagtcgctctttgtggaggtgacgattacctgcatagatatcaaagcgatgccctttagtgactaccgcgtttggcgtggcgacattcgccagcggtggcgcgtagtccgggcgctttaccaccacgcgtttggtcgccagcaagcgtgcaggctccagtaatccatcggcatcaagatccggtcccaccagcgactgaaagacacgcatctcttttttcactagcgcgcttttctgcttatgcgggaacatcgggtcgagataaaccacctgcgggcgcggggtaatatcagtcagcgccgtcaggctggaggcgtgaattaactgcaaccgctcctgcaaccagccgccgatttccgcatccgcataaccacgcgccaggccgtcgtcgagtagcgcggcaaccactggattacgctccagcatccgcacgcggcaccgagctgaagccagtacaaaggcatcgcgcccaagtcctgcagtggcatccaccacatccggcaaataatcgcctttaatgcccaccgctttcgccaccgcctcaccgcgaccaccgccgaatttgcgtcggtgcgccat

SEQ ID NO: 19194 - DNA, 1819 bp, Homo sapiens
  SIMILAR (1108)..(1590): 951254mologous to Methylomonas aminofaciens transposase,accession number AB026428,Smith-Waterman Score=795.
atggacaggaactaccccagcgccggcttcggggacccgctcggcgccggggcgggatggagttacgagaggtcagcgaaagctaggcagagaatcctagttgatcgcaaggagtggagcgtttgccctcttgagtctggccacggactggtgccgttgcatgggaagagtcggatgtttcccggcttggtttatggcagctccaggacctcgcaccccgagacggacatcttacaccgccaggcctatgcggccccccacccactgcaaagctatgccaccaaccaccacccggcagatccgcagtccttcctggcaaacagggcaggggtagaagaggacccacagtgcctcgccccgttccgcgtggcagtggacaagcaccaggctctgctgaaggcagccatgagcgggcagggagttgaccgccacctgtttgcgctgtacatcgtgtcccgattcctccacctgcagtcgcccttcctgacccaggtccattcggagcagtggcagctgtccaccagccagatccctgttcagcaaatgcatctgtttgacgtccacaattacccggactatgtttcctcaggcggtggattcgggcctgctgatgaccatggttatggtgtttcttatatcttcatgggggatggcatgatcaccttccacatctccagcaaaaaatcaagcacaaaaacgcttagacttgcggagtcgagcgcggagctcttcctccctcagactcaggatctcagggctttggggctcttgtttctagaggtccgggatgtcgatttcccaggtaatcgtcacctccacaaagagcgactcgctgtataccgttggcatgctagctttatctgttcgggcaatacgatgcccattgtacttgttgactggtctgatattcgtgagcaaaaacgacttatggtattgcgagcttcagtcgcactacacggtcgttctgttactctttatgagaaagcgttcccgctttcagagcaatgttcaaagaaagctcatgaccaatttctagccgaccttgcgagcattctaccgagtaacaccacaccgctcattgtcagtgatgctgctttaaagtgccatggccgaaaaaatcagcgctcgacacggactcattgtcaccacccgtcacctaaaatctactcagcgtcggcaaaggagccatgggttctagcaactaacttacctgttgaaattcgaacacccaaacaacttgttaatatctattcgaagcgaatgcagattgaagaaaccttccgagacttgaaaagtcctgcctacggactaggcctacgccatagccgaacgagcagctcagagcgttttgatatcatgctgctaatcgccctgatgcttcaactaacatgttggcttgcgggcgttcatgctcagaaacaaggttgggacaagcacttccaggctaacacagtcagaaatcgaaacgtactctcaacagttcgcttaggcatggaagttttgcggcattctggctacacaataacaagggaagacttactcgtggctgcaaccctactaggctcaaaatttaatcacacatggtctcttcggccccagcgtcgacgcaccgcctccaaaacggggcttcaaacgtcctaaactcccagaacttcgtttacagcgcttcttcggtggggtgatcacccctccgctggaatcctattcgctcccatccgatcctgttcacctcttccccccccgccgaccccctcggcagcttactgcttctccgcttcgcgcccgagctccgtatgaatgttcatcatgcaaagatgct

SEQ ID NO: 19195 - DNA, 2624 bp, Homo sapiens
  SIMILAR (1313)..(1825): 871254mologous to Methylomonas aminofaciens transposase,accession number AB026428,Smith-Waterman Score=779.
atgatcaccgtgaaagacttccagaaagcggaacgtaaaccgaacgcctgtaaagacgagcaaggccgtctgcgtgttggtgcagcggttggcgcaggtgcgggtaacgaagagcgtgttgacgcgctggttgccgcaggcgttgacgttctgctgatcgactcctcccacggtcactcagaaggtgtactgcaacgtatccgtgaaacccgtgctaaatatccggatctgcaaattatcggcggcaacgtggcaacagctgcaggtgcacgcgctctggcagaagctggttgcagtgcggttaaagtcggcattggccctggctctatctgtacaactcgtatcgtgactggcgtcggtgttccgcagattaccgctgttgctgacgcagtagaagccctggaaggcaccggtattccggttatcgctgatggcggtattcgcttctccggcgacatcgccaaagctatcgccgctggcgcaagcgcggtgatggtaggttccatgctggcgggtactgaagaatctccgggtggtttccgtctgggcttcttgcattctgggacagccaagtctgtgacttgcacgtactcccctgccctcaacaagatgttttgccaactggccaagacctgccctgtgcagctgtgggttgattccacacccccgcccggcacccgcgtccgcgccatggccatctacaagcagtcacagcacatgacggaggttgtgaggcgctgcccccaccatgagcgctgctcagatagcgatggtctggcccctcctcagcatcttatccgagtggaaggaaatttgcgtgtggagtatttggatgacagaaacacttttcgacatagtgtggtggtgccctatgagccgcctgaggttggctctgactgtaccaccatccactacaactacatgtgtaacagttcctgcatgggcggcatgaaccggaggcccatcctcaccatcatcacactggaagactccagtggtaatctactgggacggaacagctttgaggtgcgtgtttgtgcctgtcctgggagagaccggcgcacagaggaagagaatctccgcaagaaaggggagcctcaccacgagctgcccccagggagcactaagcgagcactgcccaacaacaccagctcctctccccagccaaagaagaaaccactggatggagaatatttcacccttcagatccgtgggcgtgagcgcttcatccccgtaatcgtcacctccacaaagagcgactcggctgtataccggtggcatgctagctttatctgttcgggcaatacgatgcccattgtacttgttgactggtctgatattcgtgagccaaaacgacttatggtattgcgagcttcaggtcgcactacacggtcgttctgttactctttatgagaaagcgttcccgctttcagagcaatgttcaaagaaagctcatgaccaatttctagccgaccttgcgagcattctaccgagtaacaccacaccgctcattgtcagtgatgctggctttaaagtgccatggtataaatccgttgagaagctgggttggtactggttaagtcgagtaagaggaaaagtacaatatgcagacctaggagcggaaaactggaaacctatcagcaacttacatgatatgtcatctagtcactcaaagactttaggctataagaggctgactaaaagcaatccaatctcatgccaaattctattgtataaatctcgctctaaaggccgaaaaaatcagcgctcgacacggactcattgtcaccacccgtcacctaaaatctatctcagcgtcggcaaaggagccatgggttctagcaactaacttacctgttgaaattcgaacacccaaacaacttgttaatatctattcgaagcgaatgcagattgaagaaaccttccgagacttgaaaagtcctgcctacggactaggcctacgccatagccgaacgagcagctcagagcgttttgatatcatgctgctaatcgccctgatgcttcaactaacatgttggcttgcgggcgttcatgctcagaaacaaggttgggacaagcacttccaggctaacacagtcagaaatcgaaacggaagacttactcgtggctgcaaccctactagctcaaaatttattcacacatggttacgctttggggaaattatgaggggatctctcagtaaacagcagcaaaacgaaaaataccaagtgcctcaattcgatcaatcaacgattaaaaatattgagtctgcaaaaggacttgatgtgtgggacagctggccgctgcaaaacgctgacggaacagtagctgaatacaacggctatcacgttgtgtttgctcttgcgggaagcccgaaagacgctgatgacacatcaatctacatgttttatcaaaaggtcggcgacaactcaatcgacagctggaaaaacgcgggccgtgtctttaaagacagcgataagttcgacgccaacgatccgatcctgaaagatcagacgcaagaatggtccggttctgcaacctttacatctgacggaaaaatccgtttattctacactgactattccggtaaacattacggcaaacaaagcctgacaacagcgcag

SEQ ID NO: 19196 - DNA, 1353 bp, Homo sapiens
  SIMILAR (1)..(1185): 991254mologous to Methylomonas aminofaciens transposase,accession number AB026428,Smith-Waterman Score=2074.
atgtgcgaactcgatattttacacgactctctttaccaattctgccccgaattacacttaaaacgactcaacagcttaacgttggcttgccacgcattacttgactgtaaaactctcactcttaccgaacttggccgtaacctgccaaccaaagcgagaacaaaacataacatcaaacgaatcgaccgattgttaggtaatcgtcacctccacaaagagcgactcgctgtataccgttggcatgctagctttatctgttcgggcaatacgatgcccattgtacttgttgactggtctgatattcgtgagcaaaaacgacttatggtattgcgagcttcagtcgcactacacggtcgttctgttactctttatgagaaagcgttcccgctttcagagcaatgttcaaagaaagctcatgaccaatttctagccgaccttgcgagcattctaccgagtaacaccacaccgctcattgtcagtgatgctggctttaaagtgccatggtataaatccgttgagaagctgggttggtactggttaagtcgagtaagaggaaaagtacaatatgcagacctaggagcggaaaactggaaacctatcagcaacttacatgatatgtcatctagtcactcaaagactttaggctataagaggctgactaaaagcaatccaatctcatgccaaattctattgtataaatctcgctctaaaggccgaaaaaatcagcgctcgacacggactcattgtcaccacccgtcacctaaaatctactcagcgtcggcaaaggagccatgggttctagcaactaacttacctgttgaaattcgaacacccaaacaacttgttaatatctattcgaagcgaatgcagattgaagaaaccttccgagacttgaaaagtcctgcctacggactaggcctacgccatagccgaacgagcagctcagagcgttttgatatcatgctgctaatcgccctgatgcttcaactaacatgttggcttgcgggcgttcatgctcagaaacaaggttgggacaagcacttccaggctaacacagtcagaaatcgaaacgtactctcaacagttcgcttaggcatggaagttttgcggcattctggctacacaataacaagggaagacttactcgtggctggaaccctactagctcaaaatttattcacacatgaaacatggatgcaactggaggccattatcctaaatgaattaatggggaaacggaaaatcaaataccgcattttctcacgtataagtgagactggcacactgggtactcatgaacatggagatagaaacaatagatactgcggactcctaaaggaggcaggaagggag

SEQ ID NO: 19197 - DNA, 2047 bp, Homo sapiens
  SIMILAR (622)..(1452): 961254mologous to Methylomonas aminofaciens transposase,accession number AB026428,Smith-Waterman Score=1400.
atgagccgcctgctctggaggaaggtggccggcgccaccgtcgggccagggccggttccagctccggggcgctgggtctccagctccgtccccgcgtccgaccccagcgacgggcagcggcggcggcagcagcagcagcagcagcagcagcagcagcaacagcagcctcagcagccgcaagtgctatcctcggagggcgggcagctgcggcacaacccattggacatccagatgctctcgagagggctgcacgagcaaatcttcgggcaaggaggggagatgcctggcgaggccgcggtgcgccgcagcgtcgagcacctgcagaagcacgggctctgggggcagccagccgtgcccttgcccgacgtggagctgcgcctgccgcccctctacggggacaacctggaccagcacttccgcctcctggcccagaagcagagcctgccctacctggaggcggccaacttgctgttgcaggcccagctgcccccgaagcccccggcttgggcctgggcggagggctggacccggtacggccccgagggggaggccgtacccgtggccatccccgaggagcgggccctggtgttcgacgtggaggtctgcttggcagagggaacttgccccacattggcggtggccatatccccctcggcctgcttaacgttggcttgccacgcattacttgactgtaaaactctcactcttaccgaacttggccgtaacctgccaaccaaagcgagaacaaaacataacatcaaacgaatcgaccgattgttaggtaatcgtcacctccacaaagagcgactcgctgtataccgttggcatgctagctttatctgttcgggcaatacgatgcccattgtacttgttgactggtctgatatccgtgagcaaaaacggcttatggtattgcgagcttcagtcgcactacacggtcgttctgttactctttatgagaaagcgttcccgctttcagagcaatgttcaaagaaagctcatgaccaatttctagccgaccttgcgagcattctaccgagtaacaccacaccgctcattgtcagtgatgctggctttaaagtgccatggtataaatccgttgagaagctgggttggtactggttaagtcgagtaagaggaaaagtacaatatgcagacctaggagcggaaaactggaaacctatcagcaacttacatgatatgtcatctagtcactcaaagactttaggctataagaggctgactaaaagcaatccaatctcatgccaaattctattgtataaatctcgctctaaaggccgaaaaaatcagcgctcgacacggactcattgtcaccacccgtcacctaaaatctactcagcgtcggcaaaggagccatgggttctagcaactaacttacctgttgaaattcgaacacccaaacaacttgttaatatctattcgaagcgaatgccaaattgaagaaaccttccgagacttgaaaagtcctgcctacggactaggcctacgccatagccgaacgagcagctcagagcgttttgatatcatgctgctaatcgccctgatgcttcaactaacatgttggcttgcgggcgttcatgctcagaaacaagagcaccctttgtggtcgctggcgctggttaggaggagatcccctgcccagagccctcatgtggggacaggatcttccggcagcactgggtgttcaagtcaggcaccgtgtatgaaatctaacaatgcgctcatcgtcatcctcggcaccgtcaccctggatgctgtaggcataggcttggttatgccggtactgccgggcctcttgcgggatatcgtccattccgacagcatcgccagtcactatggcgtgctgctagcgctatatgcgttgatgcaatttctatgcgcacccgttctcggagcactgtccgaccgctttggccgccgcccagtcctgctcgcttcgctacttggagccactatcgactacgcgatcatggcgaccacacccgtcctgtggatctacccactagtcaattcaccatcttgttga

SEQ ID NO: 19198 - DNA, 4247 bp, Homo sapiens
  SIMILAR (1126)..(2280): 991254mologous to Cloning vector pBACe3.6 levansucrase,accession number U80929,Smith-Waterman Score=2033.
atgtgcgaactcgatattttacacgactctctttaccaattctgccccgaattacacttaaaacgactcaacagcttaacgttggcttgccacgcattacttgactgtaaaactctcactcttaccgaacttggccgtaacctgccaaccaaagcgagaacaaaacataacatcaaacgaatcgaccgattgttaggtaatcgtcacctccacaaagagcgactcgctgtataccgttggcatgctagctttatctgttcgggcaatacgatgcccattgtacttgttgactggtctgatattcgtgagcaaaaacgacttatggtattgcgagcttcagtcgcactacacggtcgttctgttactctttatgagaaagcgttcccgctttcagagcaatgttcaaagaaagctcatgaccaatttctagccgaccttgcgagcattctaccgagtaacaccacaccgctcattgtcagtgatgctggctttaaagtgccatggtataaatccgttgagaagctgggttggtactggttaagtcgagtaagaggaaaagtacaatatgcagacctaggagcggaaaactggaaacctatcagcaacttacatgatatgtcatctagtcactcaaagactttaggctataagaggctgactaaaagcaatccaatctcatgccaaattctattgtataaatctcgctctaaaggccgaaaaaatcagcgctcgacacggactcattgtcaccacccgtcacctaaaatctactcagcgtcggcaaaggagccatgggttctagcaactaacttacctgttgaaattcgaacacccaaacaacttgttaatatctattcgaagcgaatgcagattgaagaaaccttccgagacttgaaaagtcctgcctacggactaggcctacgccatagccgaacgagcagctcagagcgttttgatatcatgctgctaatcgccctgatgcttcaactaacatgttggcttgcgggcgttcatgctcagaaacaaggttgggacaagcacttccaggctaacacagtcagaaatcgaaacctcaaaatttattcacacatggttacgctttggggaaattatgaggggatctctcagtaccaagtgcctcaattcgatcaatcaacgattaaaaatattgagtctgcaaaaggacttgatgtgtgggacagctggccgctgcaaaacgctgacggaacagtagctgaatacaacggctatcacgttgtgtttgctcttgcgggaagcccgaaagacgctgatgacacatcaatctacatgttttatcaaaaggtcggcgacaactcaatcgacagctggaaaaacgcgggccgtgtctttaaagacagcgataagttcgacgccaacgatccgatcctgaaagatcagacgcaagaatggtccggttctgcaacctttacatctgacggaaaaatccgtttattctacactgactattccggtaaacattacggcaaacaaagcctggcagcagcgcaggtaaatgtgtcaaaatctgatgacacactcaaaatcaacggagtggaagatcacaaaacgatttttgacggagacggaaaaacatatcagaacgttcagcagtttatcgatgaaggcaattatacatccggcgacaaccatacgctgagagaccctcactacgttgaagacaaaggccataaataccttgtattcgaagccaacacgggaacagaaaacggataccaaggcgaagaatctttatttaacaaagcgtactacggcggcggcacgaacttcttccgtaaagaaagccagaagcttcagcagagcgctaaaaaacgcgatgctgagttagcgaacggcgccctcggtatcatagagttaaataatgattacacattgaaaaaagtaatgaagccgctgatcacttcaaacacggtaactgatgaaatcgagcgcgcgaatgttttcaaaatgaacggcaaatggtacttgttcactgattcacgcggttcaaaaatgacgatcgatggtattaactcaaacgatatttacatgcttggttatgtatcaaactctttaaccggcccttacaagccgctgaacaaaacagggcttgtgctgcaaatgggtcttgatccaaacgatgtgacattcacttactctcacttcgcagtgccgcaagccaaaggcaacaatgtggttatcacaagctacatgacaaacagaggcttcttcgaggataaaaaggcaacatttgcgccaagctctgatgaatcccctaatgattttggtaatcgtcacctccacaaagagcgactcgctgtataccgttggcatgctagctttatctgttcgggcaatacgatgcccattgtacttgttgactggtctgatattcgtgagcaaaaacgacttatggtattgcgagcttcagtcgcactacacggtcgttctgttactctttatgagaaagcgttcccgctttcagagcaatgttcaaagaaagctcatgaccaatttctagccgaccttgcgagcattctaccgagtaacaccacaccgctcattgtcagtgatgctggctttaaagtgccatggtataaatccgttgagaagctgggttggtactggttaagtcgagtaagaggaaaagtacaatatgcagacctaggagcggaaaactggaaacctatcagcaacttacatgatatgtcatctagtcactcaaagactttaggctataagaggctgactaaaagcaatccaatctcatgccaaattctattgtataaatctcgctctaaaggccgaaaaaatcagcgctcgacacggactcattgtcaccacccgtcacctaaaatctactcagcgtcggcaaaggagccatgggttctagcaactaacttacctgttgaaattcgaacacccaaacaacttgttaatatctattcgaagcgaatgcagattgaagaaaccttccgagacttgaaaagtcctgcctacggactaggcctacgccatagccgaacgagcagctcagagcgttttgatatcatgctgctaatcgccctgatgcttcaactaacatgttggcttgcgggcgttcatgctcagaaacaaggttgggacaagcacttccaggctaacacagtcagaaatcgaaacgtactctcaacagttcgcttaggcatggaagttttgcggcattctggctacacaataacaagggaagacttactcgtggctgcaaccctactagctcaaaatttattcacacatggctatcgccattgcacagtttaatgatgacagcccggaagcgaggaaaataacccggcgctggagaataggtgaagcagcggatttagttggggtttcttctcaggctatcagagatgccgagaaagcagggcgactaccgcacccggatatggaaattcgaggacgggttgagcaacgtgttggttatacaattgaacaaattaatcatatgcgtgatgtgtttggtacgcgattgcgacgtgctgaagacgtatttccaccggtgatcggggttgctgcccataaaggtggcgtttacaaaacctcagtttctgttcatcttgctcaggatctggctctgaaggggctacgtgttttgctcgtggaaggcctgcccgcagcagtgtcccttattcagtgcgtggcctacagagaccaagctctggccagaggagcagggtcagagcagacacaggagaccacagggcccatcctgtcggtgcagaggtggcttcaggtcttggagaatgaggaacgcgtcggcaaaggagccatgggttctagcaactaacttacctgttgaaattcgaacacccaaacaacttgttaatatctattcgaagcgaatgcagattggggagggcttccgagacttgaaaagtcctgcctacggactaggcctacgccatagccgaacgagcagctcagagcgttttgatatcatgctgctaatcgccctgatgcttcaactaacatgttggcttgcgggcgttcatgctcagaaacaaggttgggacaagcacttccaggctaacacagtcagaaatcgaaacgtactctcaacagttcgcttaggcatggaagttttgcggcattctggctacacaataacaagggaagacttactcgtggctgcaaccctactagctcaaaatttattcacacatggttacgctttggggaaattatga

SEQ ID NO: 19199 - DNA, 2599 bp, Homo sapiens
  SIMILAR (2013)..(2522): 841254mologous to Homo sapiens lactate dehydrogenase B (AA 1 - 334),accession number Y00711,Smith-Waterman Score=703.
atggcgatgtttatgttgctggcggcggcgctgctttctacctttctgaccaacgatgtcgcgctgtatactgttgttccgctgactatcacgctaaaaagactgtgtgagatcccgtataatcggctgattatttttgagggcgctggcagtcaacgctggttcgctactgacgccaattggcaacccgcaaaatattcttatctggggacgttctggtctttcgtttgccggatttattgcccaaatggcaccgctggctggcgcaatgatgctgacgctcctgctcctgtgctggcgatgcaataccatacgggggtgcaaacaccggagtggaaaccgcggctggtgtggagttgtctggggctgtatatcgtctttctgacggcgctggagttcaaacaagagctgtggggactggtgattgtggcggcaggctttgcgctgctggcacgtcgcgtggtgctcagtgtggactggacgctgctgctggtgtttatggcgatgtttatcgacgtccatttactgacccagcttccagcgttgcaaggcgtgttgggtaacgtgatcagtaacgtgccgagtaccatattgttgctgaactatgtgccgccgtctttattactggtatgggcggtaaacgtaggtggctttgggtttttgacatgcaggcatgctagaatagccgcccccgcggatttaaaagacggtttagccgttcacgagaaaagggaaactcgaagcttaaccgaaaaaaccggtaaaatgctgctgccgaaactgggcgtgggatctcgggaatgtggcggtaacgtaaaagaagtcggtattcgcgccattgaagagtttggtccttacaaaatcaacggcgataaagagattatgcgtcgtatggacgacctgctacagggttttgatgcccagcatcgtatgaagttgccagctcagcctacatcccttgctacgaaatctgcacggcgcgtgcgctatccacttttttgcccgtccatattcaacggcttctttgaggagttcattttccatcgttttcttgccgagcaggcgctggagttctttaatctgcttcatggcggcagcaagttcagaggcaggaacaacctgttctccggcggcgacagcagccgaaaaaatcagcgctcgacacggactcattgtcaccacccgtcacctaaaatctactcagcgtcggcaaaggagccatgggttctagcaactaacttacctgttgaaattcgaacacccaaacaacttgttaatatctattcgaagcgaatgcagattgaagaaaccttccgagacttgaaaagtcctgcctacggactaggcctacgccatagccgaacgagcagctcagagcgttttgatatcatgctgctaatcgccctgatgcttcaactaacatgttggcttgcgggcgttcatgctcagaaacaaggttgggacaagcacttccaggctaacacagtcagaaatcgaaactgcaaaatggcaactcttaaggaaaaactcattgcaccagttgcggaagaagaggcaacagttccaaacaataagatcactgtagtgggtgttggacaagttggtatggcgtgtgctatcagcattctgggaaagagcagagcaatggagcacacaactgcaggggcaccatacacaccaaggcagcagacctgccagtgcaacatgatgtctctggctgatgaacttgctcttgtggatgttttggaagataagcttaaaggagaaatgatggatctgcagcatgggagcttatttcttcagacacctaaaattgtggcagataaagattattctgtgactgccaattctaagattgtagtggtaactgcaggagtccgtcagcaagaaggggagagtcggctcaatctggtgcagagaaatgttaatgtcttcaaattcattattcctcagatcgtcaagtacagtcctgattgcatcataaattgtggtttccaacccaagggacatttttaacgtatggtacctggaaactaagtggattacccaaacaccgcgtgattggaagtggatgtaatctggattctgctagatttcgctaccttatggctgaaaaacttggcattcatcccagcagctgccatggatggattttgggggaacatggcgactcaagtgtggctgtgtggagtggtgtgaatgtggcaggtgtttctctccaggaattgaatccagaaatgggaactgacaatgatagtgaaaattggaaggaagtgcataagatggtggttgaaagtgccctatgaagtccatccaagcctaaaagggatatacccacctgggctattggattaagtgtggctggatcttaaatgaatccatgttgaaaaatctatccagggattcatcccgtgtcaacaatggtaaaggggatgtatggcattgagaatgaagtcttcctgagccttccatgtatcctcaatgcccggggattaaccagcgttatcaaccccagaagtaaaggatgatgaggttgctcagctcaagaaaagtgcagataccctgtgggacatcccagaaggacctaaaagacctgtga

SEQ ID NO: 19200 - DNA, 3646 bp, Homo sapiens
  SIMILAR (1547)..(2617): 1001254mologous to Cloning vector pSacBII SacB,accession number U09128,Smith-Waterman Score=1899.
atgagcacatcagcggaagaagacacaaatggctggacgatgagaggacatcgagggagcacgttggtggaaaagcacaacgacagatgctggcatgccagcaggccatcaaccagagggatgaggccaagtttggcctggctggagcagtcagaggagagccggggccgtcgagtgccccaactccaggggaaaactatctctcttttggttcctccatcgcctgagagctacttccactcaataacactttgcactctttctccaagcccacgcgtgatccgattcatccggcatagcaaggcaagagccaaggatacagaaagccctctgtccttgctacaagacaacaagatgtgcgaactcgatatttgtacacgactctctttaccaattctgccccgaagtacacttaaaacgactcaacagcttaacgttggcttgccacgcattacttgactgtaaaactctcactcttaccgaacttggccgtaacctgccaaccaaagcgagaacaaaacataacatcaaacgaatcgaccgattgttaggtaatcgtcacctccacaaagagcgactcgctgtataccgttggcatgctagctttatctgttcgggcaatacgatgcccatgccgacttgttgactgggctgatattcctgagcaaaaacaacttatggtcttgcgagcttcagtcgcactacacggtcgttctgtgactctttatgagaaagcgttccccgctttcagagcaatgttcaaacgaagctcatgaccaatttctagccgaccttggcgagcattctaccgagtaacaccacaccgctcattgtcagtgatgctggctttaaagtgccatggtataaatccgttgagaagctgggttggtactggttaagtcgagtaagaggaaaagtacaatatgcagacctaggagcggaaaactggaaacctatcagcaacttacatgatatgtcatctagtcactcaaagactttaggctataagaggctgactaaaagcaatccaatctcatgccaaattctattgtataaatctcgctctaaaggccgaaaaaatcagcgctcgacacggactcattgtcaccacccgtcacctaaaatctactcagcgtcggcaaaggagccatggattctagcaactaacttacctgttgaaattcgaacacccaaacaacttgttaatatctattcgaagcgaatgcagattgaagaaaccttccgagacttgaaaagtcctgcctacggactagggcttacgccataggcgaacgagcagctcagagcgttttgatatcatgctgctaatcgccctgatgcttcaactaacatgttggcttgcgggcgttcatgctcagaaacaaggttggggacaagcacttccaagcctaacacagtcagaaatcgaaacgtactctcatcagttcgcttaggcatggaagttttgcggcattctggctacacaataacaagggaagacttactcgtggctgcaaccctactagctcaaaatttattcacacatggaggagcgactcaagccttcgcgaaagaaaataaccaaaaagcatacaaagaaacgtacggcgtctctcatattacacgccatgatatgctgcagatccctaaacagcagcaaaacgaaaaataccaagtgcctcaattcgatcaatcaacgattaaaaatattgagtctgcaaaaggacttgatgtgtgggacagctggccgctgcaaaacgctgacggaacagtagctgaatacaacggctatcacgttgtgtttgctcttgcgggaagcccgaaagacgctgatgacacatcaatctacatgttttatcaaaaggtcggcgacaactcaatcgacagctggaaaaacgcgggccgtgtctttaaagacagcgataagttcgacgccaacgatccgatcctgaaagatcagacgcaagaatggtccggttctgcaacctttacatctgacggaaaaatccgtttattctacactgactattccggtaaacattacggcaaacaaagcctgacaacagcgcaggtaaatgtgtcaaaatctgatgacacactcaaaatcaacggagtggaagatcacaaaacgatttttgacggagacggaaaaacatatcagaacgttcagcagtttatcgatgaaggcaattatacatccggcgacaaccatacgctgagagaccctcactacgttgaagacaaaggccataaataccttgtattcgaagccaacacgggaacagaaaacggataccaaggcgaagaatctttatttaacaaagcgtactacggcggcggcacgaacttcttccgtaaagaaagccagaagcttcagcagagcgctaaaaaacgcgatgctgagttagcgaacggcgccctcggtatcatagagttaaataatgattacacattgaaaaaagtaatgaagccgctgatcacttcaaacacggtaactgatgaaatcgagcgcgcgaatgttttcaaaatgaacggcaaatggtacttgttcactgattcacgcggttcaaaaatgacgatcgatggtattaactcaaacgatatttacatgcttggttctgatgaatcccctaatgattttggtaatcgtcacctccacaaagagcgactcgctgtataccgttggcatgctagctttatctgttcgggcaatacgatgcccattgtacttgttgactggtctgatattcgtgagcaaaaacgacttatggtattgcgagcttcagtcgcactacacggtcgttctgttactctttatgagaaagcgttcccgctttcagagcaatgttcaaagaaagctcatgaccaatttctagccgaccttgcgagcattctaccgagtaacaccacaccgctcattgtcagtgatgctggctttaaagtgccatggtataaatccgttgagaagctgggttggtactggttaagtcgagtaagaggaaaagtacaatatgcagacctaggagcggaaaactggaaacctatcagcaacttacatgatatgtcatctagtcactcaaagactttaggctataagaggctgactaaaagcaatccaatctcatgccaaattctattgtataaatctcgctctaaaggccgaaaaaatcagcgctcgacacggactcattgtcaccacccgtcacctaaaatctactcagcgtcggcaaaggagccatgggttctagcaactaacttacctgttgaaattcgaacacccaaacaacttgttaatatctattcgaagcgaatgcagattgaagaaaccttccgagacttgaaaagtcctgcctacggactaggcctacgccatagccgaacgagcagctcagagcgttttgatatcatgctgctaatcgccctgatgcttcaactaacatgttggcttgcgggcgttcatgctcagaaacaagtgccgcaagccaaaggcaacaatgtggttatcacaagctacatgacaaacagaggcttcttcgaggataaaaaggcaacatttgcgccaagcttcttaatgaacatcaaaggcaataaaacatccgttgtcaaaaacagcatcctggagcaaggacagctgacagtcaactaa

SEQ ID NO: 19201 - DNA, 1508 bp, Homo sapiens
  SIMILAR (286)..(864): 411254mologous to Rattus norvegicus lactate dehydrogenase- B,accession number U07181,Smith-Waterman Score=156.
  misc_feature (1)...(1508): n = a,t,c or g
cgcgggccggnnngnaattgnaaatcgtacggcgttgaattcggcacgaggagacgcacgcagcctgactttgtcttctccggcacgactgctacagaggtctccagagccttcttctcatcctgtgcaaaatggcaactcttaaggaaaaactcattgcaccagttgcggaagagcgaggcgaacagttccaaacaataagatcacctgtagtgggtgtttggacaagttggtatggcagtgtgctatcagcattcctgggaaagtctcctggcctgatgaactttgctcttgtgggatgtttttgggaggataagcttaaaggagggaatgatggttccttccagcatggggagcttattttctttcagacaccctaaaattgtgggcaggataaaggattattcctgtgacccgccaattcctaaagatttgtaagttggtaactggcagggagtcccgtccagccaagaagggggagaatccggctccaatcctgggtgccagagaaatggttaatggtcttccaaattccattattcctcaagatcgtccaagtacagtccctgatttgcatcataattggtggtttcaacccccagttggacattcttacgtatgttaccctgggaaactaaagtgggattacccaaacaccgcgtgacttggaagtggatgtaatcgtggattcctgctagatttcgctaccttatggctgaaaaaacttggcatttcatcccaagcagctgcccatggatggaattttggggggaacatgggcgactccagtgttggctgtgtggaatggtgttaaatgtggcaggtgtttctcttccaggaattgaaatccagaaaatgggaacctgaccaatgataagttgaaaatttggaaggaaggtgcttagatatggtggttgaaaagtgccctatgaagtcatccaagctaaaaggatatccccaactgggggctatttggatttaagtgctggctgaatcttattggaatcccatgttgaaaaaatcttatcccaggattccatcccggttgtccaaccaatgggtaaaggcaggggatgtatgggcattggagaatggaaagtccttcccttgagccttctctatgtatccctcaatgcccccggggattaaacccagccgttatccaacccagaagcctaaaggatgatgaggttgcctcagcctcaagaaaaagtgccagaatacccctgtgggacaatccagaatggaccctaaaaagacctttgacttagggagcttctgggctgttagaaatttaaaaacttacaatgtgattaactccgagcctttaagttttcaatccatggtacatgggatcacaagtttgcctttgatcttcttcaaatattgtgaatttgggctcacagaattcaaaagcctattgcttgggttttaatggcttgcaaatctgaagctcttgaacaaaataaaattaactattggtagtgtgaaaaaaaaaaaaaaaaaaa

SEQ ID NO: 19202 - DNA, 406 bp, Homo sapiens
  SIMILAR (88)..(396): 791254mologous to Homo sapiens 28.4 kDa protein,accession number AF183428,Smith-Waterman Score=415.
  misc_feature (1)...(406): n = a,t,c or g
ggagacagccggagtcgctgggggagctccgcgccgccggacgcccgtnaccatgtggaggctgctggctcgcgctagtgcgccgctcctgcgggtgcccttttnagattcctgggcactccaagttttgaagatgtttccattcctgaaaaacccaagcttagatttattgaaagggcaccacttgtgccaaaagtaagaagagaacctaaaantttaagtgacatacggggaccttccactgaagctacggagtttacagaaggcaattttgcaatcttggcattgggtggtggctacctgcattggggccactttgaaatgatgcgcctgacaatcaaccggtctatgggaccccaagaacatgtttgccatatggcgagtaccagccccttttcaagcccat

SEQ ID NO: 19203 - DNA, 786 bp, Homo sapiens
  SIMILAR (1)..(783): 721254mologous to Homo sapiens 28.4 kDa protein,accession number AF183428,Smith-Waterman Score=915.
atgtggaggctgctggctcgcgctagtgcgccgctcctgcgggggttcgtgcaagagggtcacagctgcgtctgggagtcggcgcccagagatcccggctggccttttgcggagcctgagcctttgagtccatttagtggaatccgcatcccacacctcaagactcctccggcggaagaaaatagatcttttgagatgtatagttttactttatcctggttgtctgtgcttcttttagatgtttccattcctgaaaaacccaagcttagatttattgaaagggcaccacttgtgccaaaagcattgggtggtggctacctgcattggggccactttgaaatgatgcgcctgacaatcaaccgctctatggaccccaagaacatgtttgccatatggcgagtaccagcccctttcaagcccatcactcgcaaaagtgttgggcatcgcatggggggaggcaaaggtgctattgaccactacgtgacacctgtgaaggctggccgccttgttgtagagatgggtgggcgttgtgaatttgaagaagtgcaaggtttccttgaccaggttgcccacaagttgcccttcgcagcaaaggctgtgagccgcgggactctagagaagatgcgaaaagatcaagaggaaagagaacgtaacaaccagaacccctggacatttgagcgaatagccactgccaacatgctgggcatacggaaagtactgagcccatatgacttgacccacaaggggaaatactggggcaagttctacatgcccaaacgtgtgtag

SEQ ID NO: 19204 - DNA, 524 bp, Homo sapiens
  SIMILAR (420)..(289): 931254mologous to Homo sapiens 28.4 kDa protein,accession number AF183428,Smith-Waterman Score=205.
tttcaggccaatgactactggctgagtggaccatgggacacacaccagtgggaggttttaggggagctatctcattagacgctgctccgtaagagcaaggaactatgttggtttcctggctctgtgatttatttctagtgctcagaatattagttggcaaaactgtaagctctaaaaacatatttattgaaagagtgaacggggatgggaaacacgagaacattcctatgtcatctcccccccgctcctggtttccatcagagaaaagatttacgaacaggagaaagacaagctctcaccttcaaaacttggtactgggagcagtgtctttacgccagcactggcggggaggagtgcccaggaatctgacaagggcacccgcaggagcggcgcactagcgcgagccagcagcctccacatggtcacgggcgtccggcggcgcggagctccctcagcgactccggctgtctcatgcacccaggtaagcagcggcgctccactacctagctgtaatcggcacgaaa

SEQ ID NO: 19205 - DNA, 755 bp, Homo sapiens
  SIMILAR (531)..(746): 551254mologous to Homo sapiens 28.4 kDa protein,accession number AF183428,Smith-Waterman Score=144.
  misc_feature (1)...(755): n = a,t,c or g
gcgtgcgcaattccgacgaggtcctgagccgattacagctaggtagtggagcgccgctgcttacctgggtgcaggagacagccggagtcgctgggggagctccgcgccgccggacagcccgtgaccatgtggaggctgctggctcgcgctagtgcgccgctcctgcgggtgcccttgtcaggtcagaagtcccttttggttactaaagactttacccctcttcctcccccaccctccagtgctttttctccctaacccaaaaggcggctctgcatatgcttggtgaagcactggttaggaactacgctatcgcaccgccgacctccaccgtaggggttcgtgcaagagggtcacagctgcgtcctgggagtcggcgcccagagatcccggctggccttttgcggagcctgagcctttgagtccatttagtggaatccgcatcccacacctcaagactcctccggcggaagaaaatagatcttttgagatgtatagttttactttatcctgggttgtctgtgcttcttttagatgtttccattcctgaaaaacccaagcttagatttattgaaagggcaccactttgtgccaaaagtaaggaaggagaacctaaaanttttaagttgacatacgggggaccttccacttgaagctacgggagttttacagaagggcaattttgcaatcttngggatttgggtgggtgggnaacctgcatttgggggccacttttggaaatgatgcggccttgacaa

SEQ ID NO: 19206 - DNA, 1265 bp, Homo sapiens
  SIMILAR (281)..(916): 451254mologous to Homo sapiens 28.4 kDa protein,accession number AF183428,Smith-Waterman Score=288.
actcaacctcccccggaactcaacccccgtcgctcgagtttctttcgcttccgtcgggactctgcggagtggacccgagtgaacacaacttccggccccactgagcggtgtcctgagccgattacagctaggtagtggagcgccgctgcttacctgggtgcaggagacagccggagtcgctgggggagctccgcgccagccggacgcccgtgaccatgtggaggctgctggctcgcgctagtgcgccgctccatgcggttgcccttgtcagattcctggggcactcctccccgccagtgctggcgtaaagacactgctcccagtaccaagttttgaagatgtttccattcctgaaaaacccaaagcttaagatttattggaaagggcacccacttgtgcccaaaagtaaagaagagaaccctaaaaatttaaagtgacaatacggggacccttcccactgaaagcctacggagttttacagaaaggcaatttttgcaatcttgggcattggggtggttggctacctgcattgggggccacttttgaaaatgatggcgcctgacaattcaaccggctctatggaccccaagaacatggtttgccatatggcgaagtaccagcccctttcaagcccatcactcgcaaaagtgttggggcatcgcatgggggggaggcaaaaggtgctatttgacactacctgacaccctgtgaaggctggccgccttgtttgtagagatgggtgggcgttgtgaatttgcaagaagtgccaaggtttccttgacccaggttgccctacgaagttgccccttcgccagcaaaaggctgtgagcctgcgggactcctagagaaggatgcgaacaagatcaagaggaaagagaacgtcaacaacccagaaccccttggaccatttgagcggaatagccgactgcccaacatggctgggcatacgggaaagtacctgagccccatatgacgttgaccccacaaggggaaatacttggggcaaggttctacatgcccaaaacgtgtgtagtgagtgtaggagatatactgtatataggctactgaaagaacggattctgccatttctattcccctcgagcctacccgactgaagtctttgggtagctcttaagaccataactaagtgagcagcatttgagtagatttctgaaaaacaatgttatttgttgatttaaaaagaaaactgtatttttattaaataaaatttaaacatcacttcaggaaaaaaaaaaaaaaaaaaa

SEQ ID NO: 19207 - DNA, 541 bp, Homo sapiens
  SIMILAR (43)..(315): 801254mologous to Homo sapiens vacuolar H+ ATPase proton channel subunit,accession number M62762,Smith-Waterman Score=346.
  misc_feature (1)...(541): n = a,t,c or g
ccgcctcgggccgcagagcttgccccctccccacccgcagacatgttcgagtccaagaacggccccgagtatgcttcgtttttccccgtcatgggcgcctcggccgccatggtcttcagcgccctgggccctgcctatggcacaaccaagagcggtaccggcatttcggccatgtctgtcattcggccggagcagatcatgaagtccatcatcccagtggtcatggctggcatcatcgccatttccggcctggtggtggcagtcctcatcgccaactccctagagtgctctgtgtatgcggatgatttagaaatgtcatttctctttcctcggatgtttatttataaagatctggcctgttcctgcgtctccggaacggcccttgtttcccagctatttataaccttagttagagggtccccctgtgggttcctgttgtttagacttcctggatggaaccgccctccccgccgggcccgtggccctgcacggaactgtgtcccccaaagtttttggatgtgnnnnnnnnnnnnnnnnnnnn

SEQ ID NO: 19208 - DNA, 1261 bp, Homo sapiens
  SIMILAR (249)..(605): 451254mologous to Homo sapiens vacuolar H+ ATPase proton channel subunit,accession number M62762,Smith-Waterman Score=147.
  misc_feature (1)...(1261): n = a,t,c or g
acgcgtctcccccacggtgcgaagtgggtacggctcgcaggggcggggccaggtcatgtgacgcggccgcgccgccattttgttctgcggtgctggtatttagagcgcagcggctgacgggccggatcgccttcgccgccgcccgcccgcaaaccttcgtgcccggcccgtcctcgcccccgcctccgccaccgcctcggcccgcagagcttgctcccctccccacccgcagacaatgtccgagtccaaaacgctgccccgagtatgcttcgtttttcgccgtcatgggcgcctcggccgccattggtcttcagcgccctgggcgctgcctatggcacagccaaggagcggtaccggcattgcggccatgtctgtcatgcggccggagcagatcatgaagtccatcatcccagtggtcatgggctggcatcatcgccatgttacggcctgggtgggtggcagtcctcatcgccaactccctgaatgacgacatcagcctttacaaaagcctttctccagctgggcgccggcctgagcgtgggcctgagcggcctggcacagccggcgtttgccaatcggattcgttgggggacgctggcgtgcgggagcaccgccatgcatgccgccgacatattccgtggggcatgattcctgattctcatctttcgccgaggtgcttcgcctttaacggtctcatcgttcgccctcatccttttccacaaagtagaccttttccgagcccaccagcccacagaatatttgtaaaggaccacccctcctcattccagaaggaacagcctgacacatacggcaacggccgcccgccgcccaagtaagttggtcttgtaacatgcgcaagtgtcctagtgcccatcgttctgtttcccccgccttgcccccgccncgccccgtgccgtgggacatctggggcccactcattcgccccttccagggcccccggcggccccacccccttaggagtggttttgtgttatggcgggtggattttaggatttgttcattttttctttaatgggatgttttattttattaaagatctgggcctgttcctgcggtctgcgggagggccccttgttttcccagctatctattaaccttagctagaagtgtcgccttgtggggttcctgttgctgagacttttcctggatggagccagccctgtctatccgcgcccgtggccctgcgcggagctgtgtcccataaaagtttttgggtggtgaaaaaaaaaaagaaaaaaaa

SEQ ID NO: 19209 - DNA, 297 bp, Homo sapiens
ttttttttcacaagcacgtgcactttattgaatgacactgtagacaggtgtgtgggtataaactgctgtatctaggggcaggaccaatctaccctgtaagaccttctctggtcaaaaaacaaacaggattaattttccctcctctgacttgcaacagtacgtaacggtagtaactcttgaagtgcatcggcccatcatactaaatcaaaatcagactgtctctcctgtgaattcctctagtgcagggggcatgtcttacttgtcttataaataatagtaaaaaaatgataaaggtac

SEQ ID NO: 19210 - DNA, 934 bp, Homo sapiens
  SIMILAR (325)..(735): 441254mologous to Homo sapiens interferon-inducible protein,accession number X84958,Smith-Waterman Score=164.
ctagtcctgacttgagtttctgatgaggaagcctctctccttagccttcagcctttcctcccaccctgccataaagtaatttgatcctcaagaagttaaaccacacctcattggtccctggctaattcaccaatttacaaacagcaggaaatagaaacttaagagaaatacacacttctgagaaactgaaacgacaggggaaaggagggctcactgagcaccgtcccaagcatccggaacaccgacagcggccacttagctccacgcagaaaaccacaacttctcaaaccttcactcaacacttccttccccaaagcccggaagatccacaagggggaacatgaggtggctagtgctgggggcaaccccccagcacccatccttcccaaggtcccaccgtgattcaacatccacaggcgaggacctccgtggcccgaccatgttcgttttgggtccctgtttcaacaccctcttcttggaactgggtgctgtctgggggtttcattagcattccgcctacttccgtgaaagtctagggacacagggaagatgggtttgggcgacgttgaaccgggggcccaggccttatgcctccccccgcccaagtgcctgaacatcttgggccctgattctggggcatccttcatgaccattggattcatccttgttactggtattcggctctgttgacagtcttaccatattatggttccagataatacagggaaaaacggggggttactagttaggccgcccatagcctgcaacctttgcacctccactgtgcaatgcttggccctgcgacggctggggctgttgcccctgcccccttggtcctgcccctagatacagcagtttatacccacacacctgtctacagtgtcattcaataaagtgcacgtgcttgtgaaaaaaaaaaaaaaaaaaaaaaacc

SEQ ID NO: 19211 - DNA, 325 bp, Homo sapiens
  SIMILAR (2)..(256): 951254mologous to Homo sapiens Berg36,accession number X99404,Smith-Waterman Score=409.
  misc_feature (1)...(325): n = a,t,c or g
cttctccagccaggagctggcaagcctctttgcccctagcatggggctgcccgggggtggctccccgaccaccttcctcttccggaccatgtccgagtcccctcacatgtttgactctccccccagccctcaggattctctctcggaccaggagggctacctgagcagctccagcagcagccacagtggatcagactcccccacctngnacaaatcaagacgcctgcccatcttcagcagactttccatctcagatnactaagncagggtctgcaggaaggaaggctgaaaaagcggacgaagatgttggacttaagtgggactt

SEQ ID NO: 19212 - DNA, 3503 bp, Homo sapiens
  SIMILAR (208)..(1122): 691254mologous to Homo sapiens ERF-1,accession number X79066,Smith-Waterman Score=976.
  misc_feature (1)...(3503): n = a,t,c or g
atggggagggcccggaagtcgggcctgggacagaggagccggcccaccgcctcccggtcggaagcggcagtgcagcccggagtcagaaaggcgaggggcgccgggaactggcgtgtgggactccagacaggagaggctgcgccttccccgcaccgggaccttcgcgacacaccagatcctcgcccctggctcgcgcgaacgcacaggatgaccaccaccctcgtgtctgccaccatcttcgacttgagcgaagttttatgcaagggtaacaagatgctcaactatagtgctcccagtgcagggggttgcctgctggacagaaaggcagtgggcacccctgctggtgggggcttccctcggaggcactcagtcaccctgcccagctccaagttccaccagaaccagctcctcagcagcctcaagggtgagccagcccccgctctgagctcgcgagacagccgcttccgagaccgctccttctcggaagggggcgagcggctgctgcccacccagaagcagcccgggggcggccaggtcaactccagccgctacaagaccggagctgtgccgcccctttgaggaaaacggtgcctgtaagtacggggacaagtgccagttcgcacacgggattcacgagctctcgcaggctgaccctgcacaccaaggactagacggagctgtgccgcaccttccacaccatcggcttttgcccctacgggccccgctgccacttcatccacaacgctgaagagcgccgtgccctggccggggcccgggacctctccgctgaccgtccccgcctccagcatagctttagctttgctgggtttcccagtgccgctgccaccgccgctgccaccgggctgctggacagccccacgtccatcaccccacccccctattctgagcgccgatgacctcctgggctcacctaccctgcccgatggcaccaataacccttttgccttctccagccaggagctggcaagcctctttgcccctagcatggggctgcccgggggtggctccccgaccaccttcctcttccggcccatgtccgagtcccctcacatgtttgactctccccccagccctcaagattctctctcggaccacagagggctacctgagcagctccagcagcagccacagtggctcagactccccgaccttggacaactcaagacgcctgcccatcttcagcagactttccatctcagatgactaagccagggtagggagggacctcctgcctactccagacccctaccctgcaccccacatccccataccctcttctccctacccatcccattccccacaggccctacattaacaaggttaaggctcaacccctttcccccagcacctcagaatgtgccctccctctccccctcataaccccacctaacataaggacaagtcaatttgtcagtagcttcttctgggcttgaaaccccctccctggattttatagcccagttaccatgcataacagacaagtcccatattttgtcagtagatgcctttttttttccgggcttaaggctttaagtgccaaattcacaagagaaaaagcagtaacagtttacagaagcaacttagtgccttgtaatctaactttgtcactgtgactacattaccttcttcagcgccagaggggaccccgtgggcctccccggagcctctgcccatggcggggtggagacccggaaccagcagccccctccactggcgacacaactgcaccttccctcatttcagtctcccgcacacttattcctcctcccctcttcccggtggcacctctccaccctgtaccagcccccccaccccccccacccctgccccttggaagagttgttgccagacccagggttttgggggaaacctggtcttgacattcaaaacctttttcttcccgatctgacacccctgttgacctaatcttgcctgggtttgtgtaggtctgcaggaaggaaggctgaaaaagcggacgaagattttgacttaagtgggactttgtgatttaattttttcttttttttaagtggggaggaaggggaagctagatggactaggagagacttgattttggtgctaaagttccccagttcatatgtgacatctttttaaaaaaaataacaacaaaaaaaaaaatgagagaaaagctaaaaaaaaaaaaagtaaggggtgagcagttaatggtattcattccacatacaatatctgtgtaaaacgatttcctggagaagtagctttaagtggtttttgctctagaataccgtaggtctatccttagagcactcanccgcccagctttcttccctgggttttaaacttcaatataactttcaggaaattgggagagcaaaaattttgcttgtcactggcacatccaatattaaaaaagcttattttaaccttttcaaaaccgtatttattggcccaaactatgctttttttttgttaattttgttcatatttatccgggatgacaaatccatagaatatattcttttatgttaaattatgatcttcatattaatccttaaaattttgtgacgtgtctttttccttttttttccacagttttaatatattattccttcaacggacattttttgtaactttacacttttttgggttattttatttttaaaaaaatggaaaaattaattttaaaaaaatggcaaaaactgttgggattatttattttaggaaattcccccctttgtgttgggactgcaaattgagtttctttctctttagggcctttcacaactagggactgaggaatgtatgtaaaaaggttctgtggacagtacagaaggaaaacaactttttatgtatagcttctaaaagggggaaaagaaaaaaaaaaaaaaaaaaaaaaagagaaaccctttgacttcccacgtgcccatctcaagacattccactcacagatttgaggttcctggattccaggtctggagttttccaatgttaatgtaaacaggaactgggcacacacacattaagatgaatgtaattattattcctcttggctggtcactaccgtcgctttcatatttctctttcttatgtgtgaaatttatttaaaagcaaaaaaaaacttttgtgtaacgacctatttgcagatttaaaacatcatataaaccccgttttttcaagaaacattgatggtggagctggttttacttggttttggtttgactttgccagtaaggttctccccttgtataccttgcaagtcctggggagggggaggcggagagagagggctgtggctgtgggtggcggcatctctcatccctataagctaagcctatagctcccttccttgatgctggcagtttgctgcacttagaggggacggggtggaggttttctgcaaaggagcctgtacttcctgctgtattacttctgaaaagactgtgcagtgtgttagttgttggctgaatagcagcgggcccagccttgccgacacttgtgtggcc

SEQ ID NO: 19213 - DNA, 456 bp, Homo sapiens
  SIMILAR (363)..(455): 1001254mologous to Homo sapiens Human secreted protein, SEQ ID NO: 5762,accession number G01681,Smith-Waterman Score=160.
ggaggagtatgctcacgccaagcttggcacgagggcaggtgagcgagctcagggacctctgggttcacgggggcggggtgtctcctactgtgccggcggctgtgggcgaggcagggcgaggcgggcccaacctggggccaacttctcgtgtacctgtcccggttgtgggcccggcacccgtgcccgcttctctggtgccctaggtcaaggcgtccccggcacagtcagctttcctggccctgtccctgcctcgcaagaagcgtgggcccaagcagcggcggccgggtgaagagcggaggcacctctttcttctttttgaggacagcattgcctgctcccgtggggtgtgtttccattcctcaagactgaaccggccgctgacactctcggagaagattgtgtatggacacctggatgaccccgccagccaagaaattgagcgaggcaagtcgtact

SEQ ID NO: 19214 - DNA, 430 bp, Homo sapiens
  SIMILAR (1)..(189): 961254mologous to Homo sapiens dJ347H13.1 (aconitase 2, mitochondrial (Aconitate Hydratase, EC 4.2.1.3, Citrate Hydrolyase)),accession number AL023553,Smith-Waterman Score=321.
atcgtggaataccacgggcctggtgtagactccatctcctgcactggcatggcgacaatctgcaacatgggtgcagaaattggggccaccacttccgtgttcccttacaaccacaggatgaagaagtacctgagcaagaccggccgggaagacattgccaatctagctgatgaattcaagggatcacttggtgcctgaccctggctgccattatgaccaactaattgaaattaacctcagtgagatggtgtgaccagacatgcttcctgctccccgcttagcccacggagtgactgtggttgtggtgggggggttcttaaaataactttttagcccccgtcttcctattttgagtttggttcagatcttaagcagctccatgcaactgtatttatttttgatgacaagactcccatctaaagttaaaaaa

SEQ ID NO: 19215 - DNA, 232 bp, Homo sapiens
  SIMILAR (2)..(88): 1001254mologous to Homo sapiens aconitase precursor,accession number AF086790,Smith-Waterman Score=152.
actggcccatggcctcaagtgcaagtcccagttcaccatcactccaggttccgagcagatccgcgccaccattgagcgggacggctatgtgagtgcccatatccccctgcccatctcccccaccccatgctgagtaatgcctccaggcggcacaagccacaggtaagaggcgtatcttttgacaagacagccccttgtgcacagggtacagagccccagaagttggaggggg

SEQ ID NO: 19216 - DNA, 455 bp, Homo sapiens
  SIMILAR (330)..(455): 971254mologous to Homo sapiens aconitase precursor,accession number AF086790,Smith-Waterman Score=219.
aatgcatctggtgtggggcccggagcctgtccctgtctcacccaacttccttccacacacacttgcctctgccaagcaccaatgggtggcttctgtcttctttgccactgcaaacaaccacgtgcctctgtcccctcggggcctcgtttgggtctcattcacgcaggcttcacttgcccttaggcagcaggcgaggaagggcccctccagcccctttaccgggagcctcaggatgcccaggcgccaggtgggtgaggccaggcaggtagggccagacaggtgaggacggtgccctcctctgccttataaccttacccccgcttgcctgacagaaacatggcatcaggtgggtggtgatcggagacgagaactacggcgagggctcgagccgggagcatgcagctctggagcctcgccaccttgggggccgggccatcatcaccaagagctttgcc

SEQ ID NO: 19217 - DNA, 464 bp, Homo sapiens
  SIMILAR (253)..(59): 411254mologous to Bordetella bronchiseptica pertactin (P.68),accession number AJ250095,Smith-Waterman Score=99.
tttcgtatggcgccctacagcctactggtgactcggttgcaggtgagcgagctcagggacctctgggttcacgggggcggggtgcctcctactgtgccggcggctgtgggcgaggcagggcgaggcgggcccaacctggggccaacttctcgtgtacctgtcccggttgtgggcccggcacccgtgcccgcttctctggtgccctaggtcaaggcgtccccggcacagtcagctttcctggccctgtccctgcctcgcaagaagcgtgggcccaagcagcggcggccgggtgaagagcggaggcacctctttcttctttttgaggacagcattgcctgctcccgtggggtgtggttccattcctcaaggtgaggacaaggtgactagggggcgcggtcgttgttgagtcttctaggcccagttcctgaggcctcacttcccatctcttagcaacagaggcatga

SEQ ID NO: 19218 - DNA, 862 bp, Homo sapiens
  SIMILAR (593)..(435): 1001254mologous to Homo sapiens dJ347H13.1 (aconitase 2, mitochondrial (Aconitate Hydratase, EC 4.2.1.3, Citrate Hydrolyase)),accession number AL023553,Smith-Waterman Score=272.
gaggcttctaatgggcaagagtccctggagctagagaccttggctggagtctcttctctccaccccaataattccccctccaacttctggggctctgtaccctgtgcacaaggggctgtcttgtcaaaagatacgcctcttacctgtcccactggccaatgcaggggccacaagcattggccaggacaatgccacccagatccctcaagatctgtgcctgccagggagagaggaagacagaatgtcaagggtgggtgagagtctgatgggaaggggtgatgtggtggctgcaggacgaagtgctgtactggaaccccagggcagccactgggacctgccccagccccggcccaacaggcctctgggcttgtgccgcctggaggcattactcagcatggggtgggggagatgggcagggggatatgggcactcacatagccgtcccgctcaatggtggcgcggatctgctcggaacctggagtgatggtgaactgggacttgcacttgaggccatgggccagtgcctgcttggccacagctgctgagcgccccatatcttcatagcttgaattggtgcagctaccaattagacctggtgcattgtgggtggtggggttaagggtcaggaggagacagtgagcagaggtctccacctgacttcaaattatccagacttggccaaaagagttcaccatctgggctgggccagagacttttttaacagagaccagttgcaagcaaccgaaatatccaacaataaaggacaggctaactcatgacgtggcgtcatttgaagaaagatgctgtagccattggccatgatgctgaacacattaggactatgaccccttttacagcaatt

SEQ ID NO: 19219 - DNA, 777 bp, Homo sapiens
  SIMILAR (161)..(499): 751254mologous to Homo sapiens Aconitase like protein,accession number R46070,Smith-Waterman Score=472.
ccctgggagtgaagtcccaaagggattggcgtgagctgcgggcctctctccgggtggtcttacccaaagatgtatcctgaaggtgcaaggatcctccggtttaaaggtggcacagtgcaaatcgtggaatccacggggcttggttagactccattctcttgcactggcatgcgacaattctgcaacatgggtgcagaaattggggccaccacttccgttgttcccttacaaccacaggatgaagaagtacctgagcaagaccggccgggaagacattgccaatctagctgatgaattcaaggatcacttggtgcctgaccctggctgccattatgaccaactaattgaaattaacctcagtgagctgaagccacacatcaatgggcccttcacccctgacctggctcaccctgtggcagaagtgggcaaggtggcagagaaggaaggatggcctctggacatccgagtggacgccctggcatgccagtcactggcatttggtgctgcttgggtacagtgtggctgtgaagagcatggagcctggagccagatggcctgggcttgaatcctggctctgccacctaacagccactaacagctgagtgaccctgagcaaactacttcactgtctatgtgtgggttccccatctgtaaaacaggagtcatgatcgtactgacacctttgaaggtggtgttgggcctactgctgctatcaccaatgagaaaaataaataaaaaataaagttgtctggagaagtgccaaaaaaaaaaaaaaaa

SEQ ID NO: 19220 - DNA, 3693 bp, Homo sapiens
  SIMILAR (332)..(1951): 411254mologous to Rattus norvegicus mitochondrial aconitase,accession number AJ243266,Smith-Waterman Score=655.
  misc_feature (1)...(3693): n = a,t,c or g
tttcgtgcgtccccggcacagacagctttcctgttcctgttcctgcctcgcaagaagcgtgggcccaagcagcggcggccgggtgaagagcggaggcacctctttcttctttttgaggacagcattgcctgctcccgtggggtgtgtttccattcctcaagaaagctctgggtgttgcggcaataacaatgtggcctcagtcctgtgccaacgggcgcggggtggcgatgagccactttgagcccaacgagtacatccattatgacctgctagagaagaacattaacattgttcgcaaacgactgaaccggccgcttgacactctcggaggaagattgtgtatggacacctggatgaccccgccagccaggaaattgagcgaggcaagtcgtacctgcggctgcggccggagccgtgtggccatgcaggatgcgacggcccagattggccatgctccagttcatcagcagcgggctgtccaaggtggctgtgccaatccaccatccactgtgaccatttgaaatgaaccccaggttgggggcgagaaagacctggcgccgggccaaggacatcaaccaggaagtttataatttcctggcaactgcaggtgccaaatatggtgtgggcttctggaagcctggatctggaatcattcaccagattattctggaaaactattgcgtaccctggttgtccttctgattgggccctgacttccacacacccaatggtggcggaccttgggggcattctgcattggaagttgtgggtggccgaatgcttgggaatggaatggcttgggaatcccctgggaggctgaagtgcccccacggtgattggcgtgaagctgacgggctctctctccggttggtcctcacccaaagatgtgatcctgaaggtggcaggcatcctcacggtgaaaggtggcacaggtgcaatcgtggaataccacgggcctggtgtagactccatctcctgcactggcatggcgacaatctgcaacatgggtgcagaaattggggccaccacttccgtgttcccttacaaccacaggatgaagaagtacctgagcaagaccggtcgggaaggacattgccaatctagctgaatgaattcaaggttcacttggtgcctgaaccctggactgccattatgaaccaactgaattgaaaattaacctcagtgagctggaagccacacattcaatggggccctttcacccctgaccggggttcaccctgttggcaggaagtgggcaaggttggcagagaagggaagggttggcctcttggacatccgaggtgggtcttaattggtagcttgcaccaatttcaagctatggaagatatgggggcgctcagcagctagtggccaagcaggcactggcccatggcttcaaagtgcaagtcccagtttcaccatcactccagggtttccgaggcagattccgcgccacctttgaggcgggacggctatgcacagatcttgagggatctgggtgggcattgtcctgggccaatgcttgtggcccctgcattggccagtgggacaaggaaggacattcaagatgggggagaagaacacaattcgtcacctcctacaacaggaacttcacgggccggaaccgacccaaaccccgagacccatgcctttgtcacgtccccagagattgtcacagccctggccattgcgggaaccctcaagtttcaacccagagaccgactagcctgacggggcacggatgggcaagaagtttcaggcttggaggttcccggattgcagattgagttttcccaaagggggagttttgacccaggggcagggacacctaccagcacccacccaagggacagcagcggggcagcatgttgggacttgagccccacgcagccagcgcctgcagctcctggacccttttgacaagtgggatggcaaggacctggaggacctgcagatcctcataaaggtcaaagggaagtgtaccactgaccacatctcagctgctggcccctggctcaaagttccgtgggcacttggataacattcccaacaccacctgctcattggtgccatcaacattgaaaacggcaaggccaactccgtggggcaatgccgtcactcaggagtttggccccgctccctgacaactggcccggttactaccaagaaacattggcatccaggttggggtggtgaatcggaagacgagaaactacgggcgaagggctcgagcaggggagcattgcagctctgggagcctcgccaccttgggggccgggccattcatcaccaagagtctttgccagggatccacgagacgaacctggaaggaaacagggccctgctgccttttggacctttcgctggacccggctgactaccaaccaagattcaccctgtgggacaagctgaccattcaggggcctgaaaggacttcaccccctggcaaagccccctgaaagtgcatccatcaagccaccccaacggtgaccccaggagaaccatccctccctgaaccacacctttcaacgaagacgcaagattgaagtggttccgcagctggcagtgcccttcaacagaaatgaaggaacttgcaacagtgaggcgcagtgcctccccgcgncgccccgctggcgtcaaagttcagctcccacgtgtgcccatcagttggatccgattccttccagccatggcttccctattcccaagatgggtgtgacccagacatgcttccttgctccccgcttagccccacggaattaacctgtggttgtggtggggggggttcttaaaattaacttttttagccccgtcttcctattttgaagtttggttcagattcttaagcagctccatgcaactgtatttatttttggatggacaagactcccatctaaagtttttctcctgcctggatcatttcattgggtgggttgaagggattctagagaaccttttgttcttgcaaggaaaacaagaatccaaaaccagtgactgttctgtgagtgattggtgtctgtgccgtttgttgtcaagtccagggtccagggaagggtcttttcagtcaagggtcagtgggaggcccaacagccacagccacagatgggatccatcactgcagtgaagggagggagcagggcctagatgggtgggagggagcgggggcaagctgggtggggcacttcctggggcctttggccttcacttnttccagcttcgaggacactattcttccttaggcattcgggccttcagcttgctgtttgttctttcacagccgggccattaccacctttcccgcaggctggttagggtccactgtccagccccagggctagttgctggtccaccaggagatgagagcccaggcctggctcactgatggatcccacaagcgtgtacggagccctcttctttgcagctctcactgaagtggtggcatctgctgagctgggccctgtgggggacgtgtcaacaaagctctcgtccaccaacccngaagcggatctccttcgcggtgtccatgtagaggcgtgtgctccttcctccgctcgtacttccacacccacacctgctcccgttcgtctaactttgtttgctggctcagtgactctggggggatgagatgtcatcgaagagccctagaagagtgcactccttctggcctgaccttgtgcggattttggcctcaag

SEQ ID NO: 19221 - DNA, 1311 bp, Homo sapiens
  SIMILAR (79)..(399): 571254mologous to Homo sapiens hp2-alpha,accession number X00606,Smith-Waterman Score=276.
atgcccatggccaccgtcctgcttttggcaccagttctcttccagtgccctgggagctgtcattgccctcctgctctggggacagcttttgcagtggactcaggcaatgatgtcacggatatcgcagatgacggctgcccgaagccccccgaattgcacatggctatgtggagcactcggttcgctaccagtgtaagaactctacaaactgcgcacagaaggagatggagtatacaccttaatgataagaagcagtggataaataaggctgttggagataaacttcctgatgtgaagcagagacggctgcccgaagccccccgagattgcacatggctatgtggagcactggttcgctaccagtgtaagaactactacaaactgcgcacagaaggagattcctcacagtatccctctgaacagatttattgttttcactttgctgataaggaaactgaggcacagacaggagtgtacaccttaaacaatgagaagcagtggataaataagctgttggagataaacttcctgaatgtgaagcagggtgtaaaacgcactgatgtcactctctctcaccaaggtctggccatctctgtgaagctccctcacaggcaccctgcagattcatcaataaacttcaacaggggaggaagaagcatgatccgtagggctgctatggcaatttgggaacatgaacacctcctggtcaaaacgttcctactgtggaccaaacatttgctgcccaagcagactcctgggagaaaacttggtgtccttggagccttaatgggatgcagtgagcttaagtccttccaagagcttcccatcagtctgcccttagtcatcctcgagcggatgtatggtgtgacctggggctgtcatttccctcctgctctggggacgacagctttttgcactgtactaggcaatgatgtcacggatatttcagatgaccgcttcccgaagcccctgagattgcaaatggctatgtggagcacttgtttcgctaccagtgaagaactactacagactgcgcacagaaggagatggagtatcaccttaaatgataagaagcagtggataaataaggctgttggagataaattcctgaatgtgaagcagaaaatgcaacaggaaagacattgcccctactttaacactctatgtggggaaaaagcagctttagagattgagaaggtggttctacaccctaactaccaccagggtctggccatctctgtgaagctctcctcacaggcacctgcagattcatcaataaacttcaacaggttagcgctagtaggccaatag

SEQ ID NO: 19222 - DNA, 1595 bp, Homo sapiens
  SIMILAR (41)..(799): 541254mologous to Homo sapiens haptoglobin precursor,accession number X00442,Smith-Waterman Score=550.
  misc_feature (1)...(1595): n = a,t,c or g
cccacgcgtccgcccacgcgtccgggcaagaccaaccaagatgagtgccctggggagcttgtcattgccctccgtgctctggggacagcttttttgcagtggactcaggcaatgatgtcacggatatcgcagatgactggctgcccgaagccccccgagattgcacatggctatgtgggagcactcggttcgctaccagtgtaagaactactacaaactgcgcacagaaggagatggagtgtacaccttaaaacaattgagaagcagtggattaaattaaggctgtttggagattaaacttccttgaattgttgaagcagatgacggctgcccgaagccccccgagattgcacatggctatgtggagcactcggttcgctaccagtgtaagaactactacaaactgcgcacagaaggagatggagtgtacaccttaaacaatgagaagcagtggataaataaggctgttggagataaacttcctgaatgtgaagcagtatgtggggaagcccaagaatcctggcaaacccagttgcagcgggatcctggggtgggacacctgggattgccaaaggagctttttcccctgggccaggcttaaggatggttttccccaccattaatcttnaacccaccaggggccacgctggatccaattgaaccaatggcttgcttgaccacggcttaaaaatcttctttccttgaaccatttcagaaaattgccaacagcgaaaagacatttgcccctacttttaacattttatgtgggggaaaaagcagcttgtaggagattgaggaaggttgttcttacaaccttaacttactcccagggtagatattgggctcattcaaacttcaaacagaagggtgttcttgttaattgaggagagtgatgcccatctgcctaccttccaaaggattatggcagaagtaggggcgtgtggggttatgtttcctggctggggggcgaaatgcccaattttaaaatttactgacccatctgaaagtatgtccatgctgccctgtggcctgacccaagacccaatgccataaggcaatttatgaaaggccaagcaacaagtccccccgaaaaagaaagaacacccgaaagaagcccctgtaaggggtgcaagcccccatactgaaatgaaacacacccttcctgtgcctggccatgtcctaaaggtaccccaaagaaagacaccctgcctatgggcgaatgccggggcaagtgccctttgcccgttccaccgacccctggaggaggacacccctggtatgccgactgggatccttaagctttgataagagcttgtgctgtggcttgagtatggtgtgtatgttgaaggtgacttccatccagggactgggttcagaagaccatagcttgaggaactaattgcaaggcttggccggaaagccctttgccttgaaaagcaagattttcagcctgggaagagggcaaattggacggggatttggaccaggattggatgcgataatgattgtggtttgaaagctgaatgggtgccagcccctgcattgctgagtcaatcaataaagagctttcttttgacccaaaaaaaaaaaaaaaa

SEQ ID NO: 19223 - DNA, 1197 bp, Homo sapiens
  SIMILAR (92)..(601): 611254mologous to Homo sapiens Secreted peptide clone pe503_1,accession number Y28576,Smith-Waterman Score=430.
gcacgagcgcaaatagggtcactgggccgcttggcggtgtcgttgcggtaccaggtccgcgtgaggggttcgggggttctgggcaggcacaatggcgtctcgagcaggcccgcgagcggccggcaccgacggcagcgactttcagcaccgggagcgcgtcgccatgcactaccagatgagtgtgaccctcaagtatgaaatcaagaagctgatctacgtacatctggtcatatgggctgctgcatggttgctaagatgagccgtgggacaccctgaggctcttgtcacatgatcaggtggccatgccctattcagtgggaatacccgtattttgctgagcatttttgccctctctcttggggccttcttttccttttccccgcaacaacattaggcttacctgggtgctctccatgaatcaagcatggggatttttttttccatcggttccattcattttattgggcagcatggagatgtgccctggctgcacagcagcttctaccgccatggcaaggcctaccgtttcctctttggtttttctgccgtttccatcatgtacctggtgttggtgttggcagtgcaagtgcatgcctggcagtttgtactacagcaagaagctcctagactcttgggttcaccagcacacaggagaagaagcataaatgaagcctctttggggtgaagcctggacatccccatcggaatgaaaggacactagtacagcggttcccaaaatccccttcctggtgatttttagccagctgtgatgttggtaacctggtgcagacccaggcccaaagttcctggaaagcctcccttttgcccatctgcctgaggtggcaaaactataatttatttcctggttggctagaactgggtgacccgacagcctatgaaacaaattttcagctgtttgaaagttgaactttgaggtttttcttttaaggattgagcttcgtccttgcctctactcggtcattctccccatttccatccattaccccttagccattgagactaaaggaaatagggaataaatcaaattacttcatctttaggtcccgggtcaggaaacatttgggcagctgctcccttggcaggctgtggtttcctttgcaaagcattttaattaaaaacctcaataaagatggccctgcccacactgtgccttgtgtttggggctttatagagaaa

SEQ ID NO: 19224 - DNA, 1197 bp, Homo sapiens; identical to SEQ ID NO: 19223
  SIMILAR (92)..(601): 611254mologous to Homo sapiens Secreted peptide clone pe503_1,accession number Y28576,Smith-Waterman Score=430.

SEQ ID NO: 19225 - DNA, 1364 bp, Homo sapiens
  SIMILAR (568)..(1263): 711254mologous to Homo sapiens 17 beta hydroxysteroid dehydrogenase type 2,accession number L11708,Smith-Waterman Score= 753.
ggcacgagcagaactcaggctgcctccagccagcctttgcccgctagactgactggccctgatcacttgaaggtgcagcaagtcactgagaatgagcactttcttctcggacacagcatggatctgcctggctgtccccacagtactatgtcggacagtattttgcacatacaagaagagctcagggcagctgtggagctggatggtctgcctggcaggcctctgtgcagtctgcctgctcatcctgtcccctttttggggcttgatcctcttctcggagtcatgcttcctcatgcatacttacttatctggccaagaattgctacctgtggatcagaaggcagtcctgccgacaggtggtgattgcgggctcgaccatgctttgagcaagtatctggatgagctgggcttcacggtatttgccggagttttgaatgaaaatggcccaggagctgaggaattgcgaagaacctgctctccgcgcctctcggtgctccaaatggacatcacgaagccagtgcagataaaagatagcttacagcaaggttgcagcaatgctgcacgacagaggactgtgggctgcgatcaacaatgctggggtgcttggctttcccaactgatggggagcttcttcttatgactgactaccaacgatgcatggtcgtgaacttctttggaactgtggaggtcacaaagacctttttgcctcttcttagataatccaaaggtaggctggtgaatgtcaccagcatgggaggaggggccccaatggaaaggctggcatcttatggctcatcaaaggcggctgtgaccatgttctcatcagttatgagactggagctttccaagtggggaattaaagttgcttccatccaacctgggagggcttcctaacaaatatcgcaggcaccagtgacaagtggggaaaagctgggagaaggacattctgggaccacctcccccgctgagggtacaggaagactacggccaggactacatcttagcacagcggaatttcctcctattgatcaactcgttagccagcaaggacttctctccggtgctgcgggcacatcccagcaggctatcttggcgaagagcccttttgcctattacacgccagggaaaggcgcttacttgtggatctgccttgctcactatttgcctattggcatatatgattactttgctaaaagacattttggccaagacaagcccatgcccagagctctaagaatgcctaactacaagaaaaaggccacctaggcaatggaagccctcaaagaagtcggaatgtcatagtcttgaaatgaaagggaaactgggaaactgggtttctcattaaagttgtttccaactctgta

SEQ ID NO: 19226 - DNA, 864 bp, Homo sapiens
  SIMILAR (292)..(420): 1001254mologous to Homo sapiens MS4A4,accession number AB013102,Smith-Waterman Score=219.
atgggattaatatcagattacccagaaaatgaatatagagggagaagagaagatggcctacaactatattcagtgagcaagagaaagaagaacctcaaagatatcagagaagaattgactggagaaacagaagaaaatgtaggtttgtgtggtatcagaccaagaaaagagtttcaagaaaaaggaattaggacaatctctgagtcagcagagccttcttcctgcagggagaagtttattatttcaggatccttgtcaattgcagcaggaattagaactacaaaaggcctggttgtgcagattctgactgccctgatgagccttagcatgggaataacaatgatgtgtatggcatctaatacttatggaagtaaccctatttccgtgtatatcgggtacacaatttgggggtcagtaatgtgccctgagaacagccaccaccaatacagcagagcacatgcacaggcaaggccacctaagctcccaggtatctgccatggagtgatgggccatgagttacacacagtctcactcctggagaaagctctgcccttctgctatattgattgtctcttcctggtgggctcagatgaagggactgcccaacaaggactagacaccctgttgatccacatgcagcaacccagctgggccattaacacagacaagataaaaagacctaataatatccaaatgaaactaataaaactcctgggcataattcagaaagcagaaaagcctctcattgcaaagatgattgtcaagattttgaacttctctgtccctccccaccaaaaaccacaaaaaaaaccccagcaattggtagacctatttggctactggtatcactcctacaatacctga

SEQ ID NO: 19227 - DNA, 1710 bp, Homo sapiens
  SIMILAR (251)..(514): 891254mologous to Homo sapiens 21-AUG-1997 Human high affinity IgE receptor-like protein (IGERB) cDNA,accession number Z32842_cd1,Smith-Waterman Score=384.
ggcacgagagcagacattgcaggcctgaagaaaggtggtcacaagaggggtggaacattcctgcaaatggtttcaatatatgcacgatgtctcgatataggaaagaaattacgtctttggaacaacggatataactcaaatatacttggagctttaaaaattaaaaggagagagattcgagcaccttttctgctgccatgacaaccatgcaaggaatggaacaggccatgccaggggctggcactgagatgtgcaccagctgggaaacatggctgtcatacattcacatctgtgggaaggattgcaagagaagttcttgaagggagaacccaaagtccttggggttgtgcagattctgactgccctgatgagccttagcatgggaataacaatgatgtgtatggcatctaatacttatgggaagtaacccctatttccgtgtatatcggggtacacaatttgggggtcagtaatgtttattatttcaggatccttgtcaattgcagcagggatttagaactacaaaaggcctggtccgaggtagtctaggaatgaatatcaccagctctgtactggctgcatcagggatcttaatcaacacatttagcttggcgttttattcattccatcaccccttactgtaactactatgggcaacctccaaattaattgtccatggggactatgtcccatcttaaaggggtctggatgggcatggtgctcctcttaagtgtgctggaattctgcattgctgtgtccctctctgcctttgggatgtaaagtgctctgttggtaccccctggtgggggttgtgttaattctgccatcacattcttcacatgggcagaaacagcatcttccacaacacttaatgagggtttgaggggcacccaaagattcaacaggcaaatgcttcccgaaatctatgcctgactgtgacccaagagcctcacatgagaaattaccaagtatccaacttcgatactgatagacttgttgatattattattatatgtaatccaattatgaactgtgtgtgtatagagagataataaattcaaaattatgttctcatttttttccctggaactcaataactcatttcactcggctctttatcgagagtactagaagttacattaataaataaagcaaattaatgaggcaacagcacttgaaagtttttcattcatcataagaactttatataaaggcattacattggcaaataaaggtttggaagcagaagagcaaaaaaaagatattgttaaaatgaggcctccatgcaaaacacatacttccctcccatttatttaactttttttttctcctacctatggggggaccaaagtgctttttccttcagggaagtgggaggatggcatgggccattcttccccccttccctttttccttcttcctggcttttctttccccatgggaaagtaccttggaggtaggcacagtccgtccttggcatgtggcacggagctattcatttggaggttaaaagtatacatggggagttaaaaatcatatttaaggcttcaggtttcaacttatattttctatttcatcttcttcatttcccttctcccaccttctactgggcataattatatcttaatcatatatggaaatgtgcaacatatggtatttgttaaatacgtttgtttttattgcagagcaaaaataaatcaaattagaagc

SEQ ID NO: 19228 - DNA, 1167 bp, Homo sapiens
  SIMILAR (688)..(1164): 361254mologous to Santalum album proline rich protein,accession number AF020261,Smith-Waterman Score=151.
atgaaacgagcacaagaaaacgtggaacagacccagcacatattaggcagtatgtattataactcttcccacgaaagtccagtggaaaagggcctagcacagattatgtctgaaagacaaaattctcattccaccctaatccatgagcctctgggaggcagactgaaggaatttacgcctgccctcttccgcgcttgccggggtcgcgcccagtcacagggaaccgcgtgtgaggaccatcagtcagacagacagacgcaaagacgcacagacccggcgaggagggacagagtggagctggcgccggcctacacgtcaccgccccgctgcagcgccaacgtcggcacgtcgactcgtcgactccgggccctctgccccgcccgcgtgcgcgcgccgctccgcctcccgcctccagcctctagtccgctgggttcggaggagcagaggcggaaggtcccggcggcggcgaggatgcgccccagggcgggagcgggacgctccactttaccctggctgcccgcaacgggccaggcctgccgtctctacctctctacctgtaaatatgtggaggaaataattcctattaaaggtaaaggaaaggagagcaatttgaatgaagaaacagtagctaggactacaggtacctgccatcaagcccagcttccccaaatgttagtggaaagacaacctaatgaaaatggccctgatgacaaagagaaagaccgtccagaaaggcccagtcccttggacacatcgccgcttctagaccctcctgcagtctcggatattgctgggaaaatgtctgatgaattttcgttggcagatgcactacctgaacactcccctgccaaaacctctgctagctacccagaccatatggtgctacccacagatccagctgcagctggtcctttaggtccatggggatccatgtcttctggaccttgggtgccaggaatgggagggcagtatcctacccctaatatgccctatccatctccagggccatatcctgttcctcctcctccccaagcctctggggcagcaccacctgttccatggggcaccgttccactaggagcctggggaccaccagcaccatatcctgcccctacaggatcgtatcccacaccaggactctatcctactcctagtaatcctttctaa

SEQ ID NO: 19229 - DNA, 1067 bp, Homo sapiens
  SIMILAR (56)..(253): 961254mologous to Homo sapiens Human secreted protein, SEQ ID NO: 5165,accession number G01084,Smith-Waterman Score=350.
  misc_feature (1)...(1067): n = a,t,c or g
ctcggacccatcgccgcttctagaccctactgcggtctcggatattgccgggaaaatgtctgatgaattttcgttggcagatgcactacctgaacactcccctgccaaaacctctgctgtgagcaatacaaaacctggccaacctcctcaaggctggccaggctccaacccttggaataatccgagtgctccatcttcagtgccatctggactcccaccaagtgcaacaccctccactgtgccttttggaccagcaccaacaggaatgtatccctccgtgcctcccaccggaccacctccaggacccccagcaccctttcctccttccggaccatcatgtcccccacctggtggtccttatccagccccaactgtgccgggccctggccccacagggccatatcctacaccaaatatgccctttccagagctacccagaccatatggtgcacccacagatccagctgcagctggtcctttaggtccatggggatccatgtcttctggaccttgggcgccaggaatgggagggcagtatcctacccctaatatgccatatccatctccaggcccatatcccgctcctcctcctccccaagcccctggggcaagcaccacctgttccatggggcaccgtttccaccaggagcctggggaccaccagcaccatatcctgcccctacaggatcgtatcccacaccagggactctatcctaattcccagtaatccttttccaagttgcctttaaggaccttctgggtggttccaccaatgcctggtggcccccattcttaccattaagttaacaatggacgaagagatgcagctttgctttttgaagtacatgtatatgcacatgaatgcatatataaaatttgcttggtttcacttattagagggcatttcatgaaagaacaactcttgcacctcttcagagaagataactgcctctggtactttggatgcgtggtacatcatatgtttacaatcaggtaaaagcatagaagtaaatcattcggatgtgattttttttaaattttgggtttttttccaatngggggaaaaa

SEQ ID NO: 19230 - DNA, 295 bp, Homo sapiens; identical to SEQ ID NO: 2746
  SIMILAR (189)..(1): 611254mologous to Homo sapiens Human secreted protein, SEQ ID NO: 7083,accession number G03002,Smith-Waterman Score=194.

SEQ ID NO: 19231 - DNA, 249 bp, Homo sapiens
  SIMILAR (50)..(139): 361254mologous to Oryza sativa putative protoporphyrinogen oxidase,accession number AC069145,Smith-Waterman Score=60.
ctagacataaaggttctccaagtccccaccagactcaggagcccagctggcttcacccagtggatcctgcactggggcctcaggtggagctgcctgccagtctcgtactgtgtgcccgcactcctcagcccttgggtggtcgataggattgggtgctggaactcccgctggcccgcaagaatcgcgcgcagccccggttcccgctagcgcccctccctccacacctcgaggccgaggtgggcggatcat

SEQ ID NO: 19232 - DNA, 504 bp, Homo sapiens; identical to SEQ ID NO: 14008
  SIMILAR (334)..(456): 901254mologous to Homo sapiens human granulocyte-colony stimulating factor,accession number M13008,Smith-Waterman Score= 203.

SEQ ID NO: 19233 - DNA, 335 bp, Homo sapiens
  SIMILAR (148)..(77): 751254mologous to Homo sapiens Human secreted protein, SEQ ID NO: 7115,accession number G03034,Smith-Waterman Score=94.
gagtgaagctgcagaccttcctggtgaatgttacagctcttaaggtggcgcatctggagttgttcattcctcccggtgggttcgtggtcttgctggcttcaggagtgaagctgcagaccttcgtggtgagtgttacagctcataaaggcagtgtggagccaaagagtgaacagcagcaagatttattgcaaagagccaaagaacaaaactcccacagtgtggaaggggaccccaacaggttgccagtgctggctagacataaagattctccaagtccccaccagactcaggagcccagctggcttcacccagtggatcccgcacaggggccgcag

SEQ ID NO: 19234 - DNA, 447 bp, Homo sapiens; identical to SEQ ID NO: 58
  SIMILAR (131)..(340): 411254mologous to Streptomyces coelicolor A3(2) putative acyltransferase,accession number AL391515,Smith-Waterman Score=123.

SEQ ID NO: 19235 - DNA, 729 bp, Homo sapiens
  SIMILAR (2)..(178): 591254mologous to Homo sapiens reverse transcriptase,accession number L27428,Smith-Waterman Score=184.
tcaaccattgtggaagtcagtgtggcgattcctcagggatctagaactagaaataccatttgacccagccatcccattactgggtatatacccaaagtgagaggtgacagcatgctggcagtcctcagagccctcgcttgctctcggcacctcccctgcctgggctcccactttggtggcatttgaggagcccttcagcccccccgctgcactgtgggagcccctttctgggctggccaaggctggagcccactccctcagcttgcagggaggtgtggagggagaggcacaagtgggaaccggggctgcatgcggtgcttgcgggccagctggagttccgggtgggcgtgggcttggtgggccccgcactcggagcacccagccagccctgctggccccgggcaatggggaacttagcacctgggccagtggctgcggagggtgtactgagtcccccagcagtgccggcccaccggcgctgtgctcgatttctcgccgggccttagctgccttcccacggggcagggcttgggacctgcagcccgccatgcctgagcctcccacccactccatgggctcctgtgcggccgagcctccctgacgagcaccaccccctgctccacagcgcccagtcccatcgaccacccaagggcgcacaggactggcaggcagctccacctgcagccccggtgcgggatccactaggtgaagccagctgggctcctgagt

SEQ ID NO: 19236 - DNA, 819 bp, Homo sapiens; identical to SEQ ID NO: 2750
  SIMILAR (138)..(1): 671254mologous to Homo sapiens Human secreted protein, SEQ ID NO: 7420,accession number G03339,Smith-Waterman Score=146.

SEQ ID NO: 19237 - DNA, 669 bp, Homo sapiens; identical to SEQ ID NO: 14110
  SIMILAR (294)..(605): 351254mologous to Homo sapiens type III procollagen (aa 892- 1023),accession number X01655,Smith-Waterman Score=112.

SEQ ID NO: 19238 - DNA, 930 bp, Homo sapiens; identical to SEQ ID NO: 2757
  SIMILAR (536)..(772): 391254mologous to Hydra sp. mini-collagen,accession number X61048,Smith-Waterman Score=115.

SEQ ID NO: 19239 - DNA, 444 bp, Homo sapiens; identical to SEQ ID NO: 2752
  SIMILAR (399)..(187): 641254mologous to Homo sapiens hypothetical protein,accession number AL162044,Smith-Waterman Score=229.

SEQ ID NO: 19240 - DNA, 1122 bp, Homo sapiens
  SIMILAR (251)..(535): 331254mologous to Chlamydomonas reinhardtii vegetative cell wall protein gp1,accession number AF309494,Smith-Waterman Score=98.
  misc_feature (1)...(1122): n = a,t,c or g
atgctggcagtcctcagagccctcgcttgctctcggcacctcacctgcctgggctcccactttggtggcattgaggagcccttcagcccccccactgcactgtgggagccccttgctgggctggccaaggctggagcccactccctcagcttgcagggaggtgtggagggagaggcacgagcgggaaccggggctgcgtgccacgcttgcaggccagctggagttccgggtgggcgtgggcttggtaggccccgcacttggagcagccagccagccctgctggccccgggcaatgggggacttagcagccaggccagtggctgcggagggtgtactgagtcccccagcagtgccagcccaccggcgctgttctcgatttttcgccaggccttagctgccttcccgcggggcagggctcaggacctgcagcccgccatgtctgagcctcccacccactccatggactcccgtgcggcccgagcctccccaacgagcaccaccccctactccacggcgcccagtcccatcgaccacccaagggctgaggaatgcaagcgcacgacgcgggactggcaggcagctccacctgcagccctggtgcgggatccactagangccccaaagattggttgtgagccaggaagtagtagcctcatcatctccggccaccaaggcgcgaggcaaaagagagcatcagtaggaccagacagcaagaagccagccagccattcaaaccatatttcaaaaatccaggtgaacttatttaccacccctctaccgaaacactcctgcttcctcaactgcccccgcactcctttcctctcctcgcaccggcaaacattcgccagcgcaacacccttaccctgtccccacaagccctctcggccacacatccatcgccgcgctctcgccctgcaacggcccctctccatgtctggcaggccggcgaagttggagtgtattcgcaaagccgccctcctttcgggtgcatcagtccacgctcagggggttttctggtacatggcggactataccgagtggcggtataaacagaccgcagccgactcctgtggcagaggccaaatctcggctgactccgaatgtagccacccgttcaaataa

SEQ ID NO: 19241 - DNA, 3594 bp, Homo sapiens; identical to SEQ ID NO: 2758
  SIMILAR (160)..(636): 851254mologous to Mus musculus retinoid X receptor interacting protein No.6,accession number U09416,Smith-Waterman Score=711.

SEQ ID NO: 19242 - DNA, 516 bp, Homo sapiens
  SIMILAR (376)..(489): 651254mologous to Mus musculus T-box 1,accession number AF326960,Smith-Waterman Score=124.
atgtgcatagaaaaatccaaaggattctacaaaaaagctactagaaccactgacttcatcgagatgcagtcttgtgtccggaattggtgggttcttggtctcactgacttcaagaatgaagcggtggaccctcgcgactcaggagcccagctggcttcacctagtggatcctgcactggggctgcaggtggagctgcctgccagtcctgtgccgggcgctcgcattcctcagcccttgcgtggtcgatgggactgggcgccgtggagcagggggtggtgctcgtcggggaggctcaggccgcacaggagcccatggattgggtaggaggctcaggcatggcgggctgcaggtcccgagccctgccccgtgggaaggcagccaaggcccagcgagaaatcgagcgcagcgccggtgggccagcactgctgggggactcagtacaccctccgcagccactggcccaggtgctaagtcccccattgcccggggccagcagggctggctggctgctctga

SEQ ID NO: 19243 - DNA, 1560 bp, Homo sapiens
  SIMILAR (439)..(564): 881254mologous to Homo sapiens Human secreted protein, SEQ ID NO: 7217,accession number G03136,Smith-Waterman Score=187.
ttaaggattcaggacaggagagtttgtcagaggcttggactgcttctgtgtctctttgttgtgcttatctacaactgagtttttgcctacacattctttaatttcttttaattcctgtttcagggggtagggttgtgtgtctgtttccagatatattcctgaagctgcagacataccccccgcgactgcttttagcttccctatgttagtgcatctgagagtgttttctggccgagttagttcaagagacagtctcttacacactaagagtttctcaggattcagggtggaagagtataccagagacttggactgtttctgtgtctctttgttgtgcttatttctgcattttgtgtctgctccttcttgtgactttaaacagtaagtcctcagcaacagcgtcttctcatccctgccaccaacaggccccagtatgtaatgttcccctccctgtatccgtatgttctcattgttcaactcccacttatgagtgagaacatgtggtgtttggttttctgttcttgtgttattttgctgagaatgttggtttccagcttcatccatgtcctgtaggagaagttcatcacatatatttttggccagattatctacaaaagcagttgtttgtactgattcagtaatagatacaacagcaatgctaacagttgccataatgtctatggctgagcctgtaaagaccataagtgtaaatgtgaatcttttgtgtctgacctgggacagggcactttctaaggtggcaagggcagaagaatcttgccaattgcatgtcaaattggctggtagaagtgcctcagattgtctccttaataccacgacactggaagtttttaaactagacatatcatgaccagtgatacatgaggcaaaccaagcctgtccctgcacccgggtcacaaatgtggcatttccaggtgtaatggaaatgttagttccagactcaggagcccagctggcttcacctagtggatcccacaccggggctgcaggtggagctgcctgccagtcctgtgccgtgcgctcacattcctcagcccttgggtggtcgatgggactgggtgccgtggagcagggggtggtgctcatcggggaggctcgggccgcacaggagcccatggagtgggtgggaggctcaggcatggcaggctgcaggtcccgagccctgccccatgggaaggcaggtaaggcccggcgagaaatcaagcgcagtgccggtgggccagcccggctggggcactcagtacaccctccgcagccactggctcgggtgctaagtcccccattgcctggggccagcagggctggccggctgctccgagtgtggggcccaccaagcccacgcccacccggaaccccagctggcccgcaagcacggcacacagccccggttcccgctcgtgcgtctccctccacacctccctgcaagctgaggtagtgggctccggccttggccagcctgaatgagtgtttagaatcatcaacgtctttaaagtggttagcatatccagaacaaacagtagtgtccaggtaagaaaggcctac

SEQ ID NO: 19244 - DNA, 901 bp, Homo sapiens; identical to SEQ ID NO: 11454
  SIMILAR (798)..(364): 681254mologous to Homo sapiens Deleted in Colorectal Carcinomas,accession number R13144,Smith-Waterman Score=455.

SEQ ID NO: 19245 - DNA, 552 bp, Homo sapiens
  SIMILAR (354)..(449): 651254mologous to Homo sapiens Human secreted protein encoded by gene 81,accession number Y00337,Smith-Waterman Score=126.
atgcgcccgcactcctcagcccttgggtggtcgatgggactgggcgccgtggagcagggggcggcgctcatcggggaggctcgggacgcccaggagcccatggagggggtgggaggctcaggcatggcgggctgcaggtcccgagccctgccccgcgggaaggcagctaaggcccggcgagaaatggagcgcagcgccagtgggccggcactgctgggggacccagtacaccctccgcagccactggcccggtgcagcggtgggctgaagggctcctcaagtgtcaccaaagtgggagcccaggcagaggaggtgcccagagcgagcgagggctgtgaggactgccagcacgctgtcacctctcctaaccacctggactcagtgatatggtttggctgtgtccccaccgaaatctcatcttcagttgtagctcccataatccccacatgtcatggaaaggaactggtgggagtaggaggtgctgctcaggcaatgcatgctcaggcacacaggactgctcaggcaatgcgtgctgagcaaatgaatacatga

SEQ ID NO: 19246 - DNA, 2019 bp, Homo sapiens
  SIMILAR (1200)..(148): 851254mologous to Homo sapiens putative helicase RUVBL,accession number AF218313,Smith-Waterman Score=1534.
tcactcagaataaaggcagaggacgtcccaggccaacagccggcagccttccagacatggcaggaggaccccaggagggatcacgcaacggcaggaggagaaccgactacctgaaggggccatccttgtgggcatatgcacgacatgcaaccccctcaactcttcaggcaggtactcctgatccacaggctcgctgtacatggggttgtacttgtagcctttgccatagcccaaatccttcatcagcctagtgggcgcgttcctcaggtgcaggggcacggggggcagtggcccctggtggttcctcaggcaggctttgacgttgttgtaggcgctgtacacctcaatggactttggggctctggcaaagtagaccacacactgggccagaagcacctcacattcaggcatgcctataaaatgacagccttggtaggcagcaaccgcttgtgttaacgcagatgggtctgccagacctatgtcctcgctggcaaacctgacaagcctccgtgccacgtagagtgggtcctctcctccctcgagcatgcgagccagccagtagagggaggcgttctggtctgagccccgcatggacttgtgcagggcggagatgcagttgtaatgctcctcacctgcccggtcatataaaatgtgggatcgctgtaggccctccttcacgtcattctctgtgatcagaactctactgggagaataggattgcccactcttcttacagaacatcttcctagagcttaacctagccagcaccgccagctgcagtccgttcaacccagctcgggcgtcaccgtcactgaggtaagccagggtgtctactgctttatcctctatgaacatggcgggctctgagctgctgttgctgctgtggctcagagggtcagtgggacggctagagtctaggacgtggattcccagggagttgatcgctcgcattaaaatagtcaccattgcctctactggaagcttctcaagaacaatcactcgacagcggctcagaagagcagcgttgacctgctgagatttattgaaccgatgaatctcatcaataaaaaggatggttttccttttgaaaaagctcttttcattttgagcttgttttatgacatctcgcacatcatttgtcttggcatttgttgcagataatgtcacaaaccttatgctatgtttcttgctgttgctggctatgatgtgagccagagtggtttgaatcgaggagacttccacatctttgctatccattgcgcctggctttgtccactcgctgacttcttcatatataagctcattttccacgagcgggaaccggggctgcgtgcagcgcttgctggccagctggagttccgggtggacgtgggcttggcgggccgcgcactcggagcagccggccctgctggccccgggcaaagggggacttagcacccgggccagcggctgcggagggtgtactgggtcccgcagcagtgccagcccaccggcgctgcgctcgatttctcgccgggccttagctgccttaccacggggcagggctcgggacctgcagcccgccatgcctgagcctcccacccactccatgggctcctgtgcgcccgagcctccccgacgagcaccaccccctgctccacggcacccagtcccatcaaccacccaagggcctccttgggagacttgtcttctctcgatatatggcaatgcgatgaatgatgaaagggcttggagcttggaaggcttctgggttttaaaaccatctgacagctggatgacctcactatctgaaaggacaattagcttcttctgatttggtttactactcgaagattccaaattcccagagttctttttttcatgttcttcctccctgatgacatcatcaagatcttgggcataataaattcggctatagagttgaaattccacctcactatcaacactcagttcactagataactcgtccctataaagatcatcttcatatgcttctatagtctcatagccaccaaacat

SEQ ID NO: 19247 - DNA, 1121 bp, Homo sapiens
  SIMILAR (365)..(739): 641254mologous to Homo sapiens hypothetical protein,accession number AL162044,Smith-Waterman Score=383.
ctatccattgatgccatcctccattgtatgagagttgccccaggggagccacattgagcgatgagcagctccacgatgtagagaaagcccatcagatatgaggcacagtgcttgtccaggccgaaggtgatagagtgggttgagtgatttaaagtcatcatcagatggcttttctttctgagcctggattactcccaaagcagggtctaatgcaaaggtttgcttgcacttgttcacacaggaatgtggtcccagggagaagtacatgaaaccttgagctaaacacagggtgctgattggtgtatttacaatccctgagctagatataaagactctccacgtccccaccagactcaggagcccagctggcttcacctagtggatcccgcactggggctgcaggtggagctgcctgccagtcctgcgccgtgcgctcgcattcctcagcccttgggtggtcgatgggactgggcgccgtggagtagggagtggtgctggtcggggaggttcgggccgcacaggagcccatggagtgggtgggaggctcaggcatggcgggctgcaggtcccaagccctgccccacgggaaggcagctaaggcccggcgagaaatcgggcacagcgccggtgggccggcactgctgggggactcagtacaccctccacagccactggcccaggtgctaagtcccccattgcccggggccagcagggctggctggctgctccgagtgcaggggcccaccaagcccacgcccacccggaactccagctggcccgcaagcgccgcacgcagccccggttcccgctcgtgcctctccctccacacctcccttggtccacttgacaaacgatgttctaagagtgaaggtcaagtgggcctttttctttacactccacaagtagctcaaaacattccacactgcagtctttgtcagatttggtccgtggcttcctgatacaggattttgctcttctttgagtttccagttttcttttttaatttccctggatactcttccatatagaaagggagtcatctgtttattggaggcattggatgatctgctgtttttcttggttgagacttggtaccaccaagaagcagtcagtgccctcat

SEQ ID NO: 19248 - DNA, 4284 bp, Homo sapiens
  SIMILAR (1843)..(3132): 811254mologous to Homo sapiens putative p150,accession number U93565,Smith-Waterman Score=1842.
atggggcttgcagaacgatgtcctctaaaccacctgaccctgacggtcagcagtgttaagtgttccttcctgttggcgcacatcttgtctgttgctggtgcctgctacggagtcctccgaggggcaccccacactttccctgggatcacgtgtccaggctgctcccaggaaaacaacccaattaaaaagtgggcagaagatctaaacagacacctcattcaagaagatacacagatggcaaataagcacctgaaagatgctccacataggtatatcattagggagctgcaagttaaaccaaccatgagatactgccacgcacctactggagtggctcatatccaaagcactaacacaccaaatgctggcgaggatgtggagcaccaggaactcacattcattgctgatggcagcccggtgaccaccaggggccatatggacctggtacagacgtctctgagtcgcacactgggcgtcagaagcacagggtcatggagtgcatgtgctgaattctcacatgggtactgccttgcaaagaggctgctccagctgctgaagcacggcaacggtaacagcaacagtggtggcaatgctgaatgcatcactaggcactgccaaaagcccttgacaggcatcctatcattcatccttgcactgaacaaggtaaagaatacaagaccatttgacagatgccacagtgaaggctctgagaaggagccttccttctgtgtgacctgccccagaaggccagaggtcaaccagccttcgccctatatgccgcagccagggaagagcagcactcacctctccgtggtgcagctgcgggctctggaggtcggcgaacctcaggcttttccacctgtggagcagaggggcctgctggcctcaggcatccactgtggctctgagtctaagggcagggttcgggacctgcagcccgccatgcctgagcctcccacccactccatgggctcctgtgtggcccgagcctccccgacgagcaccaccccctgctccacagcgcccagtcccatcgaccacccaagggctgaggaatgcgagcgcacggcgcaggactggcaggcagctccacctgcagccccagtgcgggatccactaggtgaagccagctgggctcctgagtctggaactaacatttccattacacctggaaatgccacatttgtgacccgggtgcagggacaggcttggtttgcctcatgtatcactggtcatgatatgtctagtttaaaaacttccagtgtcgtggtattaaggagacaatctgaggcacttctaccagccaatttgacatgcaattggcaagattcttctgcccttgccaccttagaaagtgccctgtcccaggtcagacacaaaagattcacatttacacttatggtctttacaggctcagccatagtcattatggcaactgttagcattgctgttgtatctattactgaatcagtacaaacaactgcttttgtagataatctggccaaaaatatatgtgatgaacttctcctacaggacatggatgaagctggaaaccaacattctcagcaaaataacacaagaacagaaaaccaaacaccacatgttctcactcataagtgggagttgaacaatgagaacatacggatacagggaggggaacattacatactggggcctgttggtggcaggttgccaacatccaaactcgctgttgattgccagctcctgctccttgcagcagcccagcatgctctctgctggtgccaaaatacccttccaccaaaccccgctaacttctggaactgtcctagagggtttcctaccctagcaagtgagcttgcctatgtcagccctaaccttgctcttgtcattcagctgagccagaggaaaaaatttgagctattctggggtggtctacagagaaccatcttctttcccttcagtgttctcagaatattgactgttgatgaacaagccaatgatgtgagtgtggctgcagcaaggacccttcaaattttcagagatgacatgattgtatatctagaaaaccccattgtctcagcccaaaatctccttaagctgataagcaacttcagcaaaatctcaggatacaaaatcaatgtacaaaaatcacaagcattcttatacaccaacaacagacaaacagagagccaaatcatgagtgaactcccattcacaactgcttcaaagagaataaaatacctaggaatccaacttacaagggatgtgaaggacctcttcaaggagaactacaaatcactgctcaaggaaataaaagaggatacaaacaaatggaagaacattccatgctcatgggtaggaaaaatcaatatcgtgaaaatggccatactgcccaaggtaatttacagattcagtgccatccccatcaagctaccaatgactttcttcacagaattggaaaaaactactttaaagttcatatggaaccaaaaaagagcccacactgccaagtcaatcctaagtcaaaagaacaaagctggaggcatcacactacctgacttcaaactatactacaaggctacagtaaccaaaacagcatggtactggtaccaaaacagagatatagatcaatggaacagaacagagccctcagaaataacgctgcttatctacaactatctgatctttgacaaacctgagaaaaacaagcaatggggaaaggattccctatttaataaatggtgctgggaaaactggctagccatatgtaggaagctgaaactggatcccttccttataccttatacaaaaatcaattcaagatggattaaagacttaaatgttagacctaaaaccataaaaaccctagaagaaaacctaggcattaccattcaggacataggcatgggcaaggacttcttgtctaaaacaccaaaagcaatggcaacaaaagacaaaattgacaaatgggatctgattaaactaaagagcttctgcacagccaaagaaactaccatcagagtgaacaggcaacctacaaaatgggaaaaaattttcgcaacctactcatgtgaaaaagggctaatatccagaatctacaaagaacttaaacaaatttacgagaaaaaaatcaaacaaccccatcaaaaggttgatgaaaggcgtctgctaaacttgacaacagacagattaacaggagaaaaggcatacagatttattaaggtgcaagtgctgagagtcacacaaggtatgaaaattcaaagaagggccagaagcaaagaactccaaggtgatggtgatgaaattcaaagatggaagcgcctccactccccacccaggctgcttggagaagagcctcacaggattattttcaaactagactctgctaatgacatgcacaagagtgccccattttcctcactccaatccccactctggcatcagccggttatgcaggaggttgagaggcagtacaaagaaaagaaagaccttgtgagagagggagggaaatgcaggtgtcagggtagacctggcaaggtggtattaactgagctcagtcttgaagctagaggtgggtggatggaagacattcccagcagaaggactagcaaatgcggaccatgggagctggtgtcccattgtgtccagaattggtgggttcttggtctcactgacttcaagaatgaagcctcggaccctcgcggagtgaagctgcagaccttcacggtgagtgttacagctcttaaggcggcgcgtctggagttgttggttcttccgggtgggctcgtggtctcgctggcttcaggtgtgaagctgcagactttcgcggtgagtgttacagctcataaacgcagtgtggacccaaagactgagggagccggctctggccttggccagcccagaaaggggctctcacagtgcagcagcgggccgaagggctcctcaagtgccgccaaagtgggaacccaggcagaggaggcgccgagagcaagcgagggctctgaggactgccagcacgctgtcacctctcaccatgaaagggtatggagccatgccaagaaggcaagtgggccaggtttgctggaggggcaagtttgggctggggctggattttgggcttctctcagggttttgcctctgactgcagtggatggtcacaccagtaactgcaggctccactccatacagctcaaggcctgtctgcttctgttgctgaaactgaaaaagctgatcaacagggcctcagctccttacagtggggtgatggcccttcccacatctccaggagggtctgtctgctga

SEQ ID NO: 19249 - DNA, 1872 bp, Homo sapiens
  SIMILAR (1563)..(1688): 801254mologous to Homo sapiens Human secreted protein, SEQ ID NO: 7131,accession number G03050,Smith-Waterman Score=173.
atggataggcctgaaacctgggtacacaagggcagacctgacgcctatgtctgcaaatatttgcctacatctgtagaggctggccttatccttgggtccacagggggctacttggctctgggattggctttgagtctgagtctgcaggaaatagtcagttactgggatggatctgatgtccaggattataggggacagcccagtgctggagaagttccagaggctgggctgctaaggggtcctggacaaggtcgcttggatagcggcctaaccacagcattatacatgctcaggaagaggcaaagccggaaatttaccacttggcaaagcgtctttacaaaaccagagtttggctttgtggtagcttccttagaacttatctacaaggaagtaatgaattcagaagaaaagactaaaaatggtgtagtaaaaggacagccttctccttcagcttgcagggaggtgtggagggagaggcacgagcgggaacccgggctgcgtgcggcgcttgcgggccagctggagttgcaggtaggcgtgggcttggcgggcccccgcactcgggacagccagccagccctgctggccccgggcagtgagggacttagcacccgggccagtggctgcggaaggtgtactgggtcccccagcagtgccggcccaccggcgctgtgctcgatttctcgccgggctgtagctgccttcctgcggggcaaggctcaggacctgcagcccgccatgcctgagcctcccaccccctccgtgggctcctgtgcggcccaagcctccccgatgagcaacgccccctgctccacggcgcccagtaccatcaaccacccaagggctgaggagtgcgggcgcacggcgcgggactggcaggcagctccacctgcagcccctgtgcgggatccactgggtgaagccagctgggctcctgagtctggtggggacgtggagaacctttatgtccagctcagggattgtaaatacaccaatcagcaccctgtgtctagctcagggtttgtgaatgcaccaatcagcactctgtatctagttaatctggtggggacttggagaatctttatgtctagctaagggattgtgaatgcaccaatcggcactctgtatctagctcaaggtttgtaaatggaccaatcagcactctatgtctagctcagtgtttgtaaatacaccaatcgacactctatctagctaatctagtggggacgtggagaacttttgtgtctaactcagggattgtaaatgcaccaatcagaaccctgtaaaaatggaccaatagctctctgtaaaacagactgactttctgtaaaatggaccaatcagcaggatgtgggtggggccagataagagaagaaaagcaggctgcctgagccagcagtggcaacccgcttgggtccccttccacactgtggaagctttgttcttttgttctttgcaataaatcttgctattgctcactctttgggtccacactgcttttatgagctgtcacactcacagggaaggtctgcagcttcactcctgaagccagcgagaccacgagcccaccaggaggaacgaacaactccagacgcgccgccttaagagctgtaacactcaccgtgaaggtctgcagcttcactcctgagccagcgagaccaccaaacccaccagaaggaagaaactcaggaaaacagccgaacatcagaaggggcaaactccggacacgccgcctttaagaactgtaacactcactgcgagggtccgcggcttctacgcttgaagtcagtgagaccaagaacccaccaattttggacacaattgcactctagcctgggcaacaagagtgaaactccatctcgaaaaaaaaaa

SEQ ID NO: 19250 - DNA, 1596 bp, Homo sapiens
  SIMILAR (1133)..(1071): 711254mologous to Homo sapiens Human secreted protein, SEQ ID NO: 7115,accession number G03034,Smith-Waterman Score=83.
ttacatcaagcatattacatgagctgctggtaaacagtacagacaatcatggcctacagctgagcagatgctgatgctgatgctgatgctgatgctgatgctggattcttggttcaaggagcagagaaaaggaaaactaaaagctccccgcacactagcactgttgtcaaggaacgtgatcactactgtctttgctccatggagctgaacgcctgaggtatggcctgctgacattccagtggcaaatcctgcccctcgtcctgttgccttttcctgctggctcagcagtatgccatctccacctggatacctgatggcctcgtactgctctacacccaaaatgttcaaagtaggatcaccattcaaaacagatcttccctcaacacccccacttctatcgtgaatgccacaattcttctcccctgcctgggctcccactttggtggcatttgaggagcccttcagcctcccccctgcactgtgggagcccctttctgggctggccagggctggagcccactctctcagctcgcagggaggtgtggagggagaggcacgagcgggaaccggggctgcgtgcggcgcttgccggccagctggagttccgggtgggcgtgggcttggcgggccccgcactcggagcagccagccagccctgctggccccgggcaatggaggacttagcacctgggccagtggctgtggagggtgtactgattcccccagcagtggctggcccaccggcgctgtgctcgatttctcgccgggccttagctgccttcccgcggggcagggctccgggacctgcagcccaccatgcctgagcctcccacccactccatgggctcctgtgcggcccgagcctccccgacgagcaccaccccctgctccacggcgcccagtcccatcgaccacccaagggctgaggaatgcgagcgcacggcgcaggactggcaagcagctccacctgcagccctggtgcgggatccactaggagtgaagctgcagaccttcatggtgagtgttacagctcttaaggcagcacgtctggagttgtttgttcctcccggtgggctcgtggtcttgctggcttcaggagtgaagctgcagaccttcgaggtgagtgttacagctcataaaagcagtgtggacccaaagaacataaaggttctccacgtccccaccagactcaggagtccagctggcttcacccagtggatcctgcactggggactgcaggtggagctgcctgccagtcctggtgccgtgcgcctgcactcctcagcccttgggtggtcgatgggactgggtgctgtggagcagggggcggtgctcatcggggaggctcgggccgcacaggagcccacggagtgggtgggaggctcaggcatggcgggctgcaggtcccgagccctgccccgcgggaaggcagctaaggcccggcgagaaatcgagcacagcgccgcattcaatccttataaacagttgcgaaaatcctatgtatacaaacagctaccagtgccaatacctctgctaagggccacacccttactgcgccatcacagaccctatggaaacactgaggtcctctgctaa

SEQ ID NO: 19251 - DNA, 1429 bp, Homo sapiens
  SIMILAR (1343)..(1113): 571254mologous to Homo sapiens unnamed protein product,accession number AK025116,Smith-Waterman Score=206.
ccatatcagccagggacaaagcaacctccttgttcatcccagcttggcttttgatccgtgcccatgcctggttcatgccttggacacataggtttcctttaaagaggtggtattgtagccagcttatatttgcatctatagccatgtttctagtccagcttggtgtgcaatactagatgagttaataactggtccttgtttctgatctggttcccattgtgtaactgtgttgattgggaaggtagtttgtgagccatgaaatgcttggttcattggttgcttattgacctcattaacctaggacttgaatatcccaaagggtatgctctttaccacattcaactcctaatttatttgtttaggttatgatgtgattgctcaagcccaatctgggactgggaaaacggccacatttgccatatcgattctgcagcagattgaattagatctaaaagccacccaggccttggtcctagcacccactcgagaattggctcagcaggtaagagtggcttctattccctccttcagggctgatttagggatgatgagtataatccaaggaccagagaagtcttctctgatcaccaccttgggaggaagacatgggtgccctaacactctcgagacctgctgggttaattaaaagctatttcttacccaaacgtaaccattgcttcctccacccatttcctgagtcaaatgggaaagctgttgggtgaagcctggctggctgggcaagtttgactgtgttctgaataagcaccttcactatgggctaagagatcccttggtgtgggggtgatcttacagtagtcagagcagatggacagtccttttcacccttgcttaatagccagagctgtttcatgcctggggcacacacaattctaatgctggactttttcctgggtcatgctgcaacactgatgtcagagcatgtttttaaatgttctgtggcaggggcagtgattattctgggtgtggataatgtaagaagttacagcagagctccattctaaggcacttggctctcagttttctcagagtgaacatgcctcgtagcttgggtcctatggcaggagtgcaataggacatggatatgcatcacctgttctataaaactggttgctggctgggcgcggtggctcaactcgtataatcccaacactttgggaggccaaggcaggcagatctcttgagatcaggagttggagaccagcctggccaacatagtgaaaccccgcttctactaaaaatacaaaaattagccaggcatggtggcgtgtgccttttatcccagctactcgggaagctcaggcaggagaatttaacccaggaggtggaggttgcagtgagctgagattgtgccattgcactccagcctgggcaacgagcaaagctctgtctcaaaaaaaaaaaaaaaaaa

SEQ ID NO: 19252 - DNA, 1921 bp, Homo sapiens
  SIMILAR (170)..(1333): 401254mologous to Homo sapiens eukaryotic initiation factor 4AI,accession number D13748,Smith-Waterman Score=393.
  misc_feature (1)...(1921): n = a,t,c or g
agtggcgggncccncaaactgaagccttganatgctaggacgcacgaccggnccggaantcccgggtcgagccacgcgttcggtctgcgagccaggattcccgatccagagacaatggccccgatgggattggagcccgaaggcgtcatcgagagtaactggaatgagattgctgacagcgtttgatgacatgaacctctcggagtccctttctccgtggcatctacgcctatggttttgagaagccctctgccatccagcagcgagccattctaccttgtatcaagggttatgatgtgattgcctcaaccccaatctgggacctgggaaaacggccacatttgccatatcgattctgcaagcagattgaattagatctaaaaagccacccaaggccttgggtcctaagcacccactccgagaatttggctcagcagatacaagaaggtggtcatggcactaggaagactacatggggcgcctcctggtcacgcctgtatccggggggcaccaacgtgcgttgctgaggtgcagaaacttgcagatggaagctccccacatcatcgtggggtaccccctgggccgtgtgttttgatatgctttaccggaagatacctgttcccccaaatacatcaagatgtttgtactggatgaagctgaacgaaatgtttaagccgtggattcaaaggacagatctatggacatatccaaaaggctcaagcagcaccaccaagggtagttttgctgtcagccacaatgccctttgattgtgcttgaggtgaccaagaagttcatgaggggcccccattccggattcttgtcaggaaggaagagttgacccttggagggtatccgccaggttctacatccaacgtggaacgagaggagtgggaggctggacacactatgtgacttgtatgaaacccctgacccatcaccccaggccagtcatcttccatcaaccacccggagggaaggtggactggcctcacccgagaagaatgcatgctctgagatttccctgggaatccgcccagcatgaagatatggcccaaaaggaacgtagaacgtgattatgaaggagtttcgtttggcttctagcagagtttttgattaccactggacctgcttgcccagaggcattgatgtgccagcaggtttctttaagtcatcaanttaattacctttccccacaaccagggaaaactataatccacagaaatcggtcgaggtggacggtttggcccgtaaaggtgtgcctattaacatgttgacagaaagaaaacaaagaggaatctcgaggacattgagaccttttaacaacacctccatttgaggaaatgcccctcaatgttgcttgacctcatctgagggggctgtcctgccacccagccccagccagggtctcaatctctgggggctgaggagcagcagggaggggggagggaagggagcccaagggatggacatcttgtcatttttttttctttgaataaactgtcactttttgaggcaaaagaaggaaccgtgaacattttagacacccttttctttggggtaggctccttgccccaggcgccggctcttttcccaaaaaaaaaaaaaaaaaaacactaatccatttccctaacctagtaacctccagatcccagaggctctcctcacctcagctgagctcctttgaaagtgattcaagggactatgtcactcagcctcatttgctggaccaaatctggagggagaacccctaaaacccctaagtgaggttgcccagggggttgctcccaggtggggggaagcaggggagagaaaatggtagccatttttacatggttttgtatagtatttattgattcaggaaacaaacacaaaattctgaagtaaaatgacttggaaactgccaaaaaaaaaaaaaaaaaac

SEQ ID NO: 19253 - DNA, 1278 bp, Homo sapiens
  SIMILAR (1118)..(1195): 421254mologous to Hordeum vulgare pathogenesis-related protein,accession number Y10813,Smith-Waterman Score=52.
taaatttctaatatggcggacccagaatgtcttgatctatttctaggccatctattctattccggtggtctatttgcttacttctaaacaaatgccatacaatgtggtggctttatagtataaaagcgtttaacaacaggtttatgtatttaaattcaacagagatcatctaatgcaataacttgtgctaacgggttaactccgtcgtacagaactcagactaaaactcgtctttccaactctgcgtatgtatttgaactttctacaaccattaataacagaaataattgaatgctagactaatactgtgtaaaggagcaatggtcaatcttaatctgattacaaaagtttgaaaaaagaagcctcactcttctgattgccattataataagtgatggctatactattgaatttgtaaagttatcctaatcaaatactacttttctaatttatatatatttttatatacatgactccaaataagactggtttataaaatgggttccatccagtccaagtttttaaactattgttgtaacacataaattttgtgctgcctccaacagcaatgattcaactgttagtctggattacatcattcacattatcaccaagtatatcctctaaagtgtctaattatcacttttataaagcacattcacaaagttttgcattcatcaccactacccagttcctgtttgtctgatttttaggtgttatattaaatggaaaaaccaaaagtgcaatttttcattcaataaatgttccatccttatttagttttgttgccgaaattgaaagtcccatgacttttagaatgatagcaattttatcaaccaaagaatcccgtctttcacaccgtttcaataactgcagcaaatttccttgaacttgtctgtggaaattctgaaactgtggaatcgtcatttcaaagcacttggtctttacgttggcctgaatgatgtgccactttttagcatcactgcaacgtaaagggatacttaagagatctgcaagtgtctgagctcacagccataccccagtttccacatgaaaatctacaacgctggttggtggacatcggacttagcatccagcgggcggcttcgctggaccgcctccatggggcagcgtctggggacttgcggcccggactcgagagaacgcccccagaccagcgcttccgcttccacgtcctgcccctagcggcctggcgcatggggcggacggtgacagcaatactgaaaaaatccaatccagagataacaggaagggcag

SEQ ID NO: 19254 - DNA, 2152 bp, Homo sapiens
  SIMILAR (48)..(446): 841254mologous to Homo sapiens adenylate kinase 2B,accession number U54645,Smith-Waterman Score=557.
gaggcgtgcgaactggtggcagtgagagacttcggcggacatggctcccagcgtgccagcggcagaagcccgagtatcctaaaggcatccgggccgtgctgctggggcctcccggggccggtaaagggacccaggcacccagattggctgaaaacttctgtgtctgccatttagctactggggacatgctgagggccatggtggcttctggctcagagctaggaaaaaagctgaaggcaactatggatgctgggaaactggtgagtgatgaaatggtagtggagctcattgagaagaatttggagacccccttgtgcaaaaatggttttcttctggatggcttccctcggactgtgaggcacgcagaaatgctcgatgacctcatgggagaagaggaaagagaagctttgattctgttgatttgaatttcagcatcccagactctctgctgatccgaagaatcacaggaaggctgattcaccccaagagtggccgttcctaccacgaggagttcaaccctccaaaagagcccatgaaagatgacatcaccggggaacccttgatccgtcgatcagatgataatgaaaaggccttgaaaatccgcctgcaagcctaccacactcaaaccaccccactcatagagtactacaggaaacgggggatccactccgccatcgatgcatcccagacccccgatgtcgtgttcgcaagcatcctagcagccttctccaaagccacatcctagtatcagaaggccaggcgagactgcaacactgctcatcaccccgcggcgtgatccctgctcttaggtgctgggcagaggggaagggtggtcagggtgaggatggtgagggagggctggtgaggggctcagaggaatacttggaacaacagcagtgatattggacaggggcagctctctttcatacataagtgagaggttctaaagtgtgagggaaaaactcattttttaaaaaacaccatgcttggagggtgggggtagaaatagacacaatattatttgtaaggaatcgggctttcatttactctggactggtgaaaatattttttaaagccagtgctctaagacctcagcttttatctcagaaccccatgggttcccagaccaagaagtacaggaaatccaattgttgtcctggcctgtctattgcctggaacagggagctttgattactgactccggttccacacactgtaagatcaaaaaaccatctccacatttgaaagagatgtaaggtgtattcatagggatggtggctcaacaaatcaagcaaactggaatcaaggggagggggaagggaatgaaatggaaagggaggctgattcccttcccctgacttaccactaatttactaggctacctactttcatgagtaacctctcacagctacccagcacatgccacaatcctatcgtcttgccttcttttatctgcactgtgtgaagggactcttttaaataaatgagcaagtgtcctaagctatgtcatccaaagattgtcctttccattctcaaatcctgtgactgggatcactcaacagcactgtgatgtattattttcaatgaggtgcctttcttaactgaccaaatgctgccttgtttggcccctaaatcaataaaatatgttaaaatttgtatcccctgttgtggcattttttttagataatctaagctagaaaaatgacattgaattctggacctggctggaaggaaaagaagccctttcttgtcgctggcagctgtgtggtaggaggtccaagtatgtgcatatgagataagcctgcaacctcttgaccttcagctcctatgcaggcttctcttgagcccagagacaaggcagcttggtctagtggagatagcactgtgcttggagttcaggggacctaggacaaatcccagccagttagttattcactgtgctcctgtttcctcagctgaaaaaggaagttggttatgccaccttcttggccttaatggcattaaatgaaatttataggaagaaggtttttgctcagtacctggcatgcaacagacattggataaatgttagttggatccagatatacacagaaagatatctgcttcctgccaggctggataactgttgaatgacacttgtccatagtctaga

SEQ ID NO: 19255 - DNA, 1227 bp, Homo sapiens
  SIMILAR (526)..(1002): 471254mologous to Homo sapiens adenylate kinase 2A,accession number U84371,Smith-Waterman Score=217.
  misc_feature (1)...(1227): n = a,t,c or g
agctgcgcttaactaagtcgtcgccaganactgacgntcgtagcaagcggcaccaggacggaattgcaagatcgacgatttcgtgatacttcgggggacatgtttcccagcgtgccaccttgagaacccgagtatactaaaggcatccggaccgtgctgctgtggcctcccggggccggtaaagggacccaattggagaaactgaagtttgaatggcttgttctctaggctacatagcaagtaatttacagagcttgcatctgaatgactccaaagctcctgctctttctgctgctatctactgccccaggcacccaaattgggctgaaaacttctgtgtctgccatttagctactggggacatgtggaggggccatggtggcttctgggcttcagagctaggaaaaaagctggaaggcaacttatgggatggctggggaaactgggtggagtgatggaaatgggtaagttggagctcctttggagaaggaattttggagaaccccttggtggccaaaaatggttttcttctgggatggcttcccctcgggacctgtgaaggcaaggcagaaatgctccgatggacctcatgggagaaggagggaaagagaagcttgatttctgttgatttgaattcagcatcccaagactctctgctggatccgaaggaatcacaaggaagggctgattccaccccccaagaagtgggccggttcctacccacggagggagtttcaacccctcccaaaagagcccccatgaaagatgaacatcaccggggggaaccccttgatccgtcgatcaagatgataaatgaaaaggcccttgaaaatccgccctgcaagccctacccacactcaaacccaccccactcatagaagtactacaggaaacgggggatccactccaccatccgatgcatcccagacccccgatgtcgtgttcgcaagcatcctagcagccttctccaaagccacatgtaaagacttggttatgtttatctaatgttgggtccaagaaggaatttctttccatccctgtgaggcaatgggtgggaatgataggacaggcaaagagaagcttccttcaggctagcaaaaatatcatttgatgtatatggattaaaaaagcacttgtcttgatgtatctttggcgtgtgtgctactctcatctgtgtgtatgtgtgttgtgtgtgtgtgtgtgtgcatcgcaatatcgtgttccact

SEQ ID NO: 19256 - DNA, 1170 bp, Homo sapiens
  SIMILAR (826)..(1035): 381254mologous to Mus musculus SPR2H protein,accession number AJ005566,Smith-Waterman Score=94.
gccttcctttctgtccagtcctgctcagctgttaagatccatcatggccattatccttgtcccggactgccccaaagttcccagctggctttggggaacactgtagctcttgggtgtctcttgtctctggcatggttttagcgtcactgcgaacactcctttgcaaacatcaaacatctcaaagacggaaaaggatagatggcttcctccagcctacacgccccgtccacagtggcatcaccctcttatcccaaaagaatatgccagttcccatccagcaccgaagaaaatcagctcctggggctggtggttggaggtgggtctgtccactgtgggggccaaagtgttcccctgctggagacagtttgcaagtaagaacctaaggatggggacagcatcctgtgcttgggcattgaccagccaaagctcacatttagaaatccctcagtgcttctgtggtttcacctgggcatcgacgacattagggaagcctttgtgaccacaagggcagggcttgtgccctgagtggcgaggtggtgacctgaggccagtgtgatggtgggtggatctcagcgtggtactkaagtgccagtcgtggccggcacactcgaacgctaagagaatggtccaatttgatgatcttatttctatttcgatcaggttttcgactttttgtagatgaaaactaccagggaaaaggggaagcaggtacccaataaagtttagaaagatccagtctgtgaaacccttagagatgggctgaaagttaagtccaccaacccttgggcttaatcaggacggaagaggagggggtgtggggggcagagcgtaaaacaagccccagccctaactcccggccccccagccccagtcttcccaatcccagaggccccggcggcctgtgctcctcaccaccctggtcaggggaatagaaggaaatgcaattttccgcctgtctgcccgacttccaaaaactgcctcctcctgcccaggcctctcccaccaccaccttccctccaaagataaccgtgtccatgccatccgtggcatcatctcgagttttcatttttggatgaagtgacatttagctttaacaagacatttccaaagcgcctagtctcctccaaaatgctacctttaaaagttgggcattagtaggcgaaaaatccc

SEQ ID NO: 19257 - DNA, 876 bp, Homo sapiens
  SIMILAR (133)..(474): 871254mologous to Mus musculus nuclear ATP/GTP-binding protein,accession number AF219141,Smith-Waterman Score=544.
atgaaggagaacatatcttctaaaggagatgaaggtgaaaagaagtctacctttatggatctagcaaaagaagatattaaagataatgatagaacattacaacagcagccagaaatgaagaaggactgcagtcttcctcttactgtccttacctgtgctaaagcatgtccacacatggctacttgtggaaatgttctgtttgagggaagaacagttcagctagggaagctttgctgcactggagttgaaactgaagatgatgaagatactgagtcaaattcatcggtagaacaagcatcggttgaagtacctgatggaccaacactccatgacccagacctctatattgagattgtgaaaaatacgaagtctgtcccagaatattcagaggtggcttatcccgattattttggtcacattccgcctccattcaaagagcctattttagaaaggccttatggtgtacaaaggtcatataatggcttgaacccgggacgcagaggttgtgcattttgcatgagcagctgtagcttcgtagtggaaaaatctaaagaatccacagcacgtgttgtagtttggagggaaataggagtacaaagaagttataccatggagagtactttatgtggctgtgatcagggaaaatacaaggaatgtctggcagtcaggactctggatcctcttgtcaatacaacaagtaggaaaaggagaaagcgttgcccaaaaaatagacggccaatcccaacaagtaaaaagacgaacaagagacagaggacacggatgaatgtaaaggaacagggggctaagacctacagcagacagcaaaaaaataggatcacagagtcacggaagcgtcacgcagacacagagaaatag

SEQ ID NO: 19258 - DNA, 553 bp, Homo sapiens
  SIMILAR (307)..(396): 501254mologous to Homo sapiens Human bcl2 proto-oncogene mutant protein fragment 13,accession number Y21165,Smith-Waterman Score=73.
atggagaaggatgaccccccacagttggtgactcccacatcagtgaaagccatcatcctgaggattgaggctgcccagctaactcgggctcaagaggatatttctacccagctctcagacattttggacaatgtcaattgtgtcatcaaccgcttccaggaagaattaggatatgatttaaaagaaaatgccaaatctcagcagagagatccaaagggcaagaagagattcatcttgctggaaaaaattgcctccttctccaaagatgctatgatgaaggagaagcacctgtatgacattctccgctggctgggtgactggggtgagtttgcaggctgggcaccgtgcctcctctgggaggggagtgtgggtggcgagcacagggacagcacaggacacatccccttctccagtgaagcattccaccactcgtgtcacagcacatcacctccatgctcctagggggttgatatctcagagggtttcaatctgtgcatgagaatcttcctttgcagctcgtgccgaattcctgcagcgcgggtcaatttcaatg

SEQ ID NO: 19259 - DNA, 2268 bp, Homo sapiens
  SIMILAR (639)..(1622): 271254mologous to Nephila clavipes dragline silk fibroin,accession number M92913,Smith-Waterman Score=126.
gatatttctacccagctctcagacattttggacaatgtcaattgtgtcatcaaccgcttccaggaagaattaggatatgatttaaaagaaaatgccaaatctcagcagagagatccaaagggcaagaagagattcatcttgctggaaaaaattgcctccttctccaaagatgctatgatgaaggagaagcacctgtatgacattctccgctggctgggtgactggggtgacactctgacctatgagattggccacaggaagagtgaagaggaagcagcagctctggacgaatggattgaagtgacggagaaagtgttaccgctgtccctcattgccaccaaaagaggcatcgagtcactcactgccctttgctccactctcattgaaggacaaaagaaaaggtcacaagtgtccaaacgcaccttctggcagggctggcagggaagaagcccacagacatctccatcccatcctcagccactaagcccagaacagatgctccaggaccagcataccatgaacacgaaggcctcggaggtgacgtccatgctgcaggagctcctggactctaccatgttcagcaagggggaggtcagggccatcaggtacatggccactgtggtggagaacctcaacaaggccttgatcctccaacacaaggagaacaggagcctggagaccaaatacaggcacctgcaaatgcaggcgaccaaagagctcagcagccagaggctgcacttccagcagttcatggaggtccttgagagcaggagggatgctctgctgaagcaggtagagatcttagggggaaggtaccatgaccttctcctgatgaagcaggccttggagttccagctgaagaaggctcagaatgctacaggtcaggcagaagacctggctgaggtttctgttgactccccaggtccctctgagagagagaccctcccaaggaaagaaacagtcatggaggaaagccaacaggaaccgatgaaggaggagcagttgttctcgccacttcccccaagtcccatggccatgatacgggacagtggtgctatagctgcagggcaccagccactttccaccatgactgtgcgctcgagggtcgcagatgtgttcggcagcaaggacactgagagccttgagcctgtgcttttacccttagtagatcgcaggtttcctaagaaatgggaaagaccggtggcagaaagcttaggccacaaagacaaagaccaggaggactacttccagaagggaggactccaaattaagttccactgtagcaagcagctgtctctagagagctccaggcaggtgacctctgagagccaagaggagccctgggaggaggaattcggccgggagatgcggaggcagctgtggctggaggaggaggagatgtggcagcagcggcagaagaagtgggccctgctggagcaggagcatcaggagaagctgcggcagtggaatctggaagacctggccagggagcaacagcggagatgggtccagctagaaaaggagcaggagagcccacggagagagccagagcagctaggggaggatgtggagaggaggatcttcacacccaccagtcgatggagggacttggagaaggcagagctatcattagtgcctgccccaagccggacccaatctgctcaccaaagcaggaggccacacttgcccatgtctcctagtacccagcagcctgccctgggaaagcagagacctatgagttcagtggagtttacctacagaccacggacccgccgagttcccacaaagcccaagaaatctgcctcctttcctgtcactgggacatccatccgaaggctgacctggccctctttgcagatatcccctgcaaatattaagaagaaggtgtaccacatggacatggaggcccagaggaagaacctgcagctcctgagtgaggagtctgagttgaggctgccccactacctgcgcagcaaagcactggagctcaccaccaccaccatggagctgggcgcgctcaggctgcagtacctgtgccataagtacatcttctatagacgcctccagagcctccggcaagaagcgatcaaccatgtacaaatcatgaaagaaacggaggcttcctacaaggcccagaacctctacatcttcctggaaaacattgaccgcctgcagagtctcaggctgcaggcctggacggacaagcagaaggggctggaggagaagcaccgagagtgcctgagcagcatggtgaccatgttccccaag

SEQ ID NO: 19260 - DNA, 393 bp, Homo sapiens
  SIMILAR (89)..(292): 1001254mologous to Homo sapiens CGI-135 protein,accession number AF151893,Smith-Waterman Score=345.
gtggcacagtagactgtagtgtgaggctcgcgggggcagtggccatggaggccgtgctgaacgagctggtgtctgtggaggacctgctgagctgctgcccaaagggagcaaggaggaacagcgggattacgtcttctacctggccgtggggaactaccggctcaaggaatacgagaaggccttaaagtacgtccgcgggttgctgcagacagagccccagaacaaccaggccaaggaactggagcggctcattgacaaggccatgaagaaagatggactcgtgggcatggcatcgtgggaggcatggcctgggtgtggcgggactggccggactcatcggacttgctgtgtccaagtccaaatcctgaaggagacgcgggacccacggagaac

SEQ ID NO: 19261 - DNA, 520 bp, Homo sapiens
  SIMILAR (3)..(374): 971254mologous to Homo sapiens Human regulatory molecule HRM- 7 protein,accession number W93951,Smith-Waterman Score=613.
caggctcggtgtccaagagcacgcagtttgagtacgcctggtgcctggtgcggagcaagtacaatgatgacatccgtaaaggcatcgtgctgctcgaggagctgctgcccaaagggagcaaggaggaacagcgggattacgtcttctacctggccgtggggaactaccggctcaaggaatacgagaaggccttaaagtacgtccgcgggttgctgcagacagagccccagaacaaccagtccaaggaactggagcggctcattgacaaggccataagaaaagatggactcgtgggcatggccatcgtgggaggcatggccctgggtgtggcgggactggccggactcatcggacttgctgtgtccaagtccaaatcctcgctgtcctttccctgttctccccctgccccccgtctctatcctctgtggccttcagctaatttctgctcccctgagattcgtccttcagccccatcatgtgctttgggatgagtgtaaataaaacggggctgtggcttggg

SEQ ID NO: 19262 - DNA, 879 bp, Homo sapiens
  SIMILAR (86)..(472): 561254mologous to Homo sapiens Human regulatory molecule HRM- 7 protein,accession number W93951,Smith-Waterman Score=247.
  misc_feature (1)...(879): n = a,t,c or g
agtggttctccgcccctgccactgggccatggagactgtggcacagtagactgtagtgtgaggctcgcgggggcagtggccatcggaggccgtgctgaacgagctggtgtctgtggaggacctgctgaagtttgaaaagaaatttcagtctgagaaggcagcaggctcggtgtccaagagcacgcagtttgagtacgcctggtgcctgggtgcggagcaagtacaatgatgacatcccgtaaaggcatcgtgctgcttcgaggagctgcttgcccaaaggaagcaagggaggaaccagcggggatttacgtctttctacctggcccgtggggggggaactacccggcttcaaggaattacggagaaggctttaaagttacgttccgcgggtttgcttgcagcacaagagccccaagaacaacccaggcccaaggaaactggaaacggcctcattgacaaggcccatgaaagaaagatggactccgtggggcatggccaatcgtgggaggcatggcccttggggtgttggccgggacttgccggagctcatcggactttgctgtgttccaangttccaaatcctgaaggagacgcgggagcccacggagaacgctccagggagggcctgtccattccttcgctgtcctttccctgtcctttccctgttctccccctgccccccgtctctatcctctgtgggcctttcagctaatttcttgttcccttgaggatttcgttccttcagccccatcatgtgacttttgggatgagtgtaaataaaaacgggggctgtggcttgggaacccccgtgtctgcgttgaggggagggggggttctgaacgctgggcacagggggcgnagacgtcactcctggtcctc

SEQ ID NO: 19263 - DNA, 1104 bp, Homo sapiens
  SIMILAR (836)..(453): 281254mologous to Homo sapiens Human secreted protein HDRMI82, SEQ ID NO:243,accession number Y86328,Smith-Waterman Score =94.
atggcctgccatctgcaagctggcagcccaggaaatttagtggtgtatttccagtccaagcctgaaggcctgagaaccagagagcccatgatgtccgttccagtccaagtcaaaggcccaagtaccaggaagctgatgatgagtgaagatcccctcaccctgggcaactggcacgagcttcgtgtatctcgcacagcaaagaatggaatcttacaggtggataagcagaagatagtggagggaatggcagagctacagcaagtagtaggtaagaacatggactctggggtagggcctgtggtgcatgggggaggcctgacaagaacaggctatttgctcaacccagagtccctgcaacagaaggcctttgaaagaaggcagattcagggctgtgatgagaaactggcatgcgttggcaagcagactcttgggacatggcctttgtccgaatctccctcacttacacgactatactgcagacgacagctaacccaagggagcctcagaatgtccctcaacaatgcgggtgtccctgggcagactgcacctgaccagaggtcaggggagggggtagcagctcctgcagggccaggggaggaggtgggcagggaggaaggagagggggcagcagcaggaaagcgccagtgcccgtgccagcagggcagtctgtgtgtggacaccagccggcctcggctacccaaaagccaggcacagatcccatcttccagccggtccagtccctcctcctcagaacagcaacggggccagctgccaagtgtcagggagcatgtggaaggagggcaaggggaagagagggcaccgcattgcgatgggggagggcgggtgctgctcgcatcaggcctggcctggctgggcactgagaacatcatggacctcgcctccagccccaaggatgactggggtgtggcagtgccaagccgaggctgtgaaaggccttccacctttactctcgtgctcgtgccctcccccattgttaggagaagggcatgctcaggccagcccattagcccaggaggaggacaagaaacacacggagcagacacaagccacctcaccaacccagccaaggctgtcctgaattag

SEQ ID NO: 19264 - DNA, 1658 bp, Homo sapiens
  SIMILAR (1216)..(1287): 871254mologous to Homo sapiens acrosin,accession number M77381,Smith-Waterman Score=135.
ttccctgtacggtcagttctagaatgtaggcagctcccaacacttttattggtttccactttggctcagagaacgatagactgacaatttgcagtaagacccttacatataactggaggagaaaaatagaagacagaattagagaaaatattcatggctaacctagtctgatttctcctggacagctttcagtagacgcctctttttcactagcaccctgcctgcaaacttgtggtctctccccggaccactgtcatggctcttccgccatccatctggtccaagtcagcatagcctttgactgcattgatgtagacgcctcttgagtggtcggcctgctcgcaacctgggtccctgataaatcgcaggacagccagaggagcctatcaaacctaagtcagatcctgactctgctcctgcaccctccgaggcaccccacctcggtgacagccccagccccttgcttgcttatctttaccctccctgctcaccctccccgtctgctccggccacccagtttcccagctgctcctcctgttcctcccagtagctctagccccggattttcagctgtgcctggcactgtcttcctccagagaggtgcagttttcttccaaccgcttcactccagacccagtatcacttccgcagacgggtacctttcctgatcgtcttatccaaaacagccacttcctgtcatgctctacccctgcaaacaccctctgcaaacaccagaccctgacacatgggactgtctgctggctagtccctggtctgtcctccgcactcaatgtaagctccgggaaggcaggcactttgtcattcggatgcaaggctccagttccagcgcctcctacagcaccaggaaacagcccgtagcctattcccattagcttaacaacccctaagcttcgccgcctggggcctgaggggatgagcgcgggttccccgtgggggagggacagagttgccaggtcctggggggctcggagcaccacggttaattcagagtcatcactatcaagaggtggaaaagagatctctgaggtcatttctgctctgttgcagtgttcagagttgtccctgttgactatgtttcccatgtaaataacacgcgccacaggcacactcgcgcgtaaagataaggaaaaaaaaaaggcaatcctgggaaggtagtgggtttcttctttttcttcttcttccttctcctctttccctcctcctcctcctcctccacctcctcctccacctcctccttcttttcttcctcctcctcctcctcctcctcgccgatctaagacagggcgaggcgatgccagcaaacatcgatcccgctgaacaaactgaacattaacaaactcctcctcctcctcctctccccgcgacctgatgacagggagaaatttactccccagccgcagagcgccaggcagcgggagcctattaaagggacagcgtcccgcaggggagaggggcctatctgtcccactctttctctgtattttcttcatgtatttttgtgtttttcctgtctgtcttcccaaattcacatttatatcctcaggttgagcaccgtattggtgcttattaaaaatagtcagtgacagtgtttgctgctcctgaagaatccaaaccaagtcgctggcccagtaatccat

SEQ ID NO: 19265 - DNA, 985 bp, Homo sapiens
  SIMILAR (316)..(873): 541254mologous to Homo sapiens L7a protein,accession number X52138,Smith-Waterman Score=348.
tttcctttctctctcctcccgccgcccaagatgccgaaaggaaagaaggccaagggaaagaaggtggctccggccccagcttttcgtgaggaagcaggatgcccaagagtagtggttgaatcccctctgttaagaaaaggccttaggattttcgtcattggacagggacatccagccccaaaagagacctcccccccttttgtgaaaatggccccggctatatcaggttgcagcgggcagagagccatcctctataaagcggctgaaaggtcccttctgcgattaccccggtttcacccagggccctggaccccgcaaaccagctactcagcttgcttaagctgggcccacaagtacagacccagagacaaagcacagagaagcaaacagagacctgttagccccgggccgagaagaaggctgcttggcaaaggggaccgtcccaaccaaagagacccacctgtccttcgagccaggagttaacacccgtcccccaccttggtggaggaacaagaaaagctcagctgggtggtgattgccacacgacgttgatttccatcgaacttggtttgtctttcttggctggccctgtgtcgtaaaaatggggggtccccttactgcattatcaagggaaaagggcaagacttgggacgttttagtccacaggaaagaccttgcaccactggtcgccttcacacaaggtgaacctcggaagacaaaaggcgcttttggctaaagctggtgggaagctaccagggaccaaattacaacgacagatacagatacgatgagatccgccgtcactggggtggcaatgtcctgggtcctaagtctgtggctcgtatcgccaagctcgaaaaggcaaaggctaaaagaacttgccactaaactgggttaaatgttacactgttgagttttctgtacataaaaataattgaaataatacaaatttttccttcaaaaaaaaaaaaaaagggcggccgct

SEQ ID NO: 19266 - DNA, 657 bp, Homo sapiens
  SIMILAR (85)..(204): 801254mologous to Homo sapiens Human secreted protein, SEQ ID NO: 5576,accession number G01495,Smith-Waterman Score=177.
atgcaaaggaggctttggattgggaagaagggcatcaatgagatcagcggctatagtccaggaatagtcagctcggcatctgtggtggtctacggggcttccgaggcgatcgggcagcgtcagtcttcagccgctaagccgagaaggagtcggtcagacagctttaggccagagttccaggggctctgggagtggctgccagagcaaacaagcaccaacgccgctggcgcgagggcgactctacgcagacagcgacaaacacggtcgacaggcgagcaacacgagggcgaccgatggaatggcgcgcaacgcgggtcgctgacgaagaagacggagaccgcagacggggcgacaacagaccacaagcccgcaccttccgaccgcgcacgtcagtcagacgagcggcaggcacgaacaacagtgagggtcggcgcccgacaaacgcaggcacgaacggcgggcgcggcgtcgacatctacaccgtcaactagagtggcggcacgaacaccgagacagctccaacacaacgacaacacgggcgtcatcaagtcagccgcaacaacgccgcgaccccgactgagtatcgaatcaccagggcgcacgaaaacagcgcgcgaccgcagacgaaccgccccgcggcagcggcacgcgagataa

SEQ ID NO: 19267 - DNA, 2854 bp, Homo sapiens
  SIMILAR (421)..(1398): 391254mologous to Homo sapiens SUMO-1-activating enzyme E1 N subunit,accession number AF090385,Smith-Waterman Score=358.
atgcgcagaagcactccgggcgtgctgccggcggcggtaggtggcgcgcgggtccggcgggcggttggcttgagcgggaccggagctgaggcaggaagagccggcgccatggtggagaaggaggaggctggcggcggcattagcgaggaggaggcggcacagtatgaccggcagatccgcctgtggggactggaggcccagaaacggtgtcaccgaatgaaggaggcactgtccacagccccttttacagacaaggagactcaccctaaggtgtcacttgcccaagttactcgaagctcggcgtctgtgatggtctacggggctttcgaggtgatcgggcagcgtcagtcttcagccgccaagccgagaaggagtcagtcggagagccttgggccagagttccaggggctctgggagtggctgccagcttctcagcacataatgagatccctgaagaagcaggatggaatgggtcaaggatacagggttagcctagaatgggaagtgggccagctcattttcttggaggagaaggtaactccaggaagatcccggagctcagttcttgattcgtacttgggtctgttggccgaaatagggcttgaagcctcttttggagcgagctcagaatttcaaccccatggtggaatgttgaaggtggacactgaggatatagagaagaaaccagagtcatttttcactcaattcgatgctgtgtgtctgacttgctgctccagggatgtcatagttaaaatttgaccagatctgtcacaaaaatagcatcaagttctttacatggagatgtttttggctaccatggatacacatttgccaatctaggagagcatgagtttgtagaggagaaaactaaagttgccaaagttagccaaggagtagaagatgggcccgacaccaagagagcaaaacttgattcttctgagacaacgatggtcaaaaataaggtgtttcttctgccctgttaaagaatgccctggatggttggatcttggatgcatgtgatgaaatgcaaatggctgctctgaagcgcacgacctccgactacattctccttcaagtgctcttaaagtttccgttacagataaaggaagagatcccagttctgtatacatatgaggtaagattctgagttgttgctccagatacggaaatgatgtgcttgactcactgggtattagtcctgacctgcttcctgaggactttgtcaggtactgctttctccgagatggccccagtgtgtgcggtggttggagggattttggcacaggaaattgtgaaggccctgtcttcagcgggtacccttcctctacaactaacttcttcttctttcgatgggcatgaaagggggaatggggattgtgggagtgccttggcccccaagtgaactcaggatttgggcagccccagagatgccaactgcagcatgcccacctgtattccctgttccctttcttcatgaaggcatctccaggcaaggaaaactgaagtcattggcccgatacaaaacatttcctgcaacgaaggaggtggtgccgacgtgctgcttcccatcaccagcagctgctccgacaaggggcgcagggtggctgtctttgttccaagcactgttcaggctgcctgtcatcccgggcctgccagctcccctgagtgatgagcacttccaagcacccctctgcccttttctctgtccttatggtgtcccgggccttggcaggccctctgggggatttgtggggagatgccttgccagggaattgaggcaagctctgtttgcttcggggagcctctttgtcaactttctttggaactttattccccaaccttgataaccttaataggagaaaaagttgtgaaattcaaggttggagagtaggcccaggccccgatgaggcacccagtggaaagcacagctcccaagttccagacaggtgcccttagaggggaaaacccatgaccaggccaaatgcaatttcctctggaagtttgaagaccctgacaaaacaaacaggtggcatcctggtgtgcttgttcttggagttttcggtttaggattagttgaggttcccagctgggttttgggagaaaggagatgctaccaagtcttggaatgttaagggccgagacccctgcaaagttgagtattagaggagcttgtcctttcaaggccaggttccctggggcttcaagggctaggagggaggagccctgccccttttaacagaacccccagtcacattcgggtcaaggccatccggagcttgttccattccagggttttgttggccctttgtttcccccttaacccacagctgtttgtgtttcacatatgttgtgaatttcccttggttctttttaaaggattgatattaaagttacttgctttaggatttgcttgtttttcttccacttcagaagcttctgagagggaatgggatgatcctaccagttgccttttcagacctgaggctctaactcaagagattcctcctctccctcaccattcctgccaccattttttctgggtgatgcagcaagagttaaattgttcacattctagaatgtgtagaagcttctggctccagttgtctaatggataattcagctaaatagtggctattttcagtggcaagaattataataataaagggaagtcaaaagtgatgcttcatatgccccaagtgccacagccgctacgggtcagagcttttattggaagaccaggtttgccttgatgcagccaaagtgcgttccagttcaccccactcttgcttgtgtttcttctttatgtaaattgtgtgatgtttcaataaatcagtctctttcctattctgaaaaa

SEQ ID NO: 19268 - DNA, 411 bp, Homo sapiens
  SIMILAR (409)..(317): 451254mologous to Mycobacterium celatum RNA polymerase beta,accession number AF057459,Smith-Waterman Score=59.
gcctgggacttcccaaggagtcttctctccacaccggctgggtggggccgtgcgctcaccctgccccccaccacaggacagccggcaagctagtgctgggggtgctgagtctcagtttgaaacagcggggcttccctggagaatgagggtgccgcagtcctgtctcctgtgcgtggccccagaacaggatggggtgaggaccccagcacagggaagcgggtgcgtggagtggagaatagaaaactccgatttggctcaaacaggaaagatgcaatcgcccaggcctgctcgtaacggcagagctagctgcccccgcaccccgcccagacgggatggcccctgggtgcggtggaatcaggtgcacgcctgggcggccccgacggctgctgcattccgggcctccctcccccg

SEQ ID NO: 19269 - DNA, 433 bp, Homo sapiens
  SIMILAR (191)..(238): 621254mologous to Gallus gallus B-G antigen,accession number M27663,Smith-Waterman Score=64.
ggaggcaggagatgctacaagggagaagcacattgcaggtttggcaaactgaggcaagcatgcggtgttggaaagtgaggagccacttagtggataattggggggtaattaaaaacatggagagattgctcagtgtaatttgagagccactgcgctctggatgactgtggggtgacaccaaagaacttcagtctccacactcagcaaaccctggcagcgcaggtgggcagagccaggtgtctggagagccggcattggcaggctctggggagctccccagccccggagagaagggcagcattcggtgaggctgttcatctgaaaggttcaggagggtagaggagagggagggccctggctttcttgcttttatttttaaactttttaacctaaggggttggagatgggacaacttctctctcgtaggatgaag

SEQ ID NO: 19270 - DNA, 825 bp, Homo sapiens
  SIMILAR (28)..(246): 321254mologous to Canis familiaris bullous pemphigoid autoantigen 2,accession number AF016649,Smith-Waterman Score=80.
ctggccacacaaccagagggcgcaggccgcgttcccagcatccacccccaaggtggcccggaggctgccttgcaggacctcaggaccctgatggggtcttccagacttcactcaggaaaggagtcaatcgggcacaacagcagcgccggcagctcctcccagggcccacaccatccaaggcgaaagacagccatccttgagaaggggggtaaacagcctcaccgaatgctgcccttctctccggggctggggagctccccagagcctgccaatgccggctctccagacacctggctctgcccacctgcgctgccagggttctttgaaatcctgttaaacccagaaaagggcgcagtgaaccgagaagtggctgggcctctcaactgcccggtggagacagccgcctgcctctacgacctgggacttcccaaggagtcttctctccacaccggctgggtgagccggcaagctagtgctgggggtgctgagtctcagtttgaaacagcggggcttccctggagaatgagggtgccgcagtcctgtctcctgtgcgtggccccagaacaggatggggtgccgcacctcccccgggccctccccgaccagtccgacggcagcgggcgaatgaggaagtcggccgcggaggcggaaaccgggccgggtgcaaggtctgcagcgggacggtccgactctgactcaggaggacgccctgacagctgccaaacggtgcccgctgcccgttacctccgtgcctcagacgccagaaacttccacgggagcggctgccccgggctcccaacccgtgggagccccgccctctagggc

SEQ ID NO: 19271 - DNA, 381 bp, Homo sapiens
  SIMILAR (28)..(168): 971254mologous to Homo sapiens arylacetamide deacetylase,accession number L32179,Smith-Waterman Score=248.
atgagaccaagaagcgggacgttcaccatgggaagaaaatcgctgtaccttctgattgtggggatcctcatagcatattatatttatacgcctctcccagataacgttgaggagccatggagaatgatgtggataaacgcacatctgaaaactatacaaaatttgagcgagactccatctcaacaacgacaacaacaacaacaacaagaactttaccaatcaaatacacatagtctacaatatacatctttggttcgcgtacttaggcaagccattccatcacttgccttacttggaactcagatttgtgagagtaacaggagtcccagccttcaaggccttgaaaggagaatatcacagggtgtgagcttgggaatttaa

SEQ ID NO: 19272 - DNA, 1977 bp, Homo sapiens
  SIMILAR (547)..(1653): 471254mologous to Homo sapiens arylacetamide deacetylase,accession number L32179,Smith-Waterman Score=526.
  misc_feature (1)...(1977): n = a,t,c or g
tgtttgagctactctgtgacatttaatcattaatagaagatttggggtatacactacagatgggccctgtttgctgaaatgttggggccaaacaacttgatagagcctatgatgttcctttcaagctttctaaagtttccaccaacctcagatgaaaatgtaactgtgagaagtaaatttaacaacattgttgtctgcatatgtgtgccaaaatggaagacagaatcatgaaaaagaagcttattttataaccatggtggtggctcatgtttgagtagtaatgctccttggtctggccactgaagaatgacagagcccagggccccggtcccatcntgccatcactngctttggagccccagggtaactcctgccagtaacagagaccaagaagcgggacgttcaccatgggaagaaaatcgctgtaccttctgattgtggggatcctcatagcatattatatttatacgcctctcccagataacgttgaggagccatggagaatgatgtggataaacgcacatctgaaaactatacaaaatttcggctacatttgtggagctcctgggacttcaccattttatggattcctttaaggttgtcgggagcttttgatgaagtcccaccaacctcagatgaaaatgtcactgtgactgagaccaaaattcaacaacattcttgttccgggtatatgtgcccaaagagaaagtcttgaagcactaaggaaggggggttgttttacatcccatgtggaggctggcgccgtggaagttattctctaattgtttatgacctgccgtccagctggaccgtcgaactgacctggttcctcgctcgtatccaaccatctgcagattggcaacttagtttcaatttcccacttcagttgggagagttatatgatgccttaaggtgattcttacgtaaaaaagttcttgcaaaatatgggtgtgaaccctgaggagaatcgggtatttctgggagatagtgcagggaggggaatttagctgtcagcagtagactcaacagctccttggatgaccccagatgttcaagatccaaacttcaagatccagtcttaaatttatcctgccctttcagcctcttggatgtaggttttaccgtcatatcaaggaaaattcaaattttcctatttctattccaaatcactccagtggcagattctggagtgaatattttaccactgatagatcacttgaacaaagccatgctttccagacaacaatgtaccttgtggaatcaagtcatctcttcaaatttattaattggagttcccctgctcccctgagaaggtttattaaaaggacattgtttataacaatcacaaattatggcagttctcgagctggctaaaaaatatccaggggttcctagatgtgagggcagcccctttgttggctgatgacaacaaattacgtggcttaccccctgacctatgtcatcacctgtcaatatgatctcttaagagatgatggactcatgtatgtcacccgacttcgcaacactggggtttcagggtgactcaataaccaatgtggagggttggattccatggagcatttttcatttctgggacttaaaattagtcacagacttataaatcagtatattgagtggctaaaggaaaatctatagtaaaacatgtggctataacattttttaaaaataaaatctgaaaacctcagaaaatttgcattagaaattggtctttcttaaaatggtcgtagttaagttccgacatgtagcataattcttaaataggcacttttctgttttttttttcttactgtgggatttcatttcaattttctacattgtctatctgctttttctgagattttccttcttacactgttaatcttattttaaaaaatattacattcttgtatactttatttttgtgagttggctactatttacgatgcaagagaataaatgtgagcaaatattgcctgt

SEQ ID NO: 19273 - DNA, 912 bp, Homo sapiens
  SIMILAR (164)..(598): 461254mologous to Homo sapiens 16.7Kd protein,accession number AF078845,Smith-Waterman Score=214.
cggacgcgtgggcggacgcgtgggttccggtctcctcagaagtcgcttatctcttcggtggttgtcacacgtgcggaggcctacccgtcgcgcatcctatgatgccgcgtggaagccgaagccgcacctcccgcatggccccatccggccagccgggccccatcagatgagagctgcacccaggccagcacaagtgggttcagccaccagcagcggcacccccatctgcagttggcttcttctgctgctgcgccccggcagcccaggtctgatggcccagatggcaaccactgcagctggcgtggctgtgggctctgctgtggggcacacattgggtcacgccattacctggggctttcagtggaagaaagtaattgcctgagcctgcgaggccttgacatcactttaaccaggaagcttcagggaacccccagcccagcacagcaagcagcagcggcacccccatctgcagcagccttgccccctatgagattcaaacagttttctgggagttttgcccaggaaccaggggtgacattcaagctctggtgagggtttcaatgaaggtgctgaaacagttgccgactttgcaaacggatttgggcctaatgaagaagtttcaacctttggaagagattggaaattcagctctcataacctaagttaatttagtataaaaatagaattgatagtgagggtataaagtgtaaccatcagttaaacctctcctgtcattcctagcttccttgcttcagaattgaaattggaagtggggggtgtccctactctgtagaatctgggactgggcaaatgtttgtgtggcctccttaaactagctgttatgttatgattttattctttgtgagttaattagacacaaagtcatttttttccaaaaaaaaaaaaaaaaaa

SEQ ID NO: 19274 - DNA, 2782 bp, Homo sapiens
  SIMILAR (250)..(681): 761254mologous to Homo sapiens L-iditol-2 dehydrogenase,accession number L29008,Smith-Waterman Score=523.
agcctagtcccgcccctgcgttgcggcgcttctcccaggccccaccttccatccagtgccctggaccctcggctgggtagcgccaccagagcgaccaaactgtcccgcgcctttccaggccgcacgtccagagccaaaagagctccatggcggcggcggccaagcccaacaacctttccctggtggtgcacggaccgggggacttgcgcctggagaactatcctatccctgaaccaggcccaaatgagggtcttgctgaggatgcattctgttggaatctgtggctcagatgtccacctactgggagtatttgtcgaatttgggaattttattgtgaaaaagcccatggtgctgggacatgaagcttcgggaacagtccgaaaaagtgggatcatcggtaaaagcaccctaaaaccagggtgatcgtgttgccatcgagcctgggtgctcccccgaggaaaattgatggaattcttgccaagatgggcccgatacaatctgtcaccttccatcttcttctgtgccacgccccccgatgacgggaacctctgccggttctataagcacaatgcagccttttgttacaagcttcctgacaatgtcacctttgaggaaggcgccctgatcgagccactttctgtggggatccatgcctgcaggagaggcggagttaccctggggacacaaggtccttgtgtgtgggagctgggccaatcggggatgggtcactttgctcgtggccaaagcaatgggagcagctcaagtagtggtgactgatctgtctgctacccgattgtccaaagccaaggagattggggctgatttagtcctccagatctccaaggagagccctcaggaaatcgccaggaaagtagaaggtctgctggggtgcaagccggaagtcaccatcgagtgcacgggggcagaggcctccattccagggcgggcatctacgccactcgctctggtgggaccctcgtgcttgtggggctgggctctgagatgaccaccgtacccctactgcaatgcagccatccgggaggtgggatatcaagggcgtgtttcgatacttgcaacacgtgggccagtggcggattttcgatgctttgcgttcccaagtctgtggaatgtcaaaacccctcgtcacccatagggtttcctcttggagaaaagttttggaggcctttgaaacatttaaaaagggattggggttgaaaatcatgctcaagtgtgaccccagtgaccagaatctctgatgttaatgggctctgccttcaatccccacaggtcctgggatctcaggggcacaatgggctggacatgggttggggctctgatgcagaactttctcttttgaaatgttaaggaataacctaatacaaattccattgtgaaacaagaaagtccctaccgcagagggaattgggtgtgcccttaaaagataccaatctggggatagtttgggggaacttggtaagcccaggaatgcccctgttccatgcctgagcagaagttccagcaaagtagagcagagtttgggcgaggcaggtcccccaggaacgcccgttcgtgtcctggagtgccttcattgaggaaggaaatcctggcccttgggtttccctggttccactgctactgacccagaggggaatgagggctgagttatgaaaagataactttcaatgaagacttaagctggcccagaggctgatgttcatgaaaatgtgccactcagggtgcgtgggatgaagggcttgtcagcacttccaggtttagaacggcaatgtttctagagacatattggctgtttgttttgatgataaaaggagaataagaaaaggcatcactttcctcggatccaggataatttttaaaccaatcaaatgaaaaaaacaagcaaacaaaaaagggaaatgtcatgtgaggttaaaacccagtttgcaattcccccctaatgtggaaaaaagtaaagaggactactcagcacctgtttgaaagattgccctcttcctacagcttcctgaagaattgtgttaatttcacttgcccaaagtgaagggaccccctccccaacatgcccccacccccaccccctaaagtacggtcccttgttcaccagggcaaccagggaaactgctacttgtgggacctcaccaggagaccagggagggttttggttagctcacaggacttccccccacccccagaaagattaggcatccccatacctagacctcatacctcaacctcaacctaggctccatacctcaattggatgggttatttaggaccaattcccatttctttctgggttattattaaacaggaaaatctttcctctttcttcatttaaccagttaaaggctcttgggtatcctttctggttgggaatggatttcctatgaaccttggtcttaatttttaaatggtggggttttttttcctggtaaagatttggaccctaaatcggcatcatgcccaacttgtgacttttgagaactattcatcaagaatgaggatatagtagccatgacatagcataaaagttatagccatttaataccttacctttggctatagggtggagggtgagtttgaagaggttctgattttcttgtaacctgggaaagccatgaccttgtgcccggtctctttcgagattgctttggggaataaataggcggtggtggtatctgaaaaaaaacccaccattaaaataagacaagttcatagaaatcattccaacagaaagataccaagagcctttactggtaatgtcgga

SEQ ID NO: 19275 - DNA, 433 bp, Homo sapiens
  SIMILAR (77)..(430): 961254mologous to Homo sapiens antithrombin,accession number X68793,Smith-Waterman Score=580.
  misc_feature (1)...(433): n = a,t,c or g
tgataacattttcctgtcacccctgagtatctccacggcttttgctatgaccaagctgggtgcctgtaatgacaccctccagcaactgatggaggaaaatgcagagcaatccagagcggccatcaacaaatgggtgtccaataagaccgaaggccgaatcaccgatgtcattccctcggaagccatcaatgagctcactgttctggtgctggttaacaccatttacttcaagggcctgtggaagtcaaagttcagccctgagaacacaaggaaggaactgttctacaaggctgatggagagtcgtgttcagcatctatgatgtaccaggaaggcaagttccgttatcggcgcgtggctgaaggcacccaggtgcttgagttgcccttcaaaggtgatgacatcaccatggtcctcatcttgcccaagcctgan

SEQ ID NO: 19276 - DNA, 326 bp, Homo sapiens
  SIMILAR (59)..(325): 1001254mologous to Homo sapiens antithrombin,accession number X68793,Smith-Waterman Score=452.
ggcacgaggttctacaaggctgatggagagtcgtgttcagcatctatgatgtaccaggaaggaactcaccccagaggtgctgcaagagtggctggatgaattggaggagatgatgctggtggtccacatgccccgcttccgcattgaggacggcttcagtttgaaggagcagctgcaagacatgggccttgtcgatctgttcagccctgaaaagtccaaactcccaggtattgttgcagaaggccgagatgacctctatgtctcagatgcattccataaggcatttcttgaggtaaatgaagaaggcagtgaagcagctgcaagta

SEQ ID NO: 19277 - DNA, 368 bp, Homo sapiens
  SIMILAR (2)..(367): 821254mologous to Homo sapiens Human antithrombin III mutant 1G1R,accession number R42919,Smith-Waterman Score=500.
ggacaccctccagcatacgagggaggtatttaagcgtgacaccatatctgagaaaacatctgagcagatccacttattctttgccgaactgaagtgcccactctatcgaaaagccctcaaatgctgcaggctagaaccaggcactcgcctttctggagacaaataccttaccttcaatgagacctaccaggacatcaccgaggtggtatatggagccaagctccaacccctggacttcaaggaaaatgcagagcaatccagagcggccatcaacaaatgggtgtccaataagaccgaaggccgaatcaccgatgtcattccctcggaagccatcaatgagctcactgttctggtgctggttaacacca

SEQ ID NO: 19278 - DNA, 2123 bp, Homo sapiens
  SIMILAR (499)..(1236): 981254mologous to Homo sapiens antithrombin,accession number X68793,Smith-Waterman Score=1251.
atggcacagttttccattgtggggatgtgccttggtttatttaaccagtctcctacagatggaagtggtgtccaactttttgttattatgaatcaggtcatggcagctaaccttgctgaaacccatgcagctctctgccccaccctgtcctctggaacctctgcgagatttagaggaaagaaccagttttcaggcggattgcctcagatcacactatctccacttgcccagccctgtggaagattagcggccatgtattccaatgtgataggaactgtaacctctggaaaaagcctgccttccacatctcccttggtgccgctgcttctctccggctttgcacctctgttcttgaaagggctgcagaactggactcagaccacgcaagaaggcaagtccccctcagctgccccagcttccagccagccccaggcttgcccaacggaccacgtccgtgaatctgcactgggtgcctgtctttctctcccaggagaagatgggaagatccagaaggtttatcttttgtccttgctgctcattggcttctgggactgcgtgacctgtcacgggagccctgtggacatctgcacagccaagccgcgggacattcccatgaatcccatgtgcatttaccgctccccggagaagaaggcaactgaggatgagggctcagaacagaagatcccggaggccaccaaccggcgtgtctgggaactgtccaaggccaattcccgctttgctaccactttctatcagcacctggcagattccaagaatgacaatgataacattttcctgtcacccctgagtatctccacggcttttgctatgaccaagctgggtgcctgtaatgacaccctccagcaactgatggaggtatttaagtttgacaccatatctgagaaaacatctgatcagatccacttcttctttgccaaactgaactgccgactctatcgaaaagccaacaaatcctccaagttagtatcagccaatcgcctttttggagacaaatcccttaccttcaatgagacctaccaggacatcagtgagttggtatatggagccaagctccagcccctggacttcaaggaaaatgcagagcaatccagagcggccatcaacaaatgggtgtccaataagaccgaaggccgaatcaccgatgtcattccctcggaagccatcaatgagctcactgttctggtgctggttaacaccatttacttcaaggtactcagaatggccctggagagaccccagggacttcctcttgctcttcagcttaccccctttttttttaaatggcgagaccgaagccctgagagggcaaatggactgccgaaagctacacagggcctgtggaagtcaaagttcagccctgagaacacaaggaaggaactgttctacaaggctgatggagagtcgtgttcagcatctatgatgtaccaggaaggcaagttccgttatcggcgcgtggctgaaggcacccaggtgcttgagttgcccttcaaaggtgatgacatcaccatggtcctcatcttgcccaagcctgagaagagcctggccaaggtagagaaggaactcaccccagaggtgctgcaagagtggctggatgaattggaggagatgatgctggtggtccacatgccccgcttccgcattggaggacggcttcagttttgaaggagcagctgcaagacatgggccttgtcgatctgttcagccctgaaaagtccaaactcccaggtattgttgcagaaggccgagatgacctctatgtctcagatgcattccataaggcatttcttgaggtaaatgaagaaggcagtgaagcagctgcaagtaccgctgttgtgattgctggccgttcgctaaaccccaacagggtgactttcaaggccaacaggcctttcctggtttttataagagaagttcctctgaacactattatcttcatgggcagagtagccaacccttgtgttaacctttcagaggccttagctgtcctcgtagtaaatctgactaccttgatgaagagaacacatggagagtccttagacttcatggagagaaagaggagacctgctgagtccatccttctagtctccccaccaaagtgtcag

SEQ ID NO: 19279 - DNA, 1724 bp, Homo sapiens
  SIMILAR (520)..(1608): 431254mologous to Homo sapiens Human antithrombin III mutant 7G30R,accession number R42931,Smith-Waterman Score=403.
acgcctgaccagctctctgccccaccctgtcctctggaacctctgcgagatttagaggaaagaaccagttttcaggcggattgcctcagatcacactatctccacttgcccagccctgtggaagattagcggccatgtattccaatgtgataggaactgtaacctctggaaaaaggaaggtttatcttttgtccttgctgctcgatagcttcggggactgcgtgacctgtcacggcgagccctgtggacatctgcacagccaagccgcgggacattcccatgaatcccatgtggcatttaccgctccccggagaagaaggcaactgaggatgagggctcagaacagaagatcccggaggccaccaacaaccggcgtgtctggggaactgtccaaggccaatttcccgcttttgcttaccactttcttattcagcacctgggcagattccaaggattgacattgattaacatttttctgttcacccctgagtattttccaagggtttttgctatggaccaaggtttggtgcctgtaatgacaccctccagcaactgatggaggtatttaagttttgacaccatatctggagaaaacattctgatcaagatcccacttcttctttgccacaactgaactggccgactctaatcgaaaagccaacaaatcctccaagttagtatcagccaatcgcctttttggagacaaatcccttaccttcaatgagacctaccagggacatcagtgagttggtatatggagccaagctccaggcccctgggacttcaagggaaaatgcagagcaattccagaggcggccatcaacaaatggggtgtccaataagaccgaaggccgaattcaccgatgttcatttccctcgggaaggccattcaatgagctcactgttctgggtggtgggtttaacaccatttactttcaaggggcctgttggaaggtcaaagttcagccctgagaacacaaggaaggaactgttctacaaggctgatgggagagtcgtgtttcagcatctatggatgttaccagggaaggcaagttccgttattcgggcgcgtggcttgaaggcacccggtgcttgtagtttgccctttcaaaggtgatgacatcacccatggtcctcatcttgcccaagccctgagaaggagcctgggccaaggtagagaagggaactcaccccagaggtgcttgccaagagtggctgggattgattttggagggagatgatgctggtggtccacatgccccgctttccgcatttgaggacggccttcaagtttgaagggagcagcctgccaagaacatggggcccttgtcggatcctgttcagccccctgaaaaagtccccaaactccccccggtattgttgcagaaggcccgagatgaccctcctatgtcctcagatgccattcccataaggcatttccttgaggtaaatgaagaaggcagtgaagcagcctgcaagtacccgctgttgtgattgcctggccgttcgcctaaaccccaacagggtgacttttcaaggccaacaggcctttccctgggtttttataagagaagttcctcttgaacactatttatcttcatggggcagagttagccaacccttgtgtttaagttaaaatgttcttattcttttgcacctcttcctatttttggtttgtgaacaagaagtaaaaataaatacaaactacttccatctcacattaa

SEQ ID NO: 19280 - DNA, 780 bp, Homo sapiens
  SIMILAR (6)..(734): 1001254mologous to Homo sapiens immunoglobulin lambda light chain,accession number X57820,Smith-Waterman Score=1282.
ccaccatggcctggactcttctccttctcgtgctcctctctcactgcacaggttccctctcccagcctgtgctgactcagccatcttcccattctgcatcttctggagcatcagtcagactcacctgcatgctgagcagtggcttcagtgttggggacttctggataaggtggtaccaacaaaagccagggaaccctccccggtatctcctgtactaccactcagactccaataagggccaaggctctggagttcccagccgcttctctggatccaacgatgcatcagccaatgcagggattctgcgtatctctgggctccagcttgaggtagaggctgactattactgtggtacatggcacagcaactctaagaacgttagggtgttcggcggagggaccaaactgaccgtcctaggtcagcccaaggctgccccctcggtcactctgttcccgccctcctctgaggagcttcaagccaacaaggccacactggtgtgtctcataagtgacttctacccgggagccgtgacagtggcctggaaggcagatagcagccccgtcaaggcgggagtggagaccaccacaccctccaaacaaagcaacaacaagtacgcggccagcagctacctgagcctgacgcctgagcagtggaagtcccacaaaagctacagctgccaggtcacgcatgaagggagcaccgtggagaagacagtggcccctacagaatgttcataggttctcaaccctcaccccccaccacgggagactagagctgcag

SEQ ID NO: 19281 - DNA, 756 bp, Homo sapiens
  SIMILAR (1)..(705): 1001254mologous to Homo sapiens immunoglobulin lambda light chain,accession number X57824,Smith-Waterman Score=1215.
atggcctggactctgctattcctcaccctcctcactcagggcacagggtcctgggcccagtctgccctgactcagcctgcctccgtgtctgggtctcctggacagtcgatcaccatctcctgcattggcaccagcagtgacattggtgcttattattttgtctcctggtaccagcaatatccaggcaaagcccccaaactcttgatttttgatgtcagtggtcggccctcagggatttctagtcgcttctctggctccaagtctggcaacacggcctccctgaccatctctgggctccaggctgaggacgaggctgattattattgcgcttcatatgcaagaagtagcacggtagtcttcggcggagggaccagcgtgaccgtccttggtcagcccaaggctgccccctcggtcactctgttcccgccctcctctgaggagcttcaagccaacaaggccacactggtgtgtctcataagtgacttctacccgggagccgtgacagtggcctggaaggcagatagcagccccgtcagggcgggagtggagaccaccacaccctccaaacaaagcaacaacaagtacgcggccagcagctatctgagcctgacgcctgagcagtggaagtcccacagaagctacagctgccaggtcacgcatgaagggagcaccgtggagaagacagtggcccctacagaatgttcataggttctcaaccctcaccccccaccacgggagactagagctgcaggatcc

SEQ ID NO: 19282 - DNA, 876 bp, Homo sapiens
  SIMILAR (44)..(754): 961254mologous to Homo sapiens lambda-immunoglobulin light chain,accession number X51754,Smith-Waterman Score=1188.
gtgctggggtctcaggaggcagcgctctcaggacgtcaccaccatggcctgggctctgctcatcctcaccctcctcactcagggcacagggtcctgggcccagtctgccctgactcagcctccctccgcgtccgggtctcttggacagtcagtcaccttctcctgcagtggaaccagcagtgacattggtaattataattatgtctcctggtaccgacaacacccaggcaaagcccccaaactcatgatctatgaggtcactaagcggccctcaggggtccctaaccgcttctctggctccaagtctggcaacacggcctccctgaccgtctctgggctccaggctgaggatgaggctgattattactgctgctcatatgcaggcgactacaccccgggcgtggttttcggcggagggaccaagctgaccgtcctaggtcagcccaaggctgccccctcggtcactctgttcccgccctcctctgaggagcttcaagccaacaaggccacactggtgtgtctcataagtgacttctacccgggagccgtgacagtggcctggaaggcagatagcagccccgtcaaggcgggagtggagaccaccacaccctccaaacaaagcaacaacaagtacgcggccagcagctatctgagcctgacgcctgagcagtggaagtcccacagaagctacagctgccaggtcacgcatgaagggagcaccgtggagaagacagtggcccctacagaatgttcataggttctcaaccctcacccccaccacgggagactagagctgcaggatcccaggggaggggtctctcctcccaccccaaggcatcaagcccttctccctgcactcaataaaccctcaataaa

SEQ ID NO: 19283 - DNA, 1767 bp, Homo sapiens
  SIMILAR (1)..(381): 891254mologous to Homo sapiens immunoglobulin lambda light chain,accession number X57802,Smith-Waterman Score=601.
atggcatggatccctctcttcctcggcgtccttgcttactgcacaggttccgtggcctcctatgagctgactcagccaccctcagtgtccgtgtccccaggacagacagccagcatcacctgctctggagataaattgggggataaatatgcttgctggtatcagcagaagccaggccagtcccctgtgctggtcatctatcaagatagcaagcggccctcagggatccctgagcgattctctggctccaactctgggaacacagccactctgaccatcagcgggacccaggctatggatgaggctgactattactgtcaggcgtgggacagcagcactgcacacagtgacacaggcagatgcggaatagtgggaagaccccctgtcaggcagtgctggcccctgctgctgctgggtctggccatggtcgcccatggcctgctgcgcccaatggttgcaccgcaaagcggggacccagaccctggagcctcagttggaagcagccgatccagcctgcggagcctgtggggcaggctcctgctccagcccagcccccagagagcagaccccaggtgctggccccgggggttttggtctgagcctcagtcactgtgttatgtcttcggaactgggaccaaggtcaccgtcctaggtcagcccaaggccaaccccactgtcactctgttcccgccctcctctgaggagctccaagccaacaaggccacactagtgtgtctgatcagtgacttctacccgggagctgtgacagtggcctggaaggcagatggcagccccgtcaaggcgggagtggagaccaccaaaccctccaaacagagcaacaacaagtacgcggccagcagctacctgagcctgacgcccgagcagtggaagtcccacagaagctacagctgccagctgcagtgggggctggggctaggggcatcccagggagggtttttgtatgagcctgtgtcacagtgtgtggtattcggcggagggaccaagctgaccgtcctaggtcagcccaaggctgccccctcggtcactctgttcccgccctcctctgaggagcttcaagccaacaaggccacactggtgtgtctcataagtgacttctacccgggagccgtgacagtggcctggaaggcagatagcagccccgtcaaggcgggagtggagaccaccacaccctccaaacaaagcaacaacaagtacgcggccagcagctacctgagcctgacgcctgagcagtggaagtcccacagaagctacagctgccagaaacctaaccacgcatcacacggcacttctcgcatgccttctgtgtctgctccagtctctgggctaaagagttgctggtccgggacaggggataggtccgctcttggtcagatgccaggtccctgccatggcatccctgaccctatgcaacaagccagtgactctggtcagcccaaggctgccccctcggtcactctgttcccgccctcctctgaggagcttcaagccaacaaggccacactggtgtgtctcataagtgacttctacccgggagccgtgacagtggcctggaaggcagatagcagccccgtcaaggcgggagtggagaccaccacaccctccaaacaaagcaacaacaagtacgcggccagcagctacctgagcctgacgcctgagcagtggaagtcccacaaaagctacagctgccaggtcacgcatgaagggagcaccgtggagaagacagtggcccctacagaatgttcatag

SEQ ID NO: 19284 - DNA, 763 bp, Homo sapiens
  SIMILAR (341)..(709): 961254mologous to Homo sapiens immunoglobulin lambda- chain,accession number M87790,Smith-Waterman Score=616.
atggcctgggctctgctgctcctcaccctcctcactcaggacacagggtcctgggcccagtctgccctgactcagcctgcctccgtgtctgggtctcctggacagtcgatcaccatctcctgcactggaaccaacaatgatgttgggagttataaccttgtctcctggtaccagcagcacccaggcaaagcccccaaaatcatgatttatgaggtcagtaagcggccctcaggggtttctaatcgcttctctggctccaagtctggcaacacggcctccctgacaatctctgggctccaggctgaggacgaggctgattattactgctgctcatatacaagcagcagacctgactgtggtattcggcggagggaccaagctgaccgtcctaggtcagcccaaggctgccccctcggtcactctgttcccgccctcctctgaggagcttcaagccaacaaggccacactggtgtgtctcataagtgacttctacccgggagccgtgacagtggcctggaaggcagatagcagccccgtcaaggcgggagtggagaccaccacaccctccaaacaaagcaacaacaagtacgcggccagcagctatctgagcctgacgcctgagcagtggaagtcccacagaagctacagctgccaggtcacgcatgaagggagcaccgtggagaagacagtggcccctgcagaatgttcataggttctaaaccctacccccccacgggagactgagctgcaggatcccagggga

SEQ ID NO: 19285 - DNA, 793 bp, Homo sapiens
  SIMILAR (1)..(678): 1001254mologous to Homo sapiens immunoglobulin lambda light chain,accession number X57810,Smith-Waterman Score=1186.
ctccccctcctcactttctgcacagtctctgaggcctcctatgagctgacacagccaccctcgggttcagtgtccccaggcaaaacggccaggatcacctgctctggagatgcattgccaaaaaaatatgcttattggtaccagcagaagtccggccagtcccctgtgctggtcatctatgaggacaccaaacgaccctccgggatccctgagagattctctttctccagctcagggacaatgtccaccttgactatcagtggggcccaggtggaggatgaagctgactactactgttactcaacagacagacgtggtaatcatagggtgttcggcggagggaccaagctgaccgtcctaggtcagcccaaggctgccccctcggtcactctgttcccaccctcctctgaggagcttcaagccaacaaggccacactggtgtgtctcataagtgacttctacccgggagccgtgacagtggcctggaaggcagatagcagccccgtcaaggcgggagtggagaccaccacaccctccaaacaaagcaacaacaagtacgcggccagcagctacctgagcctgacgcctgagcagtggaagtcccacaaaagctacagctgccaggtcacgcatgaagggagcaccgtggagaagacagtggcccctacagaatgttcataggttctcatccctcaccccccaccacgggagtcctggagctgcaggatcccaggggagggggtctctcctcccaccccaaggcatcaagcccttctccctgtcgacgcggccg

SEQ ID NO: 19286 - DNA, 836 bp, Homo sapiens
  SIMILAR (43)..(741): 901254mologous to Homo sapiens immunoglobulin lambda light chain,accession number X57821,Smith-Waterman Score=1108.
cgtggtgtaattcaaggaagcagcactggtggtgcctcagccatggcctggacctttctcttcctcggcctcctctctcactgcacagcctctgtgacctcctttgtgctggctcagccaccctcagtgtcagtggccccaggagagacggccaggattacctgtggggcagacaacattggaagaagaagtgttcactggtaccaacagaggccaggccaggcccctgtgttggtcatctattatgatagcgaccggccctcagaaatccctcagcgattctctggctccaactctggggacacggccaccctgaccatcagcggggtcgaggccggggatgaggccgactattactgtcaggtgtgggatgacgataatagtcatgtggtcttcggcggagggaccaagctgaccgtccttggtcagcccaaggctgccccctcggtcactctgttcccgccctcctctgaggagcttcaagccaacaaggccacactggtgtgtctcataagtgacttctacccgggagccgtgacagtggcctggaaggcagatagcagccccgtcaaggcgggagtggagaccaccacaccctccaaacaaagcaacaacaagtacgcggccagcagctatctgagcctgacgcctgagcagtggaagtcccacagaagctacagctgccaggtcacgcatgaagggagcaccgtggagaaaacagtggcccctacagaatgttcataggttctcaaccctcaccccccaccacgggagactagagctgcaggatcccgggggaggggtctctcctcccaccccaagcatcaagcccttct

SEQ ID NO: 19287 - DNA, 783 bp, Homo sapiens
  SIMILAR (23)..(733): 1001254mologous to Homo sapiens immunoglobulin lambda light chain,accession number X57801,Smith-Waterman Score=1235.
gcgctctcgggacgtctccaccatggcctgggctctgctgctcctcaccctcctcactcagggcacagggtcctgggcccagtctgccctgactcagcctgcctccgtgaatgggtctcctggacagttgatcataatctcctgcactggacccagcagtgacattggtgactatcaatatatttcctggtaccaacaacacccaggcaaagcccccaaactcataatttatgatgtcgataagcggccctcaggggtttctaatcgcttctctggctccaagtctggcaacacggcctccctgaccatctctggcctccaggctgaggacgaggctgattattactgcagttcatatagaggcagcgccactttcgaggtggtgttcggcggagggaccaaggtgaccgtcctacgtcagcccaaggctgccccctcggtcactctgttcccgccctcctctgaggagcttcaagccaacaaggccacactggtgtgtctcataagtgacttctacccgggagccgtgacagtggcctggaaggcagatagcagccccgtcaaggcgggagtggagaccaccacaccctccaaacaaagcaacaacaagtacgcggccagcagctacctgagcctgacgcctgagcagtggaagtcccacagaagctacagctgccaggtcacgcatgaagggagcaccgtggagaagacagtggcccctacagaatgttcataggttctcaaccctcacccccaccacgggagactagagctgcaggatcc

SEQ ID NO: 19288 - DNA, 807 bp, Homo sapiens
  SIMILAR (17)..(715): 1001254mologous to Homo sapiens immunoglobulin lambda light chain,accession number X57805,Smith-Waterman Score=1222.
ctggggtgtctccactatggcctggacccctctctggctcactctcctcactctttgcataggttctgtggtttcttctgagctgactcaggaccctactgtgtctgtggccttgggacagacgctcaggatcaaatgccaaggagacaccatcagaagttattatgcaagttggtaccagcagaagccaggacaggcccctacacttctcatcaatggtaaagacaaccggccctcagggatcccagaccgattctctggctccacctcaggaaacacagcttccttgaccatcactgggactcaggcggaagatgaggctgactattactgtaactcccgggacagcagtgctcaccatctggtattcggcggggggaccaagctgaccgtcctaagtcagcccaaggctgccccctcggtcactctgttcccgccctcctctgaggagcttcaagccaacaaggccacactggtgtgtctcataagtgacttctacccgggagccgtgacagtggcctggaaggcagatagcagccccgtcaaggcgggagtggagaccaccacaccctccaaacaaagcaacaacaagtacgcggccagcagctatctgagcctgacgcctgagcagtggaagtcccacagaagctacagctgccaggtcacgcatgaagggagcaccgtggagaagacagtggcccctacagaatgttcataggttctcaaccctcaccccccaccacgggagactagagctgcaggatcccaggggaggggtctctcctcccaccccaaggcattaagccc

SEQ ID NO: 19289 - DNA, 863 bp, Homo sapiens
  SIMILAR (1)..(546): 861254mologous to Homo sapiens immunoglobulin lambda light chain,accession number X57823,Smith-Waterman Score=810.
atggcctgggctctgctattcctcaccctcctcactcagggcacagggtcctgggcccagtctgccctgactcagcctgcctccgtgtctgggtctcctggacagtcgatcaccatctcctgcactggaagcagtagtgacgttggtggttataactatgtctcctggtaccaacaacacccaggcaaagcccccaaactcatccattatgagggctctaagcggccctcaagggtttatgatcgcttctctggctccatgtctgccaacacggcctccctgacaatctctgggctccaggctgacgacgaggctgattattactgctgctcgtttgctggtagtagcgcccttcgaatcttcggaagtgggaccagggtcatcgtcataggtcagcccaaggccaaccccactgtcactctgttcccgccctcctctgaggagctccaagccaacaaggccacactagtgtgtctgatcagtgacttctacccgggagctgtgacagtggcctggaaggcagatggcagccccgtcaaggcgggatgtggagaccaccaaaccctccaaacagagcaacaacaagtacgcggccagcagctacctgagcctgacgcctgagcagtggaagtcccacaaaagctacagctgccaggtcacgcatgaagggagcaccgtggagaagacagtggcccctacagaatgttcataggttctcatccctcaccccccaccacgggagactagagctgcaggatcccaggggaggggtctctcctcccaccccaaggcatcaagcccttctccctgcactcaataaaccctcaataaatattctcattgtcaatcaaaaaaaaaagtcg

SEQ ID NO: 19290 - DNA, 841 bp, Homo sapiens
  SIMILAR (24)..(716): 1001254mologous to Homo sapiens immunoglobulin lambda light chain,accession number X57802,Smith-Waterman Score=1221.
gcagcatcggaggtgcctcagccatggcatggatccctctcttcctcggcgtccttgcttactgcacaggatccgtggcctcctatgagctgactcagccaccctcagtgtccgtgtccccaggacagacagccagcatcacctgctctggagatacattgggggataaatatgcttgctggtatcagcagaagccaggccactcccctgtgctggtcatctttcaagatagcaagcggccctcagggatccctgagcgattctctggctccaactctgggaacacagccactctgaccatcagcgggacccaggctatggatgaggctgactattactgtcaggcgtgggacagcagcactgcggtattcggcggagggaccaagctgaccgtcctaggtcagcccaaggctgccccctcggtcactctgttcccgccctcctctgaggagcttcaagccaacaaggccacactggtgtgtctcataagtgacttctacccgggagccgtgacagtggcctggaaggcagatagcagccccgtcaaggcgggagtggagaccaccacaccctccaaacaaagcaacaacaagtacgcggccagcagctatctgagcctgacgcctgagcagtggaagtcccacagaagctacagctgccaggtcacgcatgaagggagcaccgtggagaagacagtggcccctacagaatgttcataggttctcaaccctcaccccccaccacgggagactagagctgcaggatcccaggggaggggtctctcctcccaccccaaggcatcaagcccttctccctgcactcaataaaccctcgtgagcag

SEQ ID NO: 19291 - DNA, 804 bp, Homo sapiens
  SIMILAR (1)..(360): 951254mologous to Homo sapiens Lambda-V immunoglobulin light chain variable domain precursor,accession number U93494,Smith- Waterman Score=590.
atggcctggactcctctcctcctcctgttcctctctcactgcacaggttccctctcgcaggctgtgctgactcagccgtcttccctctctgcatctcctggagcatcagccagtctcacctgcaccttgcgcagtggcatcaatgttggtacctacaggatatactggtaccagcagaagccagggagtcctccccagtatctcctgaggtacaaatcagactcagataagcagcagggctctggagtccccagccgcttctctggatccaaagatgcttcggccaatgcagggattttactcatctctgggctccagtctgaggatgaggctgactattactggtcctgggcccagtctgtgctgactcagccaccctcagcgtctgggacccccgggcagagggtcaccatctcttgttctggaagcagctccaacatcggaagtaatactgtaaactggtaccagcagctcccaggaacggcccccaaactcctcatctatagtaataatcagcggccctcaggggtccctgaccgattctctggctccaagtctggcacctcagcctccctggccatcagtgggctccagtctgaggatgaggctgattattactgtgcagcatgggatgacagcctgaatggtcccacagtgctccaggccaatggggaactgagacaagaacccccttcctcctctgtcaggagggtgagccccagcagctgctgctcaagcctggcctgtggcttctgctgctgcagcttccttcatgggtccaggggcatccagggccctgcctga

SEQ ID NO: 19292 - DNA, 1005 bp, Homo sapiens
  SIMILAR (404)..(694): 781254mologous to Homo sapiens immunoglobulin lambda light chain,accession number X57806,Smith-Waterman Score=372.
ggaattcccgcttcgacgatttcgtcgcatggatggactctccccctctcacagtatgaagagagggagagatctgggggatgctcagcttcagctgtgggtagagaagacaggactcaggacaatctccagcatggccagctggggctctcctcctcaccctcctcactcactgtgcagttccagggtcctggggcccagtctgtgctgactcagccaccctcagcgtctgggacccccgggcagagggtcaccatctcttgttctggaagcagctccaacatcggaattaatgatgtgacctggtaccagcaggtcccaggaacggcccccaaactcctcatgtatagtgataatcaccggccctcaggggtccctgaccgattctctggctccaagtctgggcacctcagcctccctggggccatcagtggggctccagtctgaggatgaggctgattattactgtggaacatggggattggcagcctgaatggtctttatgtcttcggcgggggggaccacactgaccgtcacaagtcagcccaaggctgccccctcggtcactctgttcccgccctcctctgaggagcttcaagccaacaaggccacactggtgtgtctcataagtgacttctacccgggagccgtgacagtggcctggaaggcagatagcagccccgtcaaagcgggaagtggagaccaccacaccctccaaacaaagcaacaacaagtacgcggccagcagctatctgagcctgacgcctgagcagtgggaagtcccacagaagctacagctgccaggtcacgcatgaagggagcaccgtggagaagacagtggcccctacagaatgttcataggttctcaaccctcaccccccaccacgggagactagagctgcaggatcccaggggaggggtctctctctccccatcccaagtcatccagcccttctccctgcactcatgaaaccccaataaatatcctcattgacacccagaaaa

SEQ ID NO: 19293 - DNA, 963 bp, Homo sapiens
  SIMILAR (880)..(182): 551254mologous to Homo sapiens Monoclonal antibody 4B5 light chain variable region,accession number W88465,Smith-Waterman Score= 553.
tcgatacgacttttttttttttttttttttttttttttttggttgtcaatgaggatatttattcggggtttcatgagtgcagggagaagggccggcatgacttgggatggggagagaaacccctcccctgggatcctagcagctccaggctcccgtgggtggggttagagttgggaacctatgaacattctgtaggggccactgtcttctccacggtgctccccttcatgcgtgacctgggcagctgtagcttctgtggggacttccactgctccgggcgtcaggctcaatgtagctgctggccgcgtacttgttgttgctctgttttggagggtttggggtggtctccacttcccgccttgacgggggctgccatcttgccttccaggcccactgtcaaaagctccccgggtatgaagccacctgatcaagacacactaagtgtgggccttgtttggctttggaagctccttaaaaggaagggccgggaacagagtggacagtgggcgttgggccttgggctgacttaggacggtgaccttggtccctccgccgaataccacataaaaccactcaatctgtcatcccatgctgcacagtaataatcagcctcatcctcggaccggagcccactgatggccagggaggctgaggtgccagacttggagccagagaatcggtcagggacccctgagggccgctgattattcctatagatgaggagtttgggggccgttcctgggagctgctggtaccagtatacataattacttccgatgttggagctgcttccagaacaagagatggtgaccctctgcccgggggtcccagacgctgagggtggctgagatcagcacagactgggcccaagaccctgacacagtgagtgaggagggtgaggaggagagggaagccggccatgctggagattgtcctgaatcctgtcttctctaccgtcgcacc

SEQ ID NO: 19294 - DNA, 1151 bp, Homo sapiens
  SIMILAR (1)..(651): 701254mologous to Homo sapiens immunoglobulin lambda light chain,accession number D01059,Smith-Waterman Score=700.
  misc_feature (1)...(1151): n = a,t,c or g
atggcctggactcctctcctcctcctgttcctctctcactgcacaggttccctctcgcaggctgtgctgactcagccgtcttccctctctgcatctcctgggacatcagccagtctcacctgcaccttgcgcagtgacatcaatgtaggttcccccttcatatactggtaccagcagaagccagggagtcctccccagtttctcctgaggtacaaatcagactcagataaccaacagggctctggagtccccagccgcttctctggatccaaagacgcttcggccaatgcagggattttactcatctctgggctccaggctgaggacgaggctgattattattgcagttcatatgtgggcaccaacaacttcggtgtgcttttcggcgggagggacccaagctgacccgtccctagggtcagcccaaggcctgcccccctcgggtcactctgttccacaccctccctctgaggaagcttcaaagccaaacaaggcccacactggtgtgtctccataagtgacttcttacccgggaagccgtgacagttgccctggaaggcagcatagcagcccccgtcactggcgggagtggagacccccccacaccctccaaccagaagcaacaacaagtacgcggccagcagctacctgaagcctgacgcctgagcagtggaagtcccacagaagctacagctgcccaggtcacgcatgaagggagcaccgtggagaagacagtggcccctacagaatgttcataggttctcaacccctcacccccccaccacgggagactatagctgcaggaatcccagggagaggggtctctcacacccaccccaagggcatcaagcccttcgtccctgcactcaataacaccctcaataaatattctcattgtcaatcagnnnnnnnnnnnnnnnnnnnnggggggccctttttaaagaatccttgggggggcccaatctttggcggggaaggcaaggcttaacttttttccttttggggggcggatttaaaccctggctgggaatcttgggaaaggaccttaattttgggggggtgccttatttgggcaacctccctccagaaattaaaggctttagggaaaatataaatttttaaagggaaaggggggtaaacaaccggcctcg

SEQ ID NO: 19295 - DNA, 482 bp, Homo sapiens
  SIMILAR (1)..(153): 941254mologous to Homo sapiens putative receptor (AA 1- 192),accession number X51804,Smith-Waterman Score=263.
tacatttccctgcccgctggtgtgctgagcctggcctgctgcaccctctatgggatctcctggcagtttgacccttgctgcaagtaccaagtggagtacgacgcctataaactgtagcgcctgcctctgcacacactcacctgctcccggcccacaagagacaacagagtattcagatcgccacactctgtgaggcagcagagcctgggcaggtgtttggcttagtatttgttatttttaaaaaataacagatcacgggtgtacccagggtttttcagctcattacactaagatgtggatttccataacccaagaggggggtctgaggctgtggaagtccgactgggcagtggaatgctgatggaggcagacgctgccgagggggtgtggacgtgctttgggggaggtctttaagtctattgtttaactgtaccatccagagcccaccagaagctattgatcattaaaattatgagaatttc

SEQ ID NO: 19296 - DNA, 1344 bp, Homo sapiens
  SIMILAR (424)..(918): 431254mologous to Homo sapiens putative receptor (AA 1- 192),accession number X51804,Smith-Waterman Score=217.
cgacgcgtgggagagtgtctccaagatggccgcttggggaaggaggcgtcttggcccgggcagcagtggcgttttctttccgagagagggaaccaacagtgtttgtaatgaagaacatcagactctgagctgtaacctgaattcttgtccaaaattcagcacactggcaacgagcacatcaaacagattgccacttgtcctgtcggcgtctttgagacacacttgcccatctaggaaagcacagtgcaggtatctgtgttctgccaccgtgtgccagcccggaccagctcacagacagccctgcctgtcttacttgggctgctcggcttcactgtctcagggcccctgaacctcccagagccctccgtgattgttgggaatggtgagcttgtcgggccacagacttgcttacattgtggcatggagatctacaatgggggagaatgcccaaggaccagttttgagttacggagctgggagcagggccctaggaaggcccagttacaagttacattgtgattgaggcccactcgcattggcgacgagacagcccgctggatcaccgtgggcaactgcctgcacaagacggccgtgctggcgggcaccgccctccttcttcaccccgggttgcgctgcacacttagatttattccacaccacatatcacctgccccgctgggtgtgctgaagcctggcctgctgcaacctctaatgggatctccttggcaagtttgaaccctttgcttgcaagtaacaagtggaagtacgaacgcctaataaactgtcgcgcctgcctctgcacacactcaccctcctcccaccccgtgtggtgctggtccggaaggacgacctgcacaagaaagagactgccacaacccgataggcactggcccgcccctggtgtactgtgtaaaagaagatttacgaactctatgccgtgatgattttcaagtagacacagggagcgaagccaaaaccgacccggccccacgaagagacaacagagtatttcagatcgcccacacttctgtgagggcagcagacccctgggcacggtgtttggcctagatactatgttattttcactaaaatagacagattacggcgtatacccagggtttttcagccgacttacactccgatgtggatttccataacccagagaggcgggtctgaggctgtggaagtccgactgggcagtggaatgctgatggaggcagacgctgccgagggggtgtggacgtgctttgggggaggtctttaagtctattgtttaactgtaccatccagagcccaccagaagctattgatcattaaaattatgagaatttcaactccaaaaaa

SEQ ID NO: 19297 - DNA, 868 bp, Homo sapiens
  SIMILAR (216)..(617): 301254mologous to Homo sapiens type III procollagen (aa 892- 1023),accession number X01655,Smith-Waterman Score=81.
atgagattggggataggttttgcatgtccgtggaaagggcttgctgatgaatttgatttgaagattgagaaacagaggaatcaagggcgacttcttggttttaaacttcagcacctggtgccctttactgagatggagaagatgggaggggaccggcaaaagcaccggactgctcctcggcaggccgagaggcgccgcagcgggagggtgagtttccagcctccgctgcagcccctcgacgtcacgctcctgcccggggccaccagggagggcaactgtccgcgggcctcgagagggcgccggccgagccccatctcccactgccaggagacccagggtccagaggggagatcagattgcacaatccgaggagtcctctccagtatccccgccgcgcgcccgctccgcaagggcagcggcttccccactgtgtgcgagaagcggccggagcagggacagcagccggccctcgggccctcaccgggaaggacacgcggtttgggtgtttggtgtggccgtcgcgcagggctttgaaggcacagaaacctggcgactcagtctgcagctccggggagtggagcagcccgggccagccttctcctgtagggacggacggaaggatctccagaggagcctgggcttcgcaggcacatcgactacacctctcgcgtctcctttcctttccttccgacccatccccaaggtattattaggaagggggtgctcccaggagcggaggagggggagcctgatggctcaccttagtcacagacaggagctgacacctaaccatcgaagcagctctgtggtggaggtgatgcccacaccatggacggaagcagctccacgggccatggtcatagcctag

SEQ ID NO: 19298 - DNA, 1542 bp, Homo sapiens
  SIMILAR (1048)..(1530): 981254mologous to Cloning vector pZC320 SopB,accession number U26464,Smith-Waterman Score=781.
atgagggtgtaccggaacatgggctacaagttggggctatccaacggacgcagcgagactattgttgtcttagttgctacatcagacaaattgattctattcgtcaagactcaccacacgaagagcacgagcacagacatgcatcgagtcagatgtcactcagatgtcacagacatatcaaagaacagaccttactcgactatactagactcgatcgagctgcgtaactctagtgtgctgactcgcgatggtatcgctacgcgtagccaggccgcacggagtccccggcaccatgtttgggaagaggaagaagcgggtggagatctccgcgccgtccaacttcgacaccgcgtgcacacgggcttcgaccagcacgagcagaagttcacggggctgccccgccagtggcagagcctgatcgaggagtcgctcgccggcccaagcccctcgtcgaccccgcctgcatcacctccatccagcccggggcccccaaggaagtctgctcaccacgagccagtgggacgaggagtagatgagaaaggaaagggaggccctgagggaggtagggacccagcgcccagaaactacccagggggaacaggtctccacggaacttctgtcaacaaaggagcctggagtgaggatgatactagcacctacttcacaggttgctgtgaagatgaaagtgagatgttggggaaaatgcttggggacatccacgtagttgctgttgtcgacctttatggtgaagccacagcagcaactgattcccgagtgattgacacgctgtgtgttcatttaatgaccctgacaatctttaatgcagactttagaaattttacagatggacccattttacagacgaggaaactgaggctcagcaaggctaagcaccttgtcgttgacctacaggtcaccgactggcatcgcactggcagactgctgtgcattgcctcagaaccccacgtcaatctcgctcgcagcgacgagtatctgctccgcattatgagaagacgcgtagcgatgagctatgtagacagaatcattcgtcagacaccggcgttcggtcgaagagtatctggtgtcatagaaattcccgatgggagtcgccgtcgtaaagctgctgcacttaccgaaagtgattatcgtgttctggttggcgagctggatgatgagcagatggctgcattatccagattgggtaacgattatcgcccaacaagtgcttatgaacgtggtcagcgttatgcaagccgattgcagaatgaatttgctggaaatatttctgcgctggctgatgcggaaaatatttcacgtaagattattacccgctgtatcaacaccgccaaattgcctaaagcagttgttgctcttttctctcaccccggtgaactatctgcccggtcaggtgatgcacttcaaaaagcctttacagataaagaggaattacttaagcagcaggcatctaaccttcatgagcagaaaaaagctggggtgatatttgaagctgaagaagttatcactcttttagggatcctctag

SEQ ID NO: 19299 - DNA, 2811 bp, Homo sapiens
  SIMILAR (211)..(1983): 1001254mologous to Homo sapiens PAK4 protein,accession number AJ011855,Smith-Waterman Score=3090.
ccagtgtggtggaattcgtccgcggtggtggcggtgcaagagagctgagggaggcgcgagggcgcggagttccaggtcgagcagttaggccgcgagcgactgcggcgccgagccgatgagtaacccgaagcccctagaggagtggtcacctgcctgagggcacttctgtcccaccagcatcagaccaggccgcaccgagtccccggcaccatgtttgggaagaggaagaagcgggtggagatctccgcgccgtccaacttcgagcaccgcgtgcacacgggcttcgaccagcacgagcagaagttcacggggctgccccgccagtggcagagcctgatcgaggagtcggctcgccggcccaagcccctcgtcgaccccgcctgcatcacctccatccagcccggggcccccaagaccatcgtgcggggcagcaaaggtgccaaagatggggccctcacgctgctgctggacgagtttgagaacatgtcggtgacacgctccaactccctgcggagagacagcccgccgccgcccgcccgtgcccgccaggaaaatgggatgccagaggagccggccaccacggccagagggggcccagggaaggcaggcagccgaggccggttcgccggtcacagcgaggcgggtggcggcagtggtgacaggcgacgggcggggccagagaagaggcccaagtcttccagggagggctcagggggtccccaggagtcctcccgggacaaacgccccctctccgggcctgatgtcggcaccccccagcctgctggtctggccagtggggcgaaactggcagctggccggccctttaacacctacccgagggctgacacggaccacccatcccggggtgcccagggggagcctcatgacgtggcccctaacgggccatcagcggggggcctggccatcccccagtcctcctcctcctcctcccggcctcccacccgagcccgaggtgcccccagccctggagtgctgggaccccacgcctcagagccccagctggcccctccagcctgcacccccgccgcccctgctgttcctgggccccctggcccccgctcaccacagcgggagccacagcgagtatcccatgagcagttccgggctgccctgcagctggtggtggacccaggcgacccccgctcctacctggacaacttcatcaagattggcgagggctccacgggcatcgtgtgcatcgccaccgtgcgcagctcgggcaagctggtggccgtcaagaagatggacctgcgcaagcagcagaggcgcgagctgctcttcaacgaggtggtaatcatgagggactaccagcacgagaatgtggtggagatgtacaacagctacctggtgggggacgagctctgggtggtcatggagttcctggaaggaggcgccctcaccgacatcgtcacccacaccaggatgaacgaggagcagatcgcggccgtgtgccttgcagtgctgcaggccctgtcggtgctccacgcccagggcgtcatccaccgggacatcaagagcgactcgatcctgctgacccatgatggcagggtgaagctgtcagactttgggttctgcgcccaggtgagcaaggaagtgccccgaaggaagtcgctggtcggcacgccctactggatggccccagagctcatctcccgccttccctacgggccagaggtagacatctggtcgctggggataatggtgattgagatggtggacggagagcccccctacttcaacgagccacccctcaaagccatgaagatgattcgggacaacctgccaccccgactgaagaacctgcacaaggtgtcgccatccctgaagggcttcctggaccgcctgctggtgcgagaccctgcccagcgggccacggcagccgagctgctgaagcacccattcctggccaaggcagggccgcctgccagcatcgtgcccctcatgcgccagaaccgcaccagatgaggcccagcgcccttcccctcaaccaaagagccccccgggtcacccccgccccactgaggccagtagggggccaggcctcccactcctcccagcccgggagatgctccgcgtggcaccaccctccttgctgggggtagatgagaccctactactgaactccagttttgatctcgtgacttttagaaaaacacagggactcgtgggagcaagcgaggctcccaggacccccaccctctgggacaggccctcccccatgttcttctgtctccaggaagggcagcggccctcccatcactggaagtctgcagtgggggtcgctgggggtggagagaacactaagaggtgaacatgtatgagtgtgtgcacgcgtgtgagtgtgcatgtgtgtgtgtgtgcaaaggtccagccaccccgtcctccagcccgcaaggggtgtctggcgccttgcctgacacccagccccctctccccctgagccattgtgggggtcgatcatgaatgtccgaagagtggccttttcccgtagccctgcgccccctttctgtggctggatggggagacaggtcagggccccccaccctctccagcccctgcagcaaatgactactgcacctggacagcctcctcttttctagaagtctatttatattgtcattttataacactctagcccctgcccttattgggggacagatggtccctgtcctgcggggtggccctggcagaaccactgcctgaagaaccaggttcctgcccggtcagcgcagccccagcccgcccacccctgcctcgagttagttttacaattaaaacattgtcttgttt

SEQ ID NO: 19300 - DNA, 1583 bp, Homo sapiens
  SIMILAR (1038)..(1235): 521254mologous to Homo sapiens Similar to protein kinase related to S. cerevisiae STE20, effector for Cdc42Hs,accession number BC002921,Smith-Waterman Score=146.
atgcctgtggtcctggccacctcccctgctctgcccctgggcccctgtgttctgggtgggccagccccctcccttgcaggggcagcagctttgatcagagcctggagggggcggggcaggagatttcccgggtgctgctgggcttgtccaaggcctctgagcaggggaataatgcagcggacagggacgatattccacggagtccctactgtgtgctgccctgggctacgaggggggctacagacttgctgtgccacgcgctgtgccaggcgcgggggagccagctgggacagacagaacagaaactccacctgcatgtcccctcgtcccctggtctcaaccttcccctcttcctggaagccttcctgctgcccaccccgcgtccctccaactgggtcccgtgctcccgtcccccagccctgaccaccctgggcagctgtgcatggggacaggccgcaccgagtccccggcaccatgtttgggaagaggaagagcgggtggagatctccgcgccgtccaacttcgagcaccgcgtgcacacggcttcgaccagcacgagcagaagttcacggggctgccccgccagtggcgagcctgatcgaggagtcggctcgccggcccaagcccctcgtcgacccccctgcatcacctccatccagcccggggcccccaagtggggcgaaactggcagctggccgccctttaacacctacccgagggctgacacggaccacccatcccggggtgccagcgggagccacagcgagtatcccatgagcagtccgggctgccctgcagctggtggtggacccaggcgacccccgctcctactggacaacttcatcaagattggcgagggctccacgggcatcgtgtgcacgccaccctcgggcaagctggtggccgtcaagaagatggactgcgcaagcagcagaggcgcgagctgctcttcaacgagagaccctggcagtgcccgtagcaccctgacgataggaagcccaggtccctttgccggtgctgcaggccctgtcggtgctcacgcccagggcgtcatccaccgggacatcaagagcgactcgatcctgcgacccatgatggcaggtgagcaaggaagtgccccgaaggaagtcgctggtcggcacgccctactgatggccccagagctcatctcccgccttccctacgggccagaggtgagcccggggtggcttggttgtcccgccgtggacagcgtacgctgccattttcagctgcagcgctggcgggagatggggcccagtctggggagtcattgccagaatggtgctctggacaaggaggaagggcagcggccctcccatactggaagtctgcagtgggggtcgctgggggtggagagaacactaagagtgaacatgtatgagtgtgtgcacgcgtgtaattccttctaccttgtgaacaagttgttccagaaagatagcactcaggaggcctctgtgaccatggttccagacccagataaggacggcaagaacagagcatctcagaaacgcaaggctcacagccagggtgcccggcgacccacgggcactgagaacagctag

SEQ ID NO: 19301 - DNA, 1071 bp, Homo sapiens
  SIMILAR (555)..(689): 461254mologous to Homo sapiens zinc finger protein,accession number X78928,Smith-Waterman Score=129.
atgggagaggagctgcaagggacccttcccgcggcccctcagtggactgaaatacaagttgccgtggaaagtgcaagtcccactgggcgtatctgccccagctccgccacttctgtggccttggggacccttgatctgctggccgagcctcacttagttcagtggtacaattggactagtgagcacctagcgtttggtttaacagaacaagtctgcatggctttgacacgcttctggacgacgcgtgctgggtccacacctaaatccccagtacacaggacagagaagccgcctcggtgctctcgggccggcgggcagaggaaggagctggaggaaggggcttctcggagggagggcgcgggacgggctccccgggagcgggtccgctgcacctcctccagcggggacttcaggcgatggttggctgtcccaggctgtcacctttctagaccggcttctgatctggctcgggatccacaaggactagacctgcggggaaggtctctcctggacacgcccgttgcccactgcaagttctctccaggtgcaattgaagcctctcagcaggtgagaggccctatctgtgtgactatccagactgtggaaaagcctttgttcaaagtggacagctcaaaacacatcagcgtcttcacaccggagagaaaccttttgtttgttcagaaaatggtgttaaccttgtgttttgaaggctgcctgagcagattcacccatgcaaaccgccactgtccgaagcacccctacgccaggctgaagagagaggagcccacggacacactcagcaaacatcaggctgccgacaacaaggccgcggccgagtggctggcgaggtattgggaaatgagagagcagcgcacccccactttgaaaggcaagctggttcagaaggctgatcaggagcagcaggaccctctggaataccttcagtctgatgaagaggacgacgagaagagaggggcccagcgccggctgcaggagcagcgggagcgcctgcatggagccctcgcgctcatagagcttgccaacctgactggggcgccactccgacagtag

SEQ ID NO: 19302 - DNA, 454 bp, Homo sapiens
  SIMILAR (64)..(441): 311254mologous to Neospora sp. antigen N54,accession number U76556,Smith-Waterman Score=99.
ggaattcggaaatgaggaccggccggacgatgccctgcagactgctctgaagagaaggagggaccttctgcagagactccgggaggccaccctcatgcacataaccctggaagggtcttccagtcatggccatcctgcccggagaggcgcctgtacctggcccaggctggcctgagcctgatgctgggggtgcctctgtggcgttggggctccccgtccccgtgtgcagcagctctgcatcggccttgcaggaacaacacctcctggacgagctctctcgggcccaggcctggagcgggccaagcagaggagccctcgggtcagccctgcccccagagctgccccccacgggcatcctacccactgcctccccatccccgctggccccagacccgccaaggatcatcctgcctacggtcccccagcctcctgccaccatcatttagcagcttcc

SEQ ID NO: 19303 - DNA, 1355 bp, Homo sapiens
  SIMILAR (882)..(586): 371254mologous to Mus musculus proline-rich salivary protein,accession number M11902,Smith-Waterman Score=109.
  misc_feature (1)...(1355): n = a,t,c or g
cacagcccacagccctgaggaagcctgggggtggagggtgccccggccagggtctctgtgactcacactcagggtgggccaggcgtccacaggctgggggcgggctgggagacagttgcagccccaggtgggcacacagcatggtggtggtggtggtggtggngcacggcaggcagccttgtcctggcagctcgtgggaccctcggtggcacatgtggcgggtcctgcagggctgggggcagggccttgagcatccagttctgcaggaccaactggtgcacctgtgcgttctgcagcagcagcagctccaccatgtaggacacagcgaacacagtcagactcatagaaacagaacacaggacggtggttgccaggcactggcaggtggggatgatgtagtcacacaaagacagatactgtacggctccattcatcttccttaatacttcctgaccgttgagtagggaaggcctggtgtcactggggctgagagtgaaacctgcaggcataactggccctgatggatacacagtaagcatagatgtgtttgggatgaggaagatggggggtccacagcaatgaccccccgtactcccttctgtcctgggaggaggtttctggtgcgtaggcaggatgatccttggcgggtctggggccagcggggatggggaggcagtgggtaggatgcccgtggggggcagctctgggggcagggctgacccgagggctcctctgcttggcccgctccaggcctgggcccgagagagctcgtccaggaggtgttgttcccggagtctctgcagaaggtccctccttctcttcagagcagtctgcagggcatcgtccggccggtcctcatttcctggctcgaggtggaggccctcaggtcccccttccacgttctgccgttcttgctccagcttctgtcccaagagcttcagcgtcagtcgggtcacttgctctgctgctgatgagtccagcatggtgggagctgcaggagacgacttggggctgggggcactgggcagggagtcaagtttgcaggaagcttcgcagagggtgacgcaaaacaggagcgtggtctgcacttggttgggcattaaactccacgttgatgagttagtcaatcccactagcaggcagactgacatgtgggggatgtcagcagcaggggcccagaccctggaggccatccaaccagaaatgaagtcagcatgaaaccaggccttaccctccctccagatctgtggagggtgtgggctagggtcacatgacctgcctggtgccacacattcccagatggcagtcaggggtcctcgctggtgctgctggacatgagcagactctggccccat

SEQ ID NO: 19304 - DNA, 2484 bp, Homo sapiens
  SIMILAR (1735)..(2481): 761254mologous to Mus musculus h2-calponin,accession number Z19543,Smith-Waterman Score=960.
atgagaagtggagacctaaagtttggaaaatctgcagcctggccaagtggtcaaaaagaaaagctggttttccgggggaaaattgaagaaggcttagagtatctgcataaaaagaagcccagtgcaaatagccaagacaatgggaaagaggcctcgaaggcatttcatggtcctctgcagcagcccttgctgtcacaggccctagggcctgacagagaagaatggtttcctgggcaagctccatggccccattgctgtgtgcatcctcaggacactgctggctgcatccctgtagttccagctccagccatggctcaaagatgcacaggtacagcttgggttactgcttcagaggtggctccaagccttgattgtttccatatagtgttaagccagcaggtgtacagaattcatagacccacaagcagcttgcaccctcagtatggaaaagctacgaggcacacaacaccagctgtgtccatgagggccgctgcaggggctgaaccctgcaaagccacaggtgcagattggcccaagaccttgggagcccagccctcacacccctgtaccatggatgtgggacagggattcaaaaaggatgattctggagctgctttagcccccatggctgcccttatgggctgggctggtattgagtgcctatggcttttccatactgagggtgtgaactgttggccctgggacctaggagagaagaatggtttgctgggccagccccgtggccctgctgctgtgtgcagcctcaggacactgctgcctgcatcccagcagccccagctcctgctccgaccttggctgaaagatgcacaggtacagcttgggtcactgcttcagagggtgcaagctataggccttggtggcttctacatagtgttaagccagttcatagacccatcaaaagcttcgtaccctccatgggttaaaaactccaggcactcaacagcagcacagcccatgagggcagctgcgggggctgaacactgcaaagccacaggtgcagagctgcccaaggccttgggagcccagccctcatgcccttgtgtcctagatgtgggacaaggatttaaaaagaatgattttggagctgtaggtttgaataactggcctgctgggttttggaatgtcatgggaacctgtaagtcccgtttgtgttttgttcttctctctggcaaaaaatcttcctttcgggtggaggttcttactcaatgcctggacagtcataccttggagacctatcagttttacaatagagaagttgcatttgaagatgtattagaatcttcccaaacgggattggtcgtacagaaaccacaaactgatcggctgacaaaaaggggaagaggagaggcaaccagaaaccttcggggactggttccctccatgcccaggtctcttctccccagcacagctcagcccacagcctggaagtgccagcggggaccttcaccctacacgcatcaggatatggccttgatcccttcccccacagcccggtgtctcagtcctgccaaggaaccaaagcaagaggaggtgggggaaaaatccctgctgcctgatcccacgctgccactcacagaccctcggttgactggcagcactgaacaggcccatgccgaaggcctggccgctctgatgagcgccctgcgtgtatcccatcttcagggacgtggaggagttgtcacacttgtcgattcccagcttggtgtcatagccgtaagctccacgcagttcaacaagggcccctcctacaggctcttggcggacgtccagaacaggcttctgcccaaatatgactcccagaaggaggcagagctccgcagctggatcaagggattcactggcctctccatccgccccgacttccagaagggcctgaaggacgggattattttatgcacactcgtgaacaaactgcagccgggctcagtccccaagatcaacggcttccgtgtagaactggcactagctagaaaacctctccaacttcctcaaggcaatggtcagctacggcatgatcccgtggacctatttgaggccaacaacctgtttgagagtgggaacaatatgcaggtgcgggtgtctcttctcgccctggcagggaaggccaagactaaggggctgcggagcggggtggacatccgtgacaagtactcagagaagcagaacttcgacgacaccaccatgaaggccagccagtgcgtcatccggctgcagattaccaacaaatgtgccagccagtcaggcatgaccgcatatggcacgaggaggcatctctacgaccccaagaaccgcatcctgccccccatggacaattcgaccatcagcctccagatgggtacaaacaagtgcgccagccaggtgggcatgacggctcccgggacccagcggcacatctatgacaccaagttgggaatcgacaagtgtgagaactcctccatgtccctgaagatgggctacacgtag

SEQ ID NO: 19305 - DNA, 1302 bp, Homo sapiens
  SIMILAR (421)..(1296): 761254mologous to Sus scrofa h2-calponin,accession number Z19539,Smith-Waterman Score=1118.
atgcatcaagaagacctcagagcctggtatcttgatcttggacttcctagccaccagaatgaaaccactgatgtatcagtagtttatgaaaggtttagtttaactgatgccacctatccaaaacaggcaaagcagtgggacttccccttccttcgagtcagcacagctcagcccacagcctggaagtgccagcgggcaccttcaccctacacgcatcaggatacggccttgatcccttcccccacagcccggtggctcagtcctgagaaggaaccaaagcagggggaggtgggggaaaaatccctgctgcctgatcccacgctgccactcacagaccctcggttgactggcagcactgaacagaaaaaagacttagccgctggtcctgtcggatccgccctgcgacggcgccctccagccgtaagctccacgcagttcaacaagggcccctcctacaggctcttggcggatgtccagaacaggcttctgcccaaatatgactcccagaaggaggcagagctccgcagctggatcaagggattcactggcctctccatccgccccgacttccagaagggcctgaaggacgggattattttatgcacactcgtgaacaaactgcagccgggctcagtccccaagatcaacggcttccgtgtagaactggcactagctagaaaacctctccaacttcctcaaggcaatggtcagctacggcatgatcccgtggacctatttgaggccaacgacctgtttgagagtgggaacaatatgcaggtgcgggtgtctcttcttgccctggcagggaaggccaagactaaggggctgcggagcggggtggacatccgtgacaagtactcaaagaagcagaacttcgacgacaccaccatgaaggccagccagtgcgtcatccggctgcagattaccaacaaatgtgccagccagtcaggcatgaccgcatatggcacgaggaggcatctctacgaccccaagaaccgcatcctgccccccatggacaattcgaccatcagcctccagatgggtacaaacaagtacgccagccaggtgggcatgacggctcccgggacccagcggcacatctatgacaccaatttgggaatcgacaagtgtgagaactcctccatgtccctgaagatgggctacacgcaggttgccaatcacagcggccaggtctttggcctaggccggcaaatatacgaacccaagtaccagccgggtggcccagtggcccacggggctccctccgccggcaactgcccagggccaggggaggccccttag

SEQ ID NO: 19306 - DNA, 321 bp, Homo sapiens
  SIMILAR (321)..(235): 961254mologous to Homo sapiens butyrophilin, subfamily 3, member A2,accession number AF257505,Smith-Waterman Score=133.
ttttcagcgttaagtaataaaaatttattgagaattcctgggttggtgtttatctcctcccagccttgagggagggaacaacactgtaggaaatcactgagaaatcacgcactgtccccaacagccccagttaacacagggaggaggaaagtaagtcttcagtcttccttaatccaagaggggttcagggaaccggtgtgggggaccatcgcatgatactggggcggggtagggctgtgctgagcaaggagtgagcagctggaccaagaggagggagacatgaaagttgagcagaaggaaagccaggtaacttgccatttt

SEQ ID NO: 19307 - DNA, 1741 bp, Homo sapiens
  SIMILAR (179)..(985): 401254mologous to Mus musculus BAP,accession number AC002397,Smith-Waterman Score=250.
  misc_feature (1)...(1741): n = a,t,c or g
tccgtagtgggctaagggggagggtttcaaagggagcgcacttccgctgccctttctttcgccagccttacgggcccgaacccttgtgtgaaaggggcagtaccttaacccgaaccggggaaaaggcggcccggaacccccttttgaacctccagtgccgccggcctcaagatcagacatggcccagaacttgaaggacttggcgggacggctgcccgccgggccccggggcatgggcacggccctgaaagctgttgctgggggccggcgccgtggcctacggtgtgcgcgaatctgtgttcaacgtggaaaggcgggcacagagccatctctcttcaatcggatcggtggaagtgcagcaggacactaatcctgggccgagggctttcactttcaggatccctttggttccagtacccccattaatctatgacattcgggccaagacctcgaaaaaatctcctcccctacagggctccaaagacctacagatgggtgaatatctcccctgcgaagtgttggtctcgacccaatgctcaggaactttcctaagcatgtaccagtcgcctagggctgggacttacgagggaacgagttgtttgccgtccattgtcaacgaggtgctcaaagagtgtgggtggccaagttcaattgcctcacagcttgattcacccagcgggccccagggtattccctgttggattccgccgggagcttgacagagagggccaaaggactttcaagcctcatccttggatgatgttgggcaatcacagaagttaagctttagcccgaggagttacacagcttgctgtagaagccaaaccaagtggcccagcaggaggcccagcggggcccaattcntgggtagaaaaagcaaagcagggaacagcggcaaaaaatttttgcaaggccgagggtgaggccgagggctgcccaagatgcttggagaagctactgagcaagaacccctggctacatcaaaacttcgcaaagattcgagccagccccagaaattatcctccaaagacgaatcgcccacattcacagaaatccgtaatcttattctccacagcttgaacaaccctttgtggctggaacctaccagggattgaaaagttttcaccacccagggggaagttgaccagcccttcatcaaaggggtaaagaaaatggagcccttagtcacccaagaacttcccaccccccagaaggaaattggatcttgctttcttccagttttttgagggagccaggccagggggttccaggcacaggcccttacccccgccccagttattcatggcgatgggtccccccacacccgttttcccttggaacccctttttgggatttaagggaaggattgaaggattaggcccctttttctgggggaattactttcctcctcccttgtgtttaattgggggttgtttgggggacagttgcgtgatttctcagtgatttccctacagtgttgttcccctccctcaaggctgggaggagataaacaccgaacccagggaattctcaataaaatttttattacttaacctgcaaaacanaganttaataggggcaggggggggggcctttttaggggatccttgggggggccaaattttaccggggttggcaaatttttatttttttccttttggggggcctttttaaaacctttttggggatttttgggagggacctttttttttggggggggaaatattgggccaaattccct

SEQ ID NO: 19308 - DNA, 864 bp, Homo sapiens
  SIMILAR (398)..(604): 541254mologous to Homo sapiens Human LAPH-1 protein sequence,accession number Y00876,Smith-Waterman Score=170.
tcttggatgacagctgggagccagtgcaccctggctgtggagattttatttgccagtggagtgaggaatcaggcctatggagcactgctgaggtgtggagggagaggcgcgggcgggaacccgggctgtgcgaaggggctcgtgggacagcgcgagttccgggtgggcgtgggcccccgcatcagagcggacagccggtgccaccggccccaggcagttgaggggcttagacccgggccagcagctgtggagggtgtgccgggtcccccagcagtgccgcccgccagcgctgcactcgaattctcgcggggcttcagctgcctcccgagatgccacctggttgtgacaaagattggtaaacaggaggatgatgtcagtattaagaggaaaaacaggccggattattggcctgcccctgagccggtggctgggtgtgagggatcagaccaggagcaagtgaagcccaacgccacgctggagaaacacttcctcacggaagggacaggcccaaggagccccagctgtctctcctggccgcccagtgggcctcacgctgcagcagacccagcgatggttccggagacgccggaaccggatcgaccccagctgaccaagaagttctgtgaggccagagtcatggctgtgggcaccagtaatgtgctgggacagactctgaagccatcccgtactggtggtacctcttggagctgggttttctaccttctcactgctaacaggctgccctttgatgtcaagcgcaagggtgggggaccttccagcatcaagcctcgtccccactatgaccaccgtctactgcaggatttcaaggagcaggtgatacaccacttcgtgcggtcatcctga

SEQ ID NO: 19309 - DNA, 1187 bp, Homo sapiens
  SIMILAR (982)..(464): 951254mologous to Homo sapiens Human LAPH-1 protein sequence,accession number Y00876,Smith-Waterman Score=909.
cagaacacgtgcagcagctgcagcaacatcagaagcccgttgaagaagtagtagccgaagaaggggcccctgttgctgatggactcgtagtatgtggtgtagaggatctgggtgggaaagaggaccagtcgggtgtagaagaagacaaaggagaagatgaggaagagagcgtcgcacacttgctgatactgcatgtagttgaccatcttacaggcctccagcaggtagtcagaggaatcgtgtaacagcagcaccagagagccaatgcgcagcaggttggcactgtaggagaaggtcatcaggatgaccgccacgaaggtggtgtatcacctgctccttgaaatccttgcgcttgacatcaaagggcagcctgattagcagtgagaggtagaaacccagctccaagaggtaccaccagtacagggatggcttcagagtctgcagcaggacaggacaaggttagctggtttgggtacctgtcccagcccattactggtgtcctcagccatgtctcgtggtacaggcccgagaggccgcccacgaaggaggccaggtagaagagaaacctccagctggcctcacagaacttcttggtcagctggggtcgatcctggttccggcgtctctggaaccatcgctgggtctgctgcagcgtgaggccacactgggcggccaggagagacagctggggctccttgggcctgtgcccttccgtgaggaagtgtttctccagcgtagcgttgggcttcacttgcctcctggtctgatccctcacacccagccaccggctcaggggcaggccaatgaatctctcaaaggcaaggcgcatggccaggaggaccagcgccaggggcagggctgccaacaagtcctgggggtgggggtagacacggccatcccggtcttctagctctgtccacgtgacattgggtggtagccagaacctgtcctgccaaaaccactcgttgaaactggacagcattctctgctggcagtgggtgagctggaaaaacaggtaaggaaagtcctcaatgcctcttcctccacgcctggctgggcctgctggggcccaggtgcactgaatgaggcttgtaatcagtccaccagctccacttctgtgtttattcacagcagctgctcctgggggtgcaggcggccgggtgcactgagggccgttactcagcgac

SEQ ID NO: 19310 - DNA, 468 bp, Homo sapiens
  SIMILAR (107)..(229): 361254mologous to Eimeria maxima unnamed protein product,accession number A49225,Smith-Waterman Score=77.
caatcaattttagaatatttcatccttcccaaaagcaaatccataccatcagcatttctcattcccctcttctcctcaacacacccaagccctaggcaaccactcatctactttctgtctctagagatttgcctgttctggaaactgcacttacttttgctgtttcctggaggcgttctgctgctgcctgttctgctgcagccatttcctgtcttcccaccggccttgcactcacagtgtccaccacctgtctgcaaggggcttcccacttcatctggaatcagaaattatagaagagacacttatttagccctttatggcagatctttaaaggaaaaataatacttaatggtgcctattagaaacaagaatttcacaaactcttgtcctatttaattgtgtaaaatgaggactgaaataccccagttggctcaataaatatttggtttgaggatgaaaaaaaaaaaa

SEQ ID NO: 19311 - DNA, 624 bp, Homo sapiens
  SIMILAR (235)..(621): 371254mologous to Caenorhabditis elegans similar to plasmodium merozite surface antigen precursor (SP:P04933),accession number U56961,Smith-Waterman Score=221.
atggggagtgaagggtttcaagatatggatcttggagaaattcaagagcaaatagacaccatgccagaggaattaacaaaagatgactggatggagatgagtgcttctcaaccggtgtcagctgaggaggaagaagaagcagcagcagtacagtgggtgatcctagacaagttaataaagaaactggacatgcgtctgaatgaggacatcagttccctgtccactgaagaacttcgtcagtttgtagatgcagtagtggctcacatcgtcaacccagccctagtcaaagatcagttgggaggcactgatgtaacccccaaagagagcctactgacagtcatccacatggtgctgacagagcacgaccctttcaagcacagtgcagactctgaattgaaggctttggtgtgcatggcactgaatgagcagcgtctgatgtcctgggtgaacctcatctgcaagtgcgggtcactcatcgagactcactaccagcctgggagctacatagcacacacaggctttgagagtgccctcaacctgcacagtcgcctcagcagcctcaagttcagcctccctgtagatctggccatgcgccagctcaaaaatatcaaagatgccttttga

SEQ ID NO: 19312 - DNA, 1963 bp, Homo sapiens
  SIMILAR (1248)..(1832): 381254mologous to Caenorhabditis elegans similar to plasmodium merozite surface antigen precursor (SP:P04933),accession number U56961,Smith-Waterman Score=330.
ggatggcggctgtcgaagcggctgcagagccggtaacggtggtggcggctgttgggccaaaggcgaaagacgaagaggaggaggaagaggagccgctgccaccgtgcgaggcgtgcgctgggccccagtgctgtggcgaggcccggcctgggcaaccgcgtttttagaagaggcgacggccgaggagcctggcgcggccccgggctccccgccggattcgccggaccggacgctgcggcggctgcgggcagagcggcggcggctggactcgcgctgctggcgctgtcctcggacttcgcgcaggtgcagttccgcctgcgccaggtggtgcgcggggcgccggcggagcagcagcgccttctgcgggagctcgaagacttcgccttaaaaggttccctgacatcctaggttacgaagggcccggcgaccccgccagcgatgagggcgatgggctgccaggggaccggccacggttgcggggcgaggaccagagtgagcaggaaaagcaagagcgtctggaaacccaaagggagaagcagaaagaactgatactgcagctcaagacccagctagatgacctggaaacgtttgcctatcaagagggcagttatgactcgctgccacagtccgtggtgttggaaagacagcgggtgatcatagatgagttaataaagaaactggacatgaatctgaatgaggacatcagttccctgtccactgaagagcttcgtcagcgtgtagatgcagcagtggctcagatcgtcaacccagcccgagtcaaagaacagttggttgagcaactgaaaactcagatccgagaccttgagatgtttatcaacttcatccaagatgaagtgggaagccccttgcagacaggtggtggacactgtgagtgcaaggccggcgggaagacaggaaatggctgcagcagaacaggcagcagcagaacgcctccaggaaacagcagaacaaaggcagaggatgtgacgaaagtccggaagactgggctgcacctgatgcggcgagcgctggccgtgctccagatctttgctgttagccagattggttgtgccacaggccagatccctccaaccctgtggcagagggtccaggctgacagagactactctcccttgctgaagaggctggaggcgtcagtggacagagtgaagcagctagccttgacggcagagccacatgaccatgtcatcacctctgccaacctccaggacctctctctgtgaggcaaggatgagctgactatggctgtgcggaaggagctaacggtggctgtgagggacctgctggcccatggactgtatgcctcctccccagggatgagccttggtatggctactattgcttgattgctgccagccttctcctcggtcccagaggccatgcacccgagggagctctttgtaaagtactaccatgctaagaacggccgtgcttatgtggaatccccagcccggaagctctcccagaccttcgcccttcctgttacgggaggcactgttgtcacccccaaacagagcctactgacagccatccacatggtgctgacagagcatgacccttttaagcgcagtgcagactcagaattgaaggccttggtgtgcatggcactgaatgagcaccgtctggtgtgctggatgaacctcatctgcaagtccgggtcactcatcgagcctcactaccagccctggagctacatggcacacacaggctttgagagtgccctcaacctgctcagtcgcctcagcagcctcaagtttagcctccctgtagatctggctgtgcgccagctcaaaaacatcaaagatgccttttgatgagagtgccctaaccccagacaagctccttgttcagtagggatagatgtgctagtcttctagcataggagcaaggaatcagaggtggggttaaaggcatttttcccagaccctgcacgaaatcgtcg

SEQ ID NO: 19313 - DNA, 496 bp, Homo sapiens
tgcacatcactcctttattatactgatatggaaaaaggatttagtacagttatgctcagatgaacactggacccatgtggcagggtcaagcaactagaacattattcagaaatcagtgaaagatacacttggacaggaccaagaggcatttcactgccatgaaacaaggcaggaagggattctaatacacacaccaggaagcactcctgcccctcagaggtcaaggagctgatcctatattggtatgaggaatggcttattttctgatgaccacatgttggactatttcaaccgccacaagaaaccccagaagtgttattgttttgtattatatatactatacttttttaataaaagtaaattaacacataacgaaattcaggattgatcccaacctagagccagatcctctggggtcagggaggaaacagttgtcacatcaccacgcaggttacattcgtctttcactggaatgactagagcccccaggcagtag

SEQ ID NO: 19314 - DNA, 432 bp, Homo sapiens
  SIMILAR (200)..(415): 1001254mologous to Homo sapiens phosphoglycerate mutase 2,accession number J04173,Smith-Waterman Score=394.
ggtggaattcacgagatgctggctatgagtttgacatctgcttcacctcagtgcatttatatagcgatccggaccctctggacagtgctagatgccattgatcagatgtggctgccagtggtgaggacttggcgcctcaatgagcggcactatgggggtctaaccggtctcaataaagcagaaactgctgcaaagcatgggtgaggcccaggtgaagatctggaggcgctcctatgatgtcccaccacctccgatggagcccgaccatcctttctacagcaacatcagtaaggatcgcaggtatgcagacctcacagaagatcagctaccctcctgtgagagtctgaaggatactattgccagagctctgcccttctggaatgaagaaatagttccccagatcaaggaggggaaaccgtgtactgattgcag

SEQ ID NO: 19315 - DNA, 1461 bp, Homo sapiens
  SIMILAR (217)..(378): 831254mologous to Mus musculus phosphoglycerate mutase 1,accession number AF283667,Smith-Waterman Score=241.
atgagaacacggagaacaccaagaggggagcattccctgagtgccttctcctcctgtgttgacaaaataagcagggtgtgcaaatcgtttggactggagctggaaaacagcattcagaccctatgggctgaacgcgagcaaagtatttgcttagttgcagctggtcatctcgtatcttcttcaggaatgaggaattggtgtcatgcccgccgccacgccgcctacaaacaggtgctgatccggcacggcgaggttgcgtggaacctggagaaccgcttcggtggctggtacgatgccaacctgaacccagcaggcgacgaggaggcaaagcgctgggagcaggcgctgccagatgctggctacgagtttgatatctgcttaagagaacaatccggaccctctggacagtgccagatgccattgatcagatgtggctgccagtacaacgtaagtaaggatcgcaggtatgcagacctcacagaagatcaactaccctcctgtaatagtctgaaggacactcttgcccgagctctgcccttctggaatgaagaaatagttccccagatcaaggaagggaaatggtcagaccactgcctgggggctctagtcattccagtgaaagatggatgtaacctgcatggtgatgtgacgactgtttcctctctgaccccagaggaacgggctctagaagaacccctaaaccgtcccacaaatgcacttgacatcaagagggctaatgctgggaaagccaccaaaagcctgtgccattccaaacactgggttgtctttgtgaattctcccgtggggctagtagaagaaagcaagccagagtcgtttttagggaaaggagtaacctctgcaggtcgatatcagggggcgagggtttctagctgccaggtgatttgcaatcagactagaaggaaaaaactggcaaccaggggcccctttataggaagatggctggatgagggctgcagaggggtgctgggggtagactgcgtatttctgcagcagatgcccggtcgctatgcccgtggattcggaggtgttcagtttctgggatcaattaagactcgctggctgagccctcgctgcatcgccgctttcacctgctcctgcttcctctgcataggacttcagcgcgaagaagagcgaacgtggctagaacctgttgacctctcctctggcctggaagtccgcacagctcgtggcaacactggacggactggttgtcaggggacgaccgcgggcaggtggggaggaggccttggtctggctcctggattccaccctgggacggaaggggaagcggaaaccttgacctcagccacacaaggacacctatctggctgtctgcctgccctggcccagccacccggttcagaggcctacccttggccacagtggtttgtcctcaggcttggagtccccagagatgtggacacagtgactggcacatag

SEQ ID NO: 19316 - DNA, 462 bp, Homo sapiens
  SIMILAR (36)..(263): 821254mologous to Rattus norvegicus phosphoglycerate mutase B isozyme,accession number M76591,Smith-Waterman Score=311.
agagctctgcccttctggaatgaagaaattattcccccagatcaaggaggggaaacgtgtactgattgccagcccatggcaacagctccggggccattgtcaagcatctggagggtctctctgaagaggctatcatggttctgaacctgccgactggtattcccattgtctatgaattggacaagaacttgaagcctatcaagcccatgcagtttctgggggatgaagagacggtgcgcaaagccatggaagctgtggctgccctggtgtgtgtattagaatcccttcctgccttgtttcatggcagtgaaatgcctcttggtcctgtccaagtgtatctttcactgatttctgaatcatgttctagttgcttgaccctgccacatgggtccagtgttcatctgagcataactgtactaaatcctttttccatatcagtataataaaggagtgatgtgcaat

SEQ ID NO: 19317 - DNA, 2003 bp, Homo sapiens
  SIMILAR (145)..(918): 501254mologous to Homo sapiens phosphoglycerate mutase 1 (brain),accession number BC000455,Smith-Waterman Score=489.
aacttgcgcgggagccggactgagcggtgttagcgcttttgcgcggccgacggggcgggctgctactccggaatctgctaatcccagtcggtgccgcatccccagcccgccgccagtggccgccgtacaaactggtgctgggggcggcacggcgagagcgcatggaacctggagaaccgcttcagcggctggtacgacgccgacctgagcccggcgggccacgaggaggcgaagcgcggcgggcaggcgctacgagatgctggctatgagtttgacatctgcttcacctcagtgcatttatatagcgatccggaccctctggacagtgctagaaatgccattgatcagaaatgtggctgccagtggtgaaggacttggcgcctcaatgagcggcactattgggggtcttaacccggtctcaattaaaagcagaaacttgctgcaaagcatgggttgaggcccaggttgaagatcttggaggcgctcctatggattgtcccaccacctcccgatggagcccgaccatccttttctacagcaacatcagtaaggatcgcaggtatgcagacctcacagaaagatcagctaccctcctgttgagagtctgaaggatactattgccagagctctgcccttctggaatgaaagaaatagttccccagatcaaggaggggaaaccgtgtactgattgcagcccatggcaacagcctccaggggcattgttcaaggcttttggagggtcttttttgaagaggctattcatgggagcttgaacctgcctgacttggtattcccattgtctattgaattggacaagaactttgaaagcctatcaagccccatgcagtttctggggggatgaagagacggtgcgcaaagccatggaagctgtggcttgcccagggcaagggccaagaagtgaaggccggcggggaaggatactgtccccaggatgcaccctcccctgccccgtctttgtcccctcttccccctcccaccttgcacatgtcacacttgaccacatctgtaagacatcttgaagtttgtaacttgcagaccggggaccaagtgggctccccatttttcaattttaacccatttttgtcgccttgcaacccacctcccttcaaaccaatctagttcagaataggcagttctaggaggcacaggttcctcagtcttaaggttatgggaaaaggttccccttatccaacaagagttttaaaagttagtgacttgggttttttgcggagtgctttggtttacaaaggactttgggggaggaaccaatgctaagccaatgaccaagtgaggagaaggcaaccagaagcctgtctggtccccatgaagcggagtctcgtcctctgcttcttctgcagtccaggtcaattgcctactgcctggggggcttcttagtcattccagtgggaaggacggaatgtaaacctgcggtggtgatggtgacaacctgtttccctcccctgaccccccagagggaatctggcctcctagggttggggatccaatccctggaatttccgttaagggggttaaatttaccttttaattaaaaaaaggtataggtaatataataattaccaaaaccaaataaccccttctgggggtttccttggtggccggggttgaaaataagtccccacatggtgggtcaaccaggaaaataagccccattccctcatacccaatattagggattcagctcctttgaccctctggagggggcagggagtgccttccctggtggtgtgtaattaagaatccccttcctgcccttgtttcgatggcgagtgaaatgcctccttggtcctgtccaagtggtatctttccactgatttctgaatcatggttctagttgcttggaccctgccacatgggtccaggtgttcatctgaggcataacctgtactaaatcctttttccagtatcgagtataatgaaaggagtgatgtgcaatagcaaaaaaaaaaaaaagggcggccgct

SEQ ID NO: 19318 - DNA, 475 bp, Homo sapiens
  SIMILAR (148)..(474): 961254mologous to Homo sapiens zinc finger protein,accession number AF244088,Smith-Waterman Score=580.
tcttcgcatgcaggaattccgcacgagggtgagatccccttgaccacaccctcattctcagctggcgctcatgaaggacagatgagtctatgtcagtacaatgtccttgtcatgcccagcctcagaactcgccgtgaggaggcagagatggagctctcagttccaggaccatccccctggacccctgcagcccaggcccgtgtgagagatgctcctgctgtgacccaccctggatctgcagcctgtggtaccccctgctgtagcgatactgagctggaagccatctgccctcactatcagcagccagattgtgacaccaggactgaagacaaggagtttcttcacaaggaagacattcatgaagatttggaatcacaggcagaaatatcagaaaactatgctggtgatgtttcccaggtacccgagcttgtagatctgtgtgaagatgtatcacaaagagactggggagtccccg

SEQ ID NO: 19319 - DNA, 909 bp, Homo sapiens
  SIMILAR (526)..(407): 921254mologous to Homo sapiens calbindin D28K,accession number S46006,Smith-Waterman Score=205.
ctaagccaagaagatctgggaaggagtcagagaaccttgggccagagttccaggggctttgggagtggctgccaggtgagttggacagtccgatttccagcggggtcccgcacagatgggacacagcttaggaggaatcctgggctgcaggcattccttggcctggtggccagatttctggcacttgtagcaagctcttgccccttcccccagaaaagtgggacttgctgctaagggtgaaggaccaaggcaggtgtccctgcgtggtctgacacctctgaaacctgggtgaataatcagagaggcatccctgcaaaggttaaacaccaagggaaggctgccttccctagtccatgaccggtgccggagttttgggtccacggataaaacgtgtctcctttttctccgatttaaaattggtgagatgttccttgggctggtcggtctgaggacctgagcttgtaggtggatctttctcatggagcaaagaacaggaggacaggggattgatctcccaagggaggtccgccgatctgagtcacggcaccaaatttcatgcgcgtctgtgtgaagagaccaccgaacaggctttgtgtgagcaacatggctgtttatttcacccaccaccaccacttgccagctctcgaaaactttactagtgccattgaactttctggagaaacaatatctaacatttcttcttttcctggaatttccaaccttctctttgttcttccgacatactgaagaccacctcatgagatctggttgtttaaaagtgtgtagcatctctcctctctctctcttcctcctagctccagccatgtgagacatctcaccccctctttgccttttgctatgattgtaagtttcctgagagctccccagaagctgagcagatgatgccat

SEQ ID NO: 19320 - DNA, 513 bp, Homo sapiens
  SIMILAR (509)..(435): 561254mologous to Homo sapiens zinc finger protein,accession number U20648,Smith-Waterman Score=72.
atttcttagcctatgtataacttctaaatagcctacactaaatggtaactattacctatgttgtgtttgttattttaaactttaatgttatttattttatttcattttccttccacattacctctgctgttagcagctttgagaaatgctgctataggatgtgggaagtcattaaaggatttaagcagggagaggcaagatcagattaacatttcagaaaaatatttactgttttccagctgaaactagtagagtacaatttactttctggtcacagcacacagcagtcacatcctggaggaactgtacttctctaagatctagtctgtcctgtggtttaaatgacctttagcaaattgtctttattactttgtacactgctttcaccagtctgctcttccatggctaacggggcagaactgttatttttagggttttccacatccagtatgttcataagatttctaccctgtgtgaacttccagatgtcgaataaaggctggatgctgacca

SEQ ID NO: 19321 - DNA, 464 bp, Homo sapiens
  SIMILAR (254)..(45): 641254mologous to Homo sapiens calbindin D28K,accession number S46006,Smith-Waterman Score=213.
cttgtagcattccgaggacaggcctgaattctgagaagggaaagtggtaaaagtattgtccaggcctttttaagttggtggctgagcttggtgaggtgtgtttttaaaagacctttagtccgttctacttttctggatttgaaattggtgagatgtttcttgggctggttggtctgaggacctgaggtcgtaggtggatctttctcatggagcaaagagcaggaggacaggggattgatctcccaagggaggtccccccaatccgagtcatggtaccaaatttcatacgcgtccgtgtgaagagaccaccaaacaggctttgtgtgaggaacacggctgtttatttcacctgggtgcaggcgggctgagtccgaaaagagagtcagcaaagggagataagggtggggcatctgttcatgtggtctgccacatttcctagagcccttgcagttagttggggccat

SEQ ID NO: 19322 - DNA, 996 bp, Homo sapiens; identical to SEQ ID NO: 16793
  SIMILAR (616)..(708): 931254mologous to Homo sapiens calbindin D28K,accession number S46006,Smith-Waterman Score=153.

SEQ ID NO: 19323 - DNA, 443 bp, Homo sapiens
  SIMILAR (116)..(442): 981254mologous to Homo sapiens zinc finger protein,accession number AF244088,Smith-Waterman Score=583.
tttcgtccggcgttggctgagacgtcttcgtgccacggtgctgcctcctttccaagcgcgacccgttgaggtccttgtcatgcccagcctcagaactcgccgtgaggaggcagagatggagctctcagttccaggaccatccccctggacccctgcagcccaggcccgtgtgagagatgctcctgctgtgacccaccctggatctgcagcctgtggtaccccctgctgtagtgacactgagctggaagccatctgccctcactatcagcagccagattgtgacaccaggactgaagacaaggagtttcttcacaaggaagacattcatgaagatttggaatcacaggcagaaatatcagaaaactatgctggtgatgtttcccaggtacccgagcttggagatctgtgtgatgatgtatcagaaagagactgtggagtccccg

SEQ ID NO: 19324 - DNA, 994 bp, Homo sapiens
  SIMILAR (562)..(738): 861254mologous to Human endogenous retrovirus tripartite fusion transcript PLA2L,accession number Z14310,Smith-Waterman Score=273.
atggcctggtctgtggagtatgggccttcattaagagcatgggcccttcatccattggcacaaaacagaagtccggaaagaacagctggaggcagcatccaggtgaaaggccaagcagttcttccaaaggattctttccaaatttgggaaattggctcagggaaagcctgcctgcacagagttctggaaagccagtcctatgatggggctaccttctgcggtggtccagacaaaggcctaagcagcagcatgaggaccagagaagtcagcataactggagcagattttacagctctactggtagatatcattggcaattctaccagctacctcacagagatttttaagtcaacctccatcctctcagtgaatcaaagcaatgaatcagattgcatcttcatctgtgtgatgacaggaaagtcaggaaggaatctttctgacttctgggagatagaagaaaaatatcccattatcaattacacatttaccagcggcttgtctggtgttctggctttattgctcacacaaagcctgtttggtggtctcttcacacggacgcgcatgaaatttggtgccgtcactcggatcgggggacctcccttgggaaatcaatccccgtcctcctgttctttgctccatgagaaagatccacctacgacctcaggtcctcagacagaccagcccaagaaacatctcaccaatttcaaatctggctgctcctcgccaggccgagctaggtcccaattattcctcagcctccactcctccaccctataatctttttatcacctaccctcctcacacccagtccggtttacagtttcattctgtggctgaagctaaaggcatagtcaaggttaatgctcctttttctttatcagacctctcccaaatcagtgagcgtttaggctctttcatcaaatatgaaaaacccagcccagttcatggctcgttcggcagcaaacctgagacgctttacagccctagaccctaa

SEQ ID NO: 19325 - DNA, 1485 bp, Homo sapiens
  SIMILAR (702)..(553): 761254mologous to Homo sapiens calbindin D28K,accession number S46006,Smith-Waterman Score=195.
tcagtcttcagctgctaagccgagaagatctgggaaggagtcagtcagagagccttgggccagatttccaggggctctgggagtggctgccaggtaagttgaacagtccgattttcggtggggtcctacacagatgggacgcggcttaggaggaatcccgggctgcgggcattccttggcccagtggccagatttccggcacatgtagcaagctcctgtgggaggaggttctggaggaacgcctggccgctgcggttcaggcatttggaagttcttgtgtgctggagatgtggctgcggtttgtctcacagtggaggcaaggaattgcaacttttttctattattgtacaccttgaaggcgaggttaattaaatcttgccccttctccagaaaagcgggacttgccgctaagggtgaaggaccaaggcaggcatccctgcgtggtctgacacccttgaaacatgggtgaataatcagagaggtgtccctgcaatgattaaacaccaagggaaggctgccttcccagtccgtgaccggtgccggagttttgggtccatggataaaacctgtctcctttgtcttggatttgaaattggtgagatgtttcttgggctggtcggtctgaggacctgaggtcgtaggtggatctttctcatggagcaaagagtaggaggacaggggagtgatctcccaagggaagtcccctgatccaagtcccgggtcttggcaccaaatttcatgcgcgtccgtgtcaagagaccaccaaacggggtccagctgccctgaagttctgaagccacttggctgatgaaggacaacattggcagggagagtgatggcagctatgtttaggtcctcataagccggatgtggaggcattcccttctttcttttttggagccttgttcttttctccccatttttcttcatggtcacatctaaatggagcattgaggagtatttctccttgagtgtagcacagatgttacctacaatcacaaagtgaagtcccagcataagacatttgcaagctgaagagctaggaagccagtctgagtccccaaacctcaaaagtagggaagctgacaatgcagccttcagtctgtcgctgaaggcttgaaagccactgacaaaccactggtgtaagttcaagagtccaaaagccgaagaacttggagtcctcctcctgccagtgcctgagctgatggtgggaacagcatgcctgtgcccactgttcgaaaaagccagagccccattcccaccctggacacctaggcctgcatgctcatgctctgcatggctgtagcccttgtggttggtggcaccttggagctcctgggcacgaagcagctcatgccaagggtccaggggatgaagctgctggctggtccctgtatcctggggttgtggtacagagctcgagagtgttgagctgagatctgtggctggtactggagctggggaggagtcctcatactcagagca

SEQ ID NO: 19326 - DNA, 861 bp, Homo sapiens
  SIMILAR (585)..(427): 831254mologous to Homo sapiens Human secreted protein, SEQ ID NO: 5210,accession number G01129,Smith-Waterman Score=235.
cttccagaaaagcgggaaaggggtcggggtgcaaagttataagaggttggggtgtagaaataagggatcggggcacagagatatgaggttggggtacttgcccttcctccagaaaagcgggacttgctgctaagggtgaagaaggggttgagggcttcttgcctctcctccagaaaagcagagaaggggtaagagacatggagagaaggggttggggtacttgcccctcctccagaaaagcaggacttgctgctaagggtgaaggaccaaggcaggcatccctgcgtggtctgacacctctgaaacgtgggtgaataatcagagaggcatccctgctatgattaaacaccaagggaagtctgccctcccagtccgtgaccagcactggagttttgggtccacggataaaatgtgtctcctttgtctcggatttgaagttggtgagatgttccttgggctggtgggtctgaggacctgaggtcgtaggtggatctttctcacggagcaaagaacaggaggacaggggattgatctcccaagggaggtcccccgatccgagtcacggcaccaaatttcatacgcgtccgtgtgaagagaccaccaaacaggctttgtgtgagcaacatggctgtttatttcattgggtgcaggcgggctgagtccgaaaagagagtcagcaaagggagataggggtggggccgttttataggatttgggaaggtaatggaaaattacagtcaaagggggttgttctttggtgggcaggggcaggggtctcaaggtgctcagtgggggagcttctgtggttttaacagggcgagccccaaaagcagatgcaggaatgtaaggatcattattcat

SEQ ID NO: 19327 - DNA, 1981 bp, Homo sapiens
  SIMILAR (525)..(358): 831254mologous to Homo sapiens Human secreted protein, SEQ ID NO: 5210,accession number G01129,Smith-Waterman Score=249.
tcaggctgcctgcagctgcgataaggaggacaggatggggctctgcaaaggacatcctgcagcagccaggggagctttccatgcagaagcacatgtggaaacccacagcctgagggattcctggcctgcatactgcacagagtccttgggatggtggggcttggcagtgtcccagactgtgagggcaggtgcattgacagcaagtaccccagaatggtgaagcacagctgtcgttttgccctgactagtgcttcttaaaactgttaaggtcattaaaaacaaggacaacctgagaaactggcagagcacgtaggagtctaacgggacaggatgactcaatttgatatagttttcaggtaaaaacggatttgaaattggtgagatgttccttgggctggtcggtctgaggacccgaggtcgtaggtggatctttctcatggagcaaagagcaggaggacaggggattgatctcccaagggaggtcccccaatccgagtcacggcaccaaatttcatgcgcgtccatatgaagagaccaccaaacaggctttgtgtgagcaacaagactgtttatttcacctgggtgcaggcgggctgagtctttgtcaaaaatcagttgaccataaacatatgaatttatttctggactttcaatgtcattctgttgatcaatgtatctgtccttatgccagtaccacatagttttgattactgcaaatttgtggtaagttttgaaatcaagaagtgtaaattctccaacttcattcttttccaagattgttttggttattctgggtcccttgcatttccacatgaattttggaatcagcttgtcagtttttctctcccgctctcggtttgttattgggaaggtgctgaaggatgctggggctgccaacctggtgcctaattccccaaagcagaggcagctgtggtccagaagccccagggcctgtttccactgtcctccctggggaaatgcgggtattaggcccagagaggcccaggacttatctcgacactctcctttccccggccaagaaaatgcttcctcttcttggaggatggagatgcaaacactccctttctggagcaggtagtaagaatccaggagagcatagcctggggattctgcagtgtggaatactgcaagggcttttatcagggagccagccaaggccttggtgactgatatctcccctagtaacatcatggggtggataggcaaaacaatttggttggtaaggcgcagatcctgaactaatctgtaagacttgtcgggtttttggacaggtaaaatgggggaattgtaaggagagtttataggttttagaagcctatgctgtagcaggtcagtgataacaggctttaatccttttaaagcgtgcggtgggatgggatattggcgttgagtggggtaagggtgattaggtttagtgggatggtaatgggcatgtgatcggttgccagggaaggagtagagatgtcctatacttgtggttaaggtggggggatatgagaggaagacgcaaaggaggccaaagcttggcgtccgtgatggtccagggggtttccaaggcgatgaggcagcgtcactcttcagtcgcagatttgaaattggtgagatgtttcttgggctggttggtctgaggacctgaggttgtacgtggatctttctcacggagcaaagagcagcaggacaggggattgatctcccaagggaggtctcctgatccgagtcacggcaccaaatctcatgcatgtccatgtgaagagagcaccaaacaggctttgtgtgagcaataaagctgtttatttcacctgggtgcaggtggtctgagtccagattcccttggattctggctgtgtctgtggccatcctttgacttctatatgcttttttcctgatggccacacctgtggctctcttgagactacagtcctgagtcactttgctcacaccagcagacagccagaattgc

SEQ ID NO: 19328 - DNA, 925 bp, Homo sapiens
  SIMILAR (542)..(423): 921254mologous to Homo sapiens calbindin D28K,accession number S46006,Smith-Waterman Score=205.
ctaggaaagcgggacttgccgctgagggtgaaggagaaggggttgaggggtacatgcccctgccccaggaaagcgggacttgccgctgagggtgaaggagaaagggttgaggggtacttgcccctgccccaggaaagcgggacttgccgttgcccctgccccaggaaagcgggacttgccgctaagggtgaaggagaaggggttgaggggtacttgccccttcccccagaaaagtgggacttgctgctaagggtgaaggaccaaggcaggtgtccctgcgtggtctgacacctctgaaacctgggtgaataatcagagaggcatccctgcaaaggttaaacaccaagggaaggctgccttccctagtccatgaccggtgccggagttttgggtccacggataaaacgtgtctcctttttctccgatttaaaattggtgagatgttccttgggctggtcggtctgaggacctgagcttgtaggtggatctttctcatggagcaaagaacaggaggacaggggattgatctcccaagggaggtccgccgatctgagtcacggcaccaaatttcatgcgcgtctgtgtgaagagaccaccgaacaggctttgtgtgagcaacatggctgtttatttcacccaccaccaccacttgccagctctcgaaaactttactagtgccattgaactttctggagaaacaatatctaacatttcttcttttcctggaatttccaaccttctctttgttcttccgacatactgaagaccacctcatgagatctggttgtttaaaagtgtgtagcatctctcctctctctctcttcctcctagctccagccatgtgagacatctcaccccctctttgccttttgctatgattgtaagtttcctgagagctccccagaagctgagcagatgatgccat

SEQ ID NO: 19329 - DNA, 2118 bp, Homo sapiens
  SIMILAR (816)..(607): 811254mologous to Homo sapiens zinc finger protein,accession number AF244088,Smith-Waterman Score=303.
ctaatcccaatttatgaggccctgactctccaggcagcatgacttagttggatttttctctgccacgaaacctgccaaggcttcttcatcacccaaaaccctcccatgaccaaccctcaaaagctcccactcttcatttctttctgccttggcattcagttggagcccaccaagaaggagctgcatgacagccatcactaggtctctgagcttgtccaaccaattgaattccaggtttcgtgggtccgctctaggcggctgatagtactcaatgctccggcagtcctgctccttcccggttacgtcccttccagcccttggcggagtctttagcaaattgtttttattactttgtacactgctttcaccagtctgctcttccatggctaacggggcagaactgttatttttagggttttccacatccagtatgttcataagatttctaccctgtgtgaacttccagatgtcgaataaaggctggatgctgaccaaagacctttccacattttttacatgtgtgtagggttgctcaccagtagtattcccctgatgcttcataatggttgatcccagagagaatgccctttcacactcattacattcatagggtttctgtccagtgtgagttatgcaggcaaggttgccctttccacctggctgctgatagtgagggcagatggcttccagctcagtatcactacagcagggggtaccacaggctgcagatccagggtgggtcacagcaggagcatctctcacacgggcctgggctgcaggggtccagggggatggtcctggaactgagagctccatctctgcctcctcacggcgagttctgaggctgggcatgacaaggaccctgctgtgggcctgtgtcctgctgtgggtctgtatcctgctgttgggcttgtgtcctgctgttgggcctgtgtcctgctgttgggcctgtgtcctactgtgggcctgtaccctactgtgggccataccctgctgtgggcccgtgtcctgctgtggggcccgtaccctgctgtgggccatacccttctgtgggcctgtaccctgctgtgggcctgtgtcctgctgtgggcctgtgtcctgctgtggggctgtgtcctgctgtgggcctgtatcatgctgttgggcctgtgtcctgctgttgggcttgtgtcctgctgttgggcctgtgtcatgcctaatgtgggccataacctgctgtgggcctgtgtcctgctgtggggcctgtaccctgctgtgggccatacccttctgtgggcctgtaccctgctgtgggcctgtgtcctgctgtgggcctgtgtcctgctgttgggcttgtgtcctgctgttgggcttgtgtcctgctgtggggcctgtgtcctgctgtggggcctgtaccctgctgtgggcctgtaccctgctgcgggcctgtatcctgctgtgggcctgtgtcctgttgtggggcctgtatcctgctgtgggcctgtatcctgctgtgggcctgtatcctgctgtgaccactcttctcactccttgttgctgacattcacaatgctctgaagctgggcaggccagacccaccccagtgtgcacttctgcactgccaccaacttccttggtgattatgtccagtcttgaggcatcaacacccttgttaagattcacaaacttgggctcatctccagtcctaactactccattgtactgacattgactcttctgtccttcatgagcaccagctgagaatgagggtgtggtcaaggggatctcaacgggtcgcgcttggaaaggaggcagcaccgtggcacgaagacgtctcagccaacgccggctgacccccggaagtcccgccccgaattccggcccgccgctcgttctatctggggcagcgtagcctctcttgtagcattctgaggacaggtctgacttagaatgaaactgtaaaccggactgggtgtgaggagggtaggtgataaaaagattatagggtggaggagtggaggctgaggaataattgggacctagctcggcctggcgaggagcagccagatttgaaattggtgagatgtttctggggctggtcggtctgaggacctgaggtcgtaggtggatctttctcat

SEQ ID NO: 19330 - DNA, 5210 bp, Homo sapiens
  SIMILAR (2614)..(4473): 941254mologous to Homo sapiens putative p150,accession number U93572,Smith-Waterman Score=3044.
atgctgttttgggcctttgacaaaattcaacagcccttcatgctaaaaactctcaataaattaggtattgatgggacgtatctcaaaataataagagctgtttatgacaaacccacagccaatatcatactgaatgggcaaaaactggaagcattccctttgaaaactggcacaagacagggatgccctctctcaccactcctattcaacatagtgttggaagttctggccagggcaatcaggcaggagaaggaaataaagggcattcaattaggaaaagaggaagtcaaattgtccctgtttgcagatgacatgattgtatatctagaaaaccccatcatctcaacccaaaatctccataagctgataagcaacttcagcaaagtctcaggatacaaaaacaatgtgcaaaaattacaagctttcttatacaccaataacagacaaacagagagccaaatcatgagtgaactcccattcacaattgcttcaaagagaataaaatacctaggaatccagcttacaagggatgtgaaggacctcttcaaggagaactacaaaccactgctcaaggaaataaaagaggatacaaacaaatggaagaacattccatgctcatggataagaagaatcaatattgtgaaaatggccatactccccaagaggactccattattatcgctgcctagtacattatatgaggagctgtggagacttaggtcctacttcccattgtgccctcaactttacaacatggagcagaataccacagactgggtaatttataaagaacagtgcatttggctcacagctctggagactggggagtccaagagcactgcaccagcatttggcaagggttatcccatggcagaatacatcatatggggcagattgacacctcacatggctggctactcctctgagacaaaacttccagaggaacgatcaggcagcaacatctgctgttcaccaatatccgctgttctgcagcctctgctgctgatacccaggcaaacagggtctggagtggacctccagcaaactccaacagacctgcagctgagggtcctgactgttagaaggaaaactaacaaacagaaaggacatccacaccaaaaccccatctgtacgtcaccatcatcaaagaccaaaggatcaaattcacacataacaatattaaccttaaatgtaaatgggctaaatgctccaattaaaagacacagactggcaaattggataaagagtcaagacccatcagtgtgctgtattcaggagacccatctcacgtgcagagacacacacaggatcaaaataaagggatggagggagatctaccaagcaaatggaaaacaaaaaaaggcaggggttgcaatcctagtctctgataaaacggactttaaaccaacaaagatcaaaagagacaaagaaggccattacatgatggtaaagggatcaattcaacaagaagagctaactaccctaaatatatatgcacccaatacaggagcacccagattcataaagcaagtccttagagacctacaaagagacttagactcccacacattaataatgggagactttaacaccccactgtcaacattagacagatcaacgagacagaaagttaacaaggatatccaggatttgaactcagctctgcaccaagtggacctaatagacatctacagaactctccaccccaaatcaacagaatatacattcttctcagcactacaccacatttattccaaaattgaccacatagttggaagtaaagcactcctcagcaaatataaaacaacagaaattataacaaactgtctctcagaccacagtgcaatcaaactcgaactcaggattaagaaactcactcaaaaccgctcaactacatggaaactgaacaacctgctcctgaatgactactgggtacataacaaaatgaaggcagaaataaatacattatttgaaaccaacgagaacaaagacacaacataccagaatctctgggacacattcaaagcagtgtgtagagggaaattcatagcactaaatgcccacaagagaaagcaggaaagatctaaaattgacaccctaacatcacaattaaaagaactagagaagcaagaacaaacacattcaaaagctagcagaaggcaagaaataactaagatcagagcaaaactgaaggaaatagagacacaaaaaatccttcaaaaaatcaatgaatccaggagctggttttttgaaaagatcaacaaaattgatagaccactagcaagaccaataaagaagaaaagagagaagaatcaaatagatgcaataaaaaatgataaaggggatatcaccactgatcccacagaaatacaaactaccatcagagaatactataaacacctctatgcaaataaactagaaaatctagaagaaatggataaattcctcaacacatacaccctcccaagactaaaccaggaagaagttgaatctctgaataaaccaataacaggctctgaaattgaggcaataattaatagcttaccaatcaaaaaaagtccaggaccagatggattcatagccaaattccaccagaggtacaaggaggagctggaggccagcatcatcctgataccaaagcctggcagagacacaaccaaaaaagagaattttagaccaatacccctgatgaatattgatgcaaaaatcctcaataaaatactggcaaaccgaatccagcagcacatcaagaagcttatccaccatgatcaagtgggcttcatccctgggatgcaaggctcgttcaacatatgcaaatcaataaacgtaatccaggatataaacagaacgaatgacaaaaaccatatgattatctcaatagatgcagaaaaggcctttgacaaaattcaacaacccttcattctaaaaactctcaataaattaggtattgatgggacgtatctcaaaataataagagctatctatgacaaacccacagccaatatcatactgaatgggcaaaaactggaagcattccctttgaaaactggcacaagacaggggtgccctctctcaccactcctattcaacatagtgttggaagttctggccagggcaatcaggcaggagaaggaaataaagggcattcaattaggacaagaggaagtcaaattgtccctgtttgcagatgacatgattgtatatcgagaaaaccccatcgtctcaacccaaaatctccataagctgataagcaacttcagcaaagtctcaggatacaaaatcaatgtgcaaaaatcacaagcatttttatacaccaataacagacaaacagagagccaaatcatgagtgaactcccattcacaattgcttcaaagagaataaaatacctaggaatccaacttacaagggatgtgaaggatctcttcaaggagaactacaaaccactgctcaaggaaataaaagaggatacaaacaaatggaagaacattccatgctcatgggtaggaagaatcaatatcgtgaaaatggccatactgcccaaggtaatttatagatttaatgccatccccatcaagctaccaatgactttcttcacagaattggaaaaaactactttaaagttcatatggaaccaaaaaagagcccgcattgccaagtcaatcctaagccaaaggaacaaagctggaggcatcacactacctgacttcaaactatactacaaggctacagtaaccaaaacagcatggtactggtaccaaaacagagatatagaccaatggaacagaacggagccctcagaaataatgccacatatctacaaccatctgatctttgacaaacctgacaaaaacaagaaatggggaaatgattccctatttaataaatggtgctgggaaaactggctagccatatgtaggagaaagctgaaactggatcccttccttacaccttatacaaaaattaattcaagatggattaaagacttaaatgttagacctaaaaccataaaaaccctagaagaaaacctaggcaataccattcaggacataggcatgggcaaggacttcatgtctacaacaccaaaagcaatggcaacaaaagccaaaattgacaaatgggatctaattaaactaaagagcttctgcacagcaaaagaaactaccatcacagtgaacaggcaacctacagaatgggagaaaatttttacaatctacccatctgacaaagggctaatatccagaatctacaaagaactcaaacaaatttacaagaaaagaacaaacaaccccatcaacaagtgggtgaaggatatgaacagacacttctcaaaagaagacatttatacagccaaaaggcacatgaaaaaatgctcatcatcactggccatcagagaaatgcaaatcaaaaccacattgagataccatctcataccagttagaatggcgatcattaaaaagtcaggaaacaacagaccaagctccaatgtcttctctgtgaaactttctgagatccaatccttggctctcatagagactaggtgcttaatgaatgctgatgaacagggtgtgccactgattcaagaaatgctggaatcttgggcaagtatttgcaaagttcccaagtatccaaatgccgaagcagtgcggccagaagagcaaacaccccacctgcacccaggtgaaataaacagccatgttgctcacacaaagcttgtttggtggtctcttcacacggacacgcatgaaatttggtgccgtgactcggatcgggggtcctcccttgggagaatcaatcccctgtactcctgtgttctttgctccgtgagaaagatccacctacgacctcaggtcctcagaccgaccagcccaaggaacatctcaccaattttaaatccggagcttgctacacttgctggaaatctggccactgggcaaaggaatgcccgcagcctgggattcctcctaagccgcgtcccatctgtgtgggaccccacttgaaaattcggacttgttcaactcaccttgggcaagccactcccagagcccctggaactccggcccaaggctctctgactgactccttcccagatcttctcggcttagcggctgaagactgacactgcctgattgcctcggaagccccctagaccatcacgcacgccgagcttcgggtaactctcacagtggaagaaggcaggaatgtcaggcca

SEQ ID NO: 19331 - DNA, 2277 bp, Homo sapiens; identical to SEQ ID NO: 2747
  SIMILAR (46)..(1683): 921254mologous to Homo sapiens glycerol-3-phosphate dehydrogenase,accession number U36310,Smith-Waterman Score=2585.

SEQ ID NO: 19332 - DNA, 1542 bp, Homo sapiens
  SIMILAR (1078)..(1395): 1001254mologous to Homo sapiens similar to mouse adseverin(D5); similar to PID:g2218019,accession number AC005281,Smith-Waterman Score=556.
ttccaaagtcgctttcacattttctggtatctgttcagcagcatcccagtctaccagtaccagtttactgtattagttcattctcacactgctgataaagacatacccaagactgagcaatttacaaaagaaacagatttattggacttaccgttccacatggctggagaggcctcacagtcatggcggaaggtgttggtgtccagaggagaaatggaagaaacaggggcaaaaagctcagactcaggagcccagctggcttcacccagtggatcccacactggggctgcaggtggagctgcctgccagtcccgtgccgtgcggccgcactcctcagccattgggcggtcgatgggaccgggcgccgcggagcagggggcggcgctggtggggaggcttgggccgcgcaggagcccatggcgtcggggaggctcaggcatggcaggctgcaggtcccgagccctgccccgcggggaggaagctgaggcccggcgagaaatcgagcgcagcgccggtgggccggcactgctgggggacctggcgcaccctccgcagctgctggcccggggcgccgcctccccggatggcaaacactataaagtggcggcgaataaggttcctcctgctgctctcggtttagtccaagatcagcgatatcacgcgtcccccggagcatcgcgtgcaggagccatggcgcgggagctataccacgaagagttcgcccgggcgggcaagcaggcggggctgcaggtctggaggattgagaagctggagctggtgcccgtgccccagagcgctcacggcgacttctacgtcggggatgcctacctggtgctgcacacggccaagacgagccgaggcttcacctaccacctgcacttctggctcggattctacccgcaccatgctgcttgtgggtctggtagacaaaaactccgcttcattcggaagctggcgtcctcagatagaagcatcataaaaatctacatctacatctttatggtattctcagttagggttcggatcccaaatcggcagaagaatgacaccagagtcctttcagattgcaaaattgccggaaaggagtgttcccaggatgaaagcacagctgctgccatcttcactgttcagatggatgactatttgggtggcaagccagtgcagaatagagaacttcaaggatatgagtctaatgactttgttagctatttcaaaggcggtctgaaatacaaggctggaggcgtggcatctggattaaatcatgttcttacgaacgacctgacagccaagaggctcctacatgtgaagggtcgtagagtggtgagagccacagaagttccccttagctgggacagtttcaacaagggtgactgcttcatcattgaccttggcaccctgactatgattcagtctcatctgacacacagtcacatctgggaaatggcagttatcatcccagtttcaaaaggggaaacaaaagccttaggctttagaagttcctcggaaaatgttcttgttatgggcatcgatgacccctggtaa

SEQ ID NO: 19333 - DNA, 418 bp, Homo sapiens
  SIMILAR (175)..(417): 981254mologous to Homo sapiens cell recognition molecule Caspr2,accession number AF193613,Smith-Waterman Score=428.
atgcctgagcctcccacccactccatgggctcctgtgcggcccgagcctccccgacgagcgccaccccctgctccacagcgcccagtcccatcgaccacccaagggctgaggaatgcgagcgcacggtgcaggactggcgggcagctccacctgcagccccagtgcgggatccactagaaacagggaaaattgaccaagagattcacaaatacaacaccccaggattcactggttgcctctccagagtccagttcaaccagatcgcccctctcaaggccgccttgaggcagacaaacgcctcggctcacgtccacatccagggcgagctggtggagtccaactgcggggcctcgccgctgaccctctcccccatgtcgtccgccaccgacccctggcacctggatcacctggattcag

SEQ ID NO: 19334 - DNA, 819 bp, Homo sapiens; identical to SEQ ID NO: 2750
  SIMILAR (138)..(1): 671254mologous to Homo sapiens Human secreted protein, SEQ ID NO: 7420,accession number G03339,Smith-Waterman Score=146.

SEQ ID NO: 19335 - DNA, 1083 bp, Homo sapiens; identical to SEQ ID NO: 14696
  SIMILAR (526)..(296): 371254mologous to Mus musculus alpha-1 type II collagen,accession number M63709,Smith-Waterman Score=87.

SEQ ID NO: 19336 - DNA, 524 bp, Homo sapiens
  SIMILAR (349)..(269): 581254mologous to Lycopersicon esculentum glycine-rich protein,accession number X55691,Smith-Waterman Score=80.
tcatacctctaaagctgcgtgcacagatgaggtatctgcaaggtctgtgcagagcccttgtgtattggcattgagactgaagccttgaatagtatagtctatctttgctgaactaattgggatgaagaaatagattttggccgatgtaagcatttttagtttgaggagctgagtggaggcagctccaagaaatcttaggtgatttctcggtgtcttagctgccttcccgcggggcaggacttgggacctgcagcccgccatgcctgagcctcccaccccctccatgggctcctgtgccgcccgagcctccccgatgagcactgccccgtgctccacggcgcccagtcccatcgaccacccaagggctgaggagtgcaggcgcagggcgcgggactggcaggcagctccacctgcagccccagtgcgggatccactgggtgaagccaactgggctcctgagttctttgggtccacactgcctttacgagctgtaacactcaccgtgaaggtctgcagcttcactc

SEQ ID NO: 19337 - DNA, 855 bp, Homo sapiens
  SIMILAR (46)..(153): 751254mologous to Homo sapiens hypothetical protein,accession number AL162044,Smith-Waterman Score=155.
ctagacataaagactctccacgtccccaccagactcaggagcccagctggcttcacgtagtggatcccacaccggggctgcaggtggagctgcctgccagtcccgcaccatgcgctcgcactcctcagcccttgggtggtcgatgggactgggtgccccattgcagagacactgaattaatagttcaggtggcagctggttggttgataaagaatcttttccagtcccatcagctctcaacttttcccctttggggagaaaaagttctccatgttccaaagtcctgtatatgcctaatcctgtcagccatagcatgatccccagtggctctgagagatcaatggacacaaatggatcctgttggtacctcacttgttcacttagcgcccctggcaggagagacaccaggatcaggaaagtgttttcccaagggaggctccttgtgctgactctcatgatttccccaagtgtaggacactcaactgcataatctgtgtagtgggagatagtgtttatgccctccccaagggaggcatcagggacatcagtggaggtggggatgggtggggtggagcatggggagaagccaactgctgcccagcccagcaggaacagatgcccccatctccagagttcaactgagcccacgtgggcaatctggattctccgacccagcactgaggaggcagccccttcatttccccttgatgttgatggctgttgagtgatgagggtggtggttgctgaaggctcaggtggctgtggcagtttacactgcttggtgttctttgagttttctgaatcctggatctgtgctttggtgtctgccattaattttgtaatgttcttgaccat

SEQ ID NO: 19338 - DNA, 498 bp, Homo sapiens
  SIMILAR (295)..(14): 1001254mologous to Homo sapiens OSBP-related protein 1; ORP1,accession number AF323726,Smith-Waterman Score=495.
gaatgattttcacctttcgtcctgtaaaggcagctcgatgaagcggcgtgtctcccatgtcattcaacacattcacttctgcaccagccttcaacagatcctggaccacttgtctgtgtccaaaatagcatgccagatgtagaggtgtccagcccaagttagacttacttcttcctttgcaattaatgtcagcaatcacttcattcctcgccatggtctctaatagttgtcttacttcttcagcattgccatttctggcgtgatggagaagctgttgctccgcttctgtgttcatttctacgcggtcacccgggctcccagagctcccgaggcggtggccacgaccccaggcttcccgtccgcccgccccacgtcgaggaagtggtcgtcaccaactctggctggcactccccgaggacgctcgagcccgcgtaacgtctgtctccgggacccggcgccgggaccacggcggagcgcgaggtggcgccgcccacgaaa

SEQ ID NO: 19339 - DNA, 1565 bp, Homo sapiens
  SIMILAR (951)..(1271): 401254mologous to Homo sapiens zinc finger protein,accession number X78932,Smith-Waterman Score=211.
aaatgaacacagaagcggagcaacagcttctccatcacgccagaaatggcaatgctgaagaagtaagacaactattagagaccatggcgaggaatgaagtgattgctgacattaattgcaaagcgcccagtcccatccaccacccaagggctgaggagtgcgggcgcatggtgcaggactggcaggcagctccacctgcagccccagtgcgggatccactgggtgaagccagctgggctcctgagtctggtggggagaatgaggaaattgaagcaatggcagccatttatggcgaggagtggtgtgtcattgatgactgtgccaaaatattttgtattagaattagcgacgatatagatgaccccaaatggacactttgcttgcagcagcaaccacctttatcccctgaagatcctgtccagccatctgtcacatggtcatgtaggccacaaacgccaacacaacatggggatgagaagaaagtacccacaaatggaaacactggttacatgggatggggccagctggtgctcagactgccacatggggttgagggacagccgtggcggctgcagctggtccctcggatggggtacattgaagtaggaggcttgttgtgcactgctgctggagagatgtcaactcacgctagaagtgctaaggaagtaggatctgctcttttcaaaccaggagtggccatccagagtgcccacaatgtcactggacgagacaaaaccattcatccattcagcagccgcacaaagcagcctacaccaagaaaacaacaatacatcccccaaacagatccaacagctgctcatcaatctggtgcaagctgcagaaactgtacatgtgtggaccatgagggagaagctttaatttcagtgcaaatcttcatcagccccagaaggggcacagtggagagagacctttctgaaaaaaacaagggcagggccatcttgttgaagagccacagagttcacactcaagagatgccatttccatgcagcaaggttggaaaaggctacctggtcagctctggcctcttccagcaccaagcaattcacaatgagaagccatgcaggagtgccatgtatggggacatgtttcatactcaacaaggacatttcaaatgcattgactatggagaagcattcagtcctaaagacactcctggccagcaccagataattcacactggagaaaagccttatgtgtgcactgaatgtgagaaaacctgcacaagaagttccaatctcattcagcacaagcccaagggtttgttgtctttgcttgtgctaagtccctccactggaaacgccctcttttccaccctctctcagcttacgcagcttctgctcacctttgatgtccgctcagatgctaccttcttcaggaaaggaagtggtcgtcaccaactctggctggcactccccgaggacgctcgagcccgcgtaacgtctgtctccgggacccggcgccgggaccacggcggagcgcgaggtgttgtctgtcttattcacggctgtgtccccgacaccagaagcagccccgatgtatggtag

SEQ ID NO: 19340 - DNA, 1519 bp, Homo sapiens
  SIMILAR (1220)..(1366): 871254mologous to Homo sapiens Human secreted protein, SEQ ID NO: 7102,accession number G03021,Smith-Waterman Score=223.
atgataagagaacagaaggtgaaggaagtatacatctgtgctgggaagaagaagagccatatgcacctgtggcacaatggggaaaaatacaacagacttggacgtaaagacagaaaaatgactcacgagggatggcttataaagatcccgcatttccctggaagaaaatacaaggcatctggattacactgggaacagatgaagcatatggggggtagagggaaggtgcatctggaattcacagagatgtatgtggcagggcggagaggggaggtgaaagatgaggtgttggaaccgatgtcgctgactgaagtctacattccaactgagaatgacagggaggtgtggagggagaggcgcctgcgggcacctgggctgtgcgcggcgcttgagggccagctggagttccgggtgggcgtgggcttggcgggctccgcactcgaagcagctggccagccctgctggccccgggcaggcagggctcgggacctgcagcccgccatgcctgagcctcccccagcctccgtgggctcctgtgcagcccgagcctccctgaggagcgccgccccctgctccacggcgcccagtcccatcggccacccaagggctgaggagtgcgagcgcacggcgcaggactggcaggcagctccacctgcagcccccgtgcgggatccacttggtgaagccagctgggctcctgagtctgtcatgtggccacccctggattcaaggcagtctgaggaggtgagtgtttcaaagaggcacatggatgccacagacaaaatcaagtttccatggttgaaggagaagaggacgatagagtttggggaggcagcaggctacgtctgccacagaagatataaagatatggagccacacgagaagatgggggaggctgccaaaaaagtccactgggtacagatgaggagcagggctcgggacctgcagcccgccatgcctgagcctcccacccactcaaagggctcctgtgcggcccgagcctccccgacgagcaccaccccctgctccacgacgcccagtcccatcgaccacccaaagggctgaggagtgcgggcacatggcgtgggactggcaggcagctccacctgcagccccagtgcgggatccactgggtgaagccagctgggctcctgagtctgctgtaacatacgccgtgaaggtctgcagcttcacccctgaagccagcgagatcgcaaacccaccggggggagcgaacaactccagacgcgcgcccttaagagctgtaacactcactgcgaagggctgcagcttcactcctgagccagcgagaccacgaacccaccagaaggaagaaactacgaacacatccgaacatcagaaggaacaaactctggacacgccgcctttaagaactgtagcactcaccacgagggtccgcggcttcattcttaaagtcagtgagaccaagaacccaccaattccggacacaatgccatcaccagtaagaagatacatcaacatgatgttccctcagtag

SEQ ID NO: 19341 - DNA, 567 bp, Homo sapiens
  SIMILAR (209)..(565): 991254mologous to Homo sapiens Novel polypeptide isolated from plasmid pHNT2 using human nervegrowth factor (NGF) gene fragment as a probe,accession number R06649,Smith-Waterman Score= 581.
ccgaattcctgggctcccttccgaacagctccgcgcaccgccccgcgacgcagcccggcgcaactactttcttctctctcctttctttcttcctctcctttttcccctgctgggtagtggctgcggcggggtgggggagactttgaatgaccgagctcgcgtccacctttctcttcatgtcgacgtccctggaaacggccacacggatgccatggttacttttgccacgatcttacaggtgaacaaggtgatgtccatcttgttttatgtgatatttctcgcttatctccgtggcatccaaggtaacaacatggatcaaaggagtttgccagaagactcgctcaattccctcattattaagctgatccaggcagatattttgaaaaacaagctctccaagcagatggtggacgttaaggaaaattaccagagcaccctgcccaaagctgaggctccccgagagccggagcgcggagagcccgccaagtcagcattccagccggtgattgcaatggacaccgaactgctgcgacaacagagacgctacaactcaccgcgggtcctgtg

SEQ ID NO: 19342 - DNA, 813 bp, Homo sapiens
  SIMILAR (609)..(391): 951254mologous to Homo sapiens Human PGF-2/NT-3,accession number R48296,Smith-Waterman Score=369.
atgactggaaaatgccagatcatagttgtctcactacctggcctgctctcttcggctaccatccggttctcgcatcaggtcggcgtggctcattccaagcattatgttgctaaactacacgtctcccggcctcccacgccaccgctcaaagtccgagaacaggctggacgataccgcaaggagatcccctgggatggccgggcccgggtgcccgccgctccccggaggggtcccagatgtgcgggctgcgtacggagctccaacatctgcgcaaaggcccagggtggggtggccaccgggtgggcgctggccaagaggagcccggggcgcgaggtcttttctgaaaaaaccctttcggggaactccaacgcaggtacgcggcgcgtggcagtgcccgccgcctccccttaccgtggcaaaagtaaccatggcatccgtgtggccgtttccagggacgtcgacatgaagagaaaggtggacgcgagctcggtcattcaaagtctcccccaccccgccgcagccactacccagcaggggaaaaaggagaggaagaaagaaaggagagagaagaaagtagttgcgccgggctgcgtcgcggggcgcacgaacacgcccaaggacaatcgctccccggcgaactccccgctcccggggacccgcacccaggacgctgtgtcggcggtcaagggaggtcaaggatggggccctgcagctaatcactcgcccagcacccaccagtctgcacgcggggacagcgcgagaagcaggaaaggcgagcaacaaacaaacctgttcgtggcgccccgaaagtaa

SEQ ID NO: 19343 - DNA, 1854 bp, Homo sapiens
  SIMILAR (607)..(726): 771254mologous to Homo sapiens Human secreted protein, SEQ ID NO: 6834,accession number G02753,Smith-Waterman Score=165.
atggacgagggtgctttgctcaggaatggaaaagttaggtctactgatgttatttctcacgtggtacaagttctcaaagggagaggagaaagctctcaaagaaacacaaagccagaccatcagtgcacaccttcccataggaatacctaccagcaaagagttcaaatgagtgagaaaggaaaagctggctatagaagaaaagctgggagaaggaaaggtctggccactgcttcgtctacagtgggaaagttacaccacacacacatgtcaaagggaaaaggcagcatttctgaagagcccactgtgtatctggcgacgtcactgaatattccattggctgaattattaatccatccatctactgaaaagcatcttggttacttccaagttttggcaattacaagtaaagctgctacaaacacttgtgtgcaggtgggacaagatggctacagtgggctggacattggtattttccttctgccttgtggaataatagacctggctgaagtcgggtatctcctttcctccagcactgttcacaatagcaaagacttggaggtaacccaaatgcccatcaatgatagactggataaagaaaatgtggcaatatacaccatggaatactatgcagccatagaaaaggatgagttcatgtattttgcaggaacatggatgacgctggacactgtcattctcagcaaattatcacaagaacagaaaaccaaacaccgcatgttctcactcataagtgggagttgaacaatgagaacacatggacacagggaggggaacatcacaccggggcctgtcggggaagcgtacccggctacgcctacgcccaacggcatttagctttggcgatatttgctgccgcgcacgaccagtacgcgaaccatattgtcacacgaagagaccgctacctgcgggactgtgcgttgctttttggtggtgggcggtacacctttggggacatggtgcactacgccaacgcgagtttacttaagtgtgtgattagacgaaaccataaagacgggggcagacggcagacgccggcccgcttccagaaaggaggcccaggagccgatataatacacttgcctgaagtgaaccctaccgcaacccggcgtgcgaaagggttgtcggccacatacggccgtgtcaccaaggggcacatggacacccagcaacgccgagttttacacctcagggccctagacccagcagccaacggtcactcccctgaaaaggtaaatcaaggggtttcttcttggtttggatccattgctggtctagtcacccagcaggtctaccaggctctgggctggtacagcagaggggttgtctgcacagagtcctgtgatgtgaactgtctatgggtctctcagctgtggataccagtgcttgttctggtggaggtacttttcatttttaactcctaataacaaccctaatgaagtagctattattactcccccctcccccactcagcagataggggaactctgggccacaaaagtcaaacaacttaccgaacagctccaaaagaggttcccagaccccctgatttacctgctccagcctggggtggctgctcacctccaggtgatggcctcgggggagcctcttaagacttggagcagaggtggctccgaactgaaggacactgacaattggcagcttgcctctgtcctcttctctcccttccctcacaggaacggagctggacaactgagctcaccatacgaacgatcgaatcttattgcggaacatctgcgagccacgatccgtgctagtgggcagcaaccattcaaactacgagggcattcaaccatctcgctctttaacatcgtctag

SEQ ID NO: 19344 - DNA, 954 bp, Homo sapiens
  SIMILAR (212)..(772): 371254mologous to Rattus rattus ribosomal protein L9 (AA 1- 192),accession number X51706,Smith-Waterman Score=144.
tgctgcgtctactgcgaggctgggacacactggggcccgctgtcggtctcccgtcctccgacatcttgtctggaacttccgcctggcagtctccagtaggagtggagctctgtgcggcgtattttggtggaaaaacgggccttgcgtcggcctcacccccagtgtttgtgtttcagaatgaagactattctcagcaatcagactgtcgaccattcccagaaaaatgtcgacattactctgaaggggacgccccagtaatcgtgtaagggccccagaggaacctctgcggaagggacttcaatccacatcaaatgtggaacctcagcccttcttgggaaagaacaacaaagaggcttccgggttgaccaaatggtggggtaaccggaaagggaactgggctacccgttcgggactatttggtagtcatgtacaggaccatgatccaaggggtgttaccactggggcttccggttacaaagatgagggtcctgtgtatgcctcaccttccccccatccaaccgttgttatcccagggagaaatgggtcctctttgttgaaatcccgaaattttcttgggtgaaaaatacatcccgcagggtttccggatgaagaccagggtgttgctttgttcagtatctcaaagcccagaaaagatgaaattaatccttgaaaggaaatgacatttgagcttgttttcaaatttcagcgggctttgattcagcaaagccacaacagttaaaaacaaagggtatcaggaaattttttggatgggtatcaatgtctctggaaaaaggaactgttcaaccaggcttgattgaataagatctaagaagttacctggctacagaaaaaaagatgccacgatgacacttcacgacctacttgtgatatattaaaagatgcaaaaaaaaacacatattagatttggaaaaaaaaaaaaaaaaaaagtcgagc

SEQ ID NO: 19345 - DNA, 574 bp, Homo sapiens
  SIMILAR (521)..(204): 761254mologous to Homo sapiens MLEL1 protein,accession number AF217190,Smith-Waterman Score=388.
  misc_feature (1)...(574): n = a,t,c or g
gatccncagttctccnggtgggtgataagccagttgtagtgaaagtctgtttgctccacattaacagatttaggatgaacagcaaccaggccatcggtttttgtgtaaacttttaccatttttcttttttttacccaaatttagtcgaattttagcaactttgggatataaaccagcacagatgacagctttaattatcttctcattatctgcagtgtgtttgaagacagaaaatattcccagcaatagtccttttcgtatctgaaaccacgtcgcctagcctcttcccagccctcaaacgcattcacaactgttaagtgatcacttctagtatcctttgccaattcctttcttcttgcatctgcaatcttttcttttcccagtggaatgacaaatgggatctttgaaactgagactagcagcaatagtgagtactgggtctaagcaagcagaacaagtgcttcaaaaagaatcattttttcaatatgtggntcaacngggtaatcgtgcccaagtggacttcaagangtgtcaattcttcttggttatccaaaggcgtcagcttcatcaggtg

SEQ ID NO: 19346 - DNA, 1479 bp, Homo sapiens
  SIMILAR (1)..(690): 831254mologous to Homo sapiens MLEL1 protein,accession number AF217190,Smith-Waterman Score=986.
atggatgaacgacgagaagaacaaattgtacagttactgaattctgttcaagcgaagaatgataaagagtcagaagcacagatatcctggtttgctcctgaggatcatggatacggtactgaagtttctactaagaacacaccatgctcagagaacaaacttgacatccaggaaaagaagttgataaatcaagaaaaaaaaatgtttagaatcaggaacagatcatatattgaccgagattctgagtatctcttgcaagaaaatgaaccagatggaactttagaccaaaaattattggaagatttacaaaagaaaaaaaatgaccttcggtatattgaaatgcaggaattggtaaatttaattgataaccatcaggtaacagtaataagtggtgaaactggttgtggcaaaaccactcaagttactcagttcattttggataactacattgaaagaggaaaaggatctgcttgcagaatagtttgtactcagccaagaagaattagtgccatttcagttgcggaaagagtagctgcagaaagggcagaatcttgtggcagtggtaatagtactggatatcaaattcgtctccagaggtatttgtccagtgttagtcatatcgtacttgatgaaatccatgaaagaaatctgcagtcagatgttttaatgactgttgttaaagaccttctcaattttcgatctgacttgaaagtaatattgatgagtgcaacattgaatgcagaaaagttttcagaatattttggtaactgtccaatgatacatatacctggttttacctttccggttgtggaatatcttttggaagatgtaattgaaaaaataaggtatgttccagaacaaaaagaacacagatgccagtttaagaggggtttcatgcaagggcatgtaaatagacaagaaaaagaagaaaaagaagcaatatataaagaacgttggccagattatgtaagggaactgcgaagaaggtattctgcaagtactgtagatgttatagaaatgatggaggatgataaagttgatctgaatttgattgttgccctcatccgatacattgttttggaagaagaggtgtttaaaagaacccctcctggtgttcggaaaatagtaattgctaccaacattgcggagactagcattaccatagatgatgtcgtttatgtgatagatggaggaaaaataaaagagacgcattttgatactcagaacaatatcagtacaatgtccgctgagtgggttagtaaagctaatgccaaacagagaaaaggtcgagctggaaggggctgcctcaatgcatatccatctggaggaggctactcagctttaattaaagaaacagtggttgagagggtccgcctacaaccactgaaagtaataaatgtacatggtgtaaaattcaaatactgccaaaaagtatgcactgagaaacaagtccccctgtatgactggtttggggcgtag

SEQ ID NO: 19347 - DNA, 325 bp, Homo sapiens
  SIMILAR (2)..(262): 631254mologous to Homo sapiens MLEL1 protein,accession number AF217190,Smith-Waterman Score=253.
cattaccatagatgatgtcgtttatgtgatagatggaggaaaaataaaagagacgcattttgatactcagaacaatatcagtacaatgtccgctgagtgggttagtaaagctaatgccaaacagagaaaaggtcgagctggaaggggctgcctcaatgcatatccatctggaggaggctactcagctttaattaaagaaacagtggttgagagggtccgcctacaaccactgaaagtaataaatgtacatggtgtaaaattcaaatactgccaaaaagtatgcactgagaaacaagtccccctgtatgactggtttggggcgtag

SEQ ID NO: 19348 - DNA, 2232 bp, Homo sapiens; identical to SEQ ID NO: 4932
  SIMILAR (1)..(639): 991254mologous to Cloning vector pZC320 SopA,accession number U26464,Smith-Waterman Score=1117.
  misc_feature (1)...(2232): n = a,t,c or g

SEQ ID NO: 19349 - DNA, 3689 bp, Homo sapiens
  SIMILAR (748)..(2415): 721254mologous to Homo sapiens MLEL1 protein,accession number AF217190,Smith-Waterman Score=1815.
tcggactgatgaccgtagtacagagcggtggaattccagcggttgctggttctgacgggttgtagtctgccaggacaattagttatgactactatcagaactggggccgtgatgggggtccccgcagctccggtgggggctatggaggggggccagcagggggtcatggaggtaaccgaggctccggaagaggcggcggcggcggagggggtggtcgaggcggcaggggccggcatcccgggcacctgaaaggccgcgaaatcggcatgtggtacgcgaaaaaacaggggcagaagaacaaggaagctggagaggcaagagagagctgtagtacacatggatgaacgacgagaagaacaaattgtacaggtactggattctggtcaagccgaaaatggataaagagtcagaaccacagatttcctggtttgctcctgaggatcatggatatggtactgaagtttctactaagaacacaccatgctcagagaacaaacttgacatccaggaaaagaagttgataaatcaagaaaaaaaaatgtttagaatcaggaacagatcatatattgacccgagattctgagtatctcttgcaagaaaatgaaccagatggaactttagaccaaaaattattggaagatttacaaaagaaaaaaaatgaccttcggtatattgaaatgcaggaattggtaaatttaattgataaccatcaggtaacagtaataagtggtgaaactggttgtggcaaaaccactcgaagttactcagttcattttggataactacattgaaagaggaaaaggatctgcttgcagaatagtttgtactcagccaagaagaattagtgcccattccagttgcggaaagagtagctgcagaaagggccagaatcttgtggccagtggtaatagtactggatatccaaattcgtctcccagagtcggttgcccaaggaaacagggttctatcttatactgtaccaaccaggaatcatccttccagtggctcccagtcagacccgtatttgtccagtgttagtcatatcgtacttgatgaaatccatgaaagaaatctgcagtcagatgttttaaatgactgttggttaaagaccttctcaattttcgatctgacttgaaagtaatattgatgagtgcaacattgaatgcagaaaagttttcagaatattttggtaactgtccaatgatacatatacctggttttacctttccggttgtggaatatcttttggaagatgtaattgaaaaaataaggtatgttccagaacaaaaagaacacagatcccagtttaagaggggtttcatgcaagggcatgtaaatagacaagaaaaagaagaaaaagaagcaatatataaagaacgttggccagattatgtaagggaactgcgaagaaggtattctgcaagtactgtagatgttatagaaatgatggaggatgataaagttgatctgaatttgattgttgccctcatccgatacattgttttggaagaagaggatggtgcgatactggtctttctgccaggctgggacaatatcagcactttacatgatctcttgatgtcacaagtaatgtttaaatcagataaatttttaattatacctttacattcactgatgcctacagttaaccagacacaggtgtttaaaagaacccctcctggtgttcggaaaatagtaattgctaccaacattgcggagactagcattaccatagatgatgtcgtttatgtgatagatggaggaaaaataaaagagacgcattttgatactcagaacaatatcagtacaatgtccgctgagtgggttagtaaagctaatgccaaacagagaaaaggtcgagctgggaagagttcaacctgggtcattgctattcatctgtattaatgggtcttaggaggcaagtcttctaggatggactattcaactgccagaaatttttgaggaactccttttgggaaggaactttgtttacaaaataaagatttttaaggctaggtgaaattgcttattttctgagtagataaatggacccaccatcaaatgagccagtgttactctccataagacacttgatggagcttgaacgctttggataaacaagaagaattgacacctcttgggagtccacttggcacgattacccgttgagccacatattggaaaaatgattcttttttggagcactgttctgctgcttagacccagtactcactattgctgctagtctcaagtttcaaagatccatttgtcattccactgggaaaagaaaagattgcagatgcaagaagaaaggaattggcaaaggatactagaagtgatcacttaacagttgtgaatgcgtttgagggctgggaagaggctaggcgacgtggtttcagatacgaaaaggactatttgctgggaatattttctgtcttcaaacacactgcagatgctgcataacatgaaaggacagtttgctgagcatcttcttggagctggatttgtaagcagtagaaatcctaaagatccagaatctaatataaattcagataatgagaagataattaaagctgtcatctgtgctggtttatatcccaaagttgctaaaattcgactaaatttgggtaaaaaaagaaaaatggtaaaagtttacacaaaaaccgatggcctggttgctgttcatcctaaatctgttaatgtggagcaaacagactttcactacaactggcttatctatcacctaaagatgaggaacaagcagtatatacttgtatggactgcacagaggtttccccattactgtctcttgttttttgggagggtggacatttccatccagaagggataacgatcaggaaactattgctgtagatgagtggattgtatttcagtctccagcaagaattgccccatccttggttaaggaattaagaaagggactaggatattccttcctgccaagagaagattgaaagtcctcatcctgttaggactgggaattgacactaaatccagagactgtgccagtacttgtcagctatttataggactttgatccaaaacaccaggggaaagggcaacttcccaggggacttttcccgccacggtttccaggatggatattacagctgacagcttttcaggggtggtctgaaaagccagtttgacagccattcttcatcattgtttaaattttggctggatgcccaaacccctgggaccatgaacaattttcatgtgtaaggtagaagccttccagtaggtagtaaagacttaatggggcatgacttgatgttatatggtcggagatatatatatatatatatatatatataccataaaagcaatatggtcctctgatcatatactcctgctggtgggccatgccccactcctttggggagtatattcccctttatatatattgaagtattgtacccacttgagaaattcctttgttctgtggtacaaaattaatctttctgctcataatgattgatgataccaccagtaaaaataggatgtttaccccaaaacaagtgtcaattaagaatttgaacacaaccacattttttaaaatgaaacttcttatcgggaagtaaattaatttgttgtaataaagtccagtatttaataaaatgtacaatgttaaatctcaaaaaaaaaaaaaaaaaaaaattgcgggg

SEQ ID NO: 19350 - DNA, 2657 bp, Homo sapiens
  SIMILAR (681)..(1463): 871254mologous to Homo sapiens dJ686N3.1 (novel ATP dependent RNA helicase (contains Helicases conserved C-terminal domains and DEAD/DEAH boxes)),accession number AL049766,Smith-Waterman Score= 1130.
  misc_feature (1)...(2657): n = a,t,c or g
tttcgtaagacgacgaggaggctgcgaaaagttaagggccggaccgcaggctgtgctcgcttccggaagtggcttctgcgacaacatggcttgcggactctcggcttaatctgtaaccatacgtctaggatgacgaggtgccggtggagcgccgagtcggactccggggacgaggaagaggaggggcccattgtgctgggcagacgacaaaaagctttggggaagaaccgcagtgctgatttcaaccctgatttcgttttcactgagaaggaggggacgtacgatggcagctgggccctggctgatgtcatgagcccactcatgaagaagagggcagccactacattacatgagaagattgagaaagctcgaaagagaaggaaaactgaggataaagaagccaagtctgggaagctggaaaaggagaaagaagcaaaggagggctctgaaccaaaggagcaggaagaccttcaagagaatgatgaggaaggctcagaagatgaagcctcggagactgactactcatcagctgatgagaacatcctcaccaaagcagatacactcaaagtaaaggatcggagagaagaagaagaagaaaggacaggaagcaggaggattttttgaagatgcatctcagtacgatgaaaacctcttcgttccaggacatgaacctttcccgccctcttctgaaggccattacagccatgggcttcaagcagcccaccccgatccagaaggcgtgcatacctgtgggtctattggggaaggacatctgtgccctgtgcagcccctggcacaggtaaaactccgccctttgccctgcctgttttggagcgtctgatttatataccctcgccaggctccagtcttctcgcgtgctggtgctagtgcccacccgagagctgggcatgcaggtgcactctgtcaccagacagctggcccagttctgcaacatcaccacctgcctggctgtgggcggcttggatgtgaagtctcaggaagcagctcttcgggcagcgcctgacatcctcatcgccaccccaggccggctcatcgatcacctccacaactgcccttccttccacctgagcagcatcgaggtgctcatcctggacgaggctgacaggatgctggatgagtactttgaggagcagatgaaggagatcatccgaatgtgttcccaccaccgccagaccatgctcttctcggccaccatgacagacgaggtgaaagatctggcttctgtctccttgaagaatcctgtccggatatttgtgaacagcaacacagatgtggctccctttctgcggcaggaagttatccggaaccggcctaatcgtgaaggagaccgggaagccatcgtggcagctttgttgacgaggaccttcactgaccatgtgatgctgttcacgcaaaccaagaagcaggcccaccgcatgcacatcctcctggggctcattgggcgtgcaggtgggtgagctccatggcaacttgtcacagacgcagcggctggaggccctccggcgttttaaggatgaacagattgacatcctcgtggccactgatgtggcagcccgtggacttgacattgagggggtcaaaacggtaatcaacttcacaatgcctaataccatcaaacattatgtccaccgggtggggcgaacagcacgtgctggcagggctgggcgctcagtctctctggtgggagaagatgagcggaagatgctgaaggagattgtaaaagctgccaaggcccctgtgaaggccaggatacttccccaagatgtcatcctcaaattccgggacaagattgagaaaatggagtaaagatgtgtatgcagttctgcagctagaggcggaggaaaaagagatgcagcagtcagaagcccagatcaatacagcaaagcggctcctggagaaggggaaggaggcagtggtccaagagcccgagaggagctggttccagaccaaagaagagaggaagaaggagaaaattgccaaagctctgcaggaatttgacttggccttaagaggaaagaagaaaaggaagaagtttatgaaggatgccaaaaaaaagggggagatgacagcagaggaaaggttctcagtttgaaatcctcaaggcgcagatgtttggttgancggctagcgaagaggaatcgcagagccaagcgggcccgagcaatgcccgaggaggagccagtgagaggtcctgccaagaagcaaaagcaggggaagaaatctgtatttgatgaagaactcacccaacacaagcaagaaggccctgaaacagtatcgagctggcccttcctttgaagaaaggaaacagttgggcttgccccaccagagacgaggaggaaactttaaatctaaatccagatacaagaggaggaagtagctgtcgtggcctgaagaaattcatgggggcagcccttaaatcccttcccctgtgggaagtcatcctggctggtctgtcttttctccatttgtttaaaaaaaaaaacaaaaacaaaaaacaacactttggtgtggtggtatggtacgtagctattttcctaagcatgtctgtcaatctcccttcttgctgattagctttcatatgactatattaaatggaagtatttttgggaaaagagaaaccaaaaaaaaaaaaaaaa

SEQ ID NO: 19351 - DNA, 582 bp, Homo sapiens
  SIMILAR (378)..(166): 781254mologous to Homo sapiens FKSG58,accession number AF336885,Smith-Waterman Score=270.
  misc_feature (1)...(582): n = a,t,c or g
aagtgaggagtgcctctgcccggcccgccccatctgggaagtgtacccaaagctccgaagagacagtgaccatcgagaacaggccatgatgacgatggcggttttgttgaaaagaaaagggggaaatgtggggaaaagaaagacagatcagatggttactgtgtctgtgtagaaagaaggagacataggagacaccattttgttctgtactaagaaaaattcttctgccttgggatgctgttaatctataaccttacccccaaccccgtgctctctgaaacatgtgctgtgtcaactcagggttaaatggattaagggtggtgcaagatgtgctttgttaaacagatgcttgaaggcagcatgctcattaagagtcatctccactccctaatctcacgtacccagggacacaaatactgcggaaggccgcaggaacctctgcctaggaaaaccagagacctttgttcacgtgtttatctgctgaccttctctccactattatcctatgaccctgccacatccccctctttgagaaacacccaagaatgatcaataaatcctnnnnnnnnnnnnnnnnnnnnn

SEQ ID NO: 19352 - DNA, 452 bp, Homo sapiens
  SIMILAR (48)..(257): 1001254mologous to Homo sapiens RNPL,accession number U28686,Smith-Waterman Score=359.
tgttcgtccgggttttttacgttttaatttccaggacttgaactgccatgtcctctgaagaaggaaagctcttcgtgggagggctcaactttaacaccgacgagcaggcactggaagaccacttcagcagtttcggacctatctctgaggtggtcgttgtcaaggaccgggagactcagcggtccaggggttttggtttcatcaccttcaccaacccagagcatgcttcagttgccatgagagccatgaacggagaggtggggcctcctatctgcagagggaccttgtccccatctgcggcttccttcattctttttgtttttccctctgtgtctgctcggggcagcgtggctcaccaagccccgcagtgcccactcacaggagcatgactgccttttgttctatggggtggagggcagcggcagacagagcctggccgcctgggaggcgag

SEQ ID NO: 19353 - DNA, 1704 bp, Homo sapiens
  SIMILAR (1171)..(911): 981254mologous to Homo sapiens envelope protein,accession number AF164615,Smith-Waterman Score=437.
tgagttcccttagtatttattgatcatctgtgggtgtttctcaaagagggggatgtgtcagggtcacaagacaattgtggggagagggtcagcagacaaacacgtgaacaaaggtcttggcatcatagacaatgtaaaggattaagtgctgtgcttttggatatgcatacacataaacatctcaatgctttacaaagcagtattgctgcccgcaggtcccacctccagccctaaggcggtttttccctatctcagtagatggagcatacaatcgggttttataccgagacattccattgcccagggacaggcaggagacagatgccttcctcttgtctcaactgcaagaggcattccttcctcttttactaatcctcctcagcacagaccctttacgggtgtcgggctgggggacggtcaggtctttcccttcccacgaggccatatttcagactttcacatggggagaaacgttggacaatacctggctttcctaggcagaggtccctgcggccttccgcagtttttgtgtccctgggtacttgagattagggagtggtgatgactcttaaggagcatgctgccttcaagcatctgtttaacaaagcacatcctgcaccgcccttaatccattcaactctgagtggacacagcacatgtttcagagagcacggggttgggggtaaggtcatagattaacagcatccccaaggcagaagaatttttcttaagtacagaacaaaatgggagtctcctatgtctacttctttctacacagacacagtaacaatctgatctctctttcttttccccacatttcccccttttctatttgacaaaaccgccatcgtcatcatggcccgttctcgatggtcgctgtctcttcacagctgttggatacacctgcagacaccattgatacaatcatcaaggctgcaagcagcatactctctggggtttgtttcacctttgtgttctctagatattttgtagctaactgcgtcagcttctttagttgtgcccaagttggcggctctgccttcttggtggatggcaacttcatctgttcttctgacgtcaccattttgttcatcttgtgagtcaacggtgctcgattgcgatgtctccgtctccgcggaggtgcttttctttgcatctctgatgggttcattgtagaacttcaaatgtcgtaaggctgactgtagatgtactcgggatctctcgtcgacttgtcctcaatgaccacgctcgagcgtaccttcaccctagagaaaagcctccacgttgggcaccagatgtaggggtgggttgcccctacacacctgtgggtgtttctcgtaaggtgggacgagagatttggaaaagaaaaagacacagagacaaagtatagagaaagaaagaaggggacccggggaaccagcgttcagcatatggaggatcccgccagcctctgagttcccttagtatttattgatcatctgtgggtgtttctcaaagagggggatgtgtcagggtcacaagacaattgtggggagagggtcagcagacaaacacgtgaacaaaggtcttggcatcatagacaatgtaaaggattaagtgctgtgcttttggatatgcatacacataaacatctcaatgctttacaaagcagtattgctgcccgcaggtcccacctccagccctaaggcggtttttccctatctc

SEQ ID NO: 19354 - DNA, 1963 bp, Homo sapiens
  SIMILAR (277)..(726): 641254mologous to Mus musculus rbm3,accession number AB016424,Smith-Waterman Score=417.
ccaaattattgtatctcacagtgtggggaaaaggaagagagatcagattgttactgtgtctgtgtagaaagaagtagacataggagactccattttgttatgtactaagaaaaattcttctgccttgagattctgttaatctataaccttaccccccaaccccgtgctctctgaaacatgtgctgtgtcctctcagaattgcctgttttttgtgctcctccgagctcgctgttcgtccgggttttttacgttttaatttccaggacttgaactgccatgtcctctgaagaaggaaagctcttcgtgggagggctcaactttaacaccgacgagcaggcactggaagaccacttcagcagtttcggacctatctctgaggtggtcgttgtcaaggaccgggagactcagcggtccaggggttttggtttcatcaccttcaccaacccagaagcatgcttcaagttgccaatgaagaagccaatgaaccggagaagtctcctggaatggtccgtcagatcccgttgttggatcatgcaggcaagtcttgctccggggaaccaagaggaaggtgggctttggggcccatgggcgttgggtcgcagctaattttagaggttgttggggaccagggctaatgggagtggcaggtattatgacagtcgacctggagggtatggatatggatatggacgttccagagactataatggcagaaaccagggttggttatgaccgctactcaggaggaaattacagagacaattatgacaactgaaatgagacatgcacataatatagatacacaaggaataatttctgatccaggatcgtccttccaaatggctgtatttataaaggtttttggagctgcactgaagcatcttattttatagtatatcaaccttttgtttttaaatatgacctgccaaggtagctgaagaccttttagacagttcccatctttttttttaaattttttctgcctatttaaagacaaattatgggacgtttgtagaacctgagtatttttctttttaccagttttttagtttgagctcttaggtttattgggagctagcaataattggttctgggcaagtttgggccagactggactttcaaaaaattaaatgtgttatccaggggaccattttaaaaaacctgttacacagtgtttaatggtgggttagggaagcaaatttcccccaatgtacctattaagaaaatgtgccatcaagcccagccctgacccaacatgggtgaaaaccccccatctgtacctaaaccataaaaaaaattacccccggcatgggtggtgtaccgccctgtaatcccccagtgaccttgggaggctgaggcaggagaatcgcttgaaccccgggaggcggatggttgcagtgagctagattcgcgccccctgtactcccagccctgggcaacagcgagagctcccatctcaaaaaaaaagggaaatgtgtatcaagaacatgattatccaggggtattttcctaattcagatcgatcaaactgattatatagaagagttggctttaaaatgtttgcaaatgtctttttttttttttaatactgggaagaaaaaatattctgttgtgtctcatacagtgcttaggggtgtctttcacagagcttattaaaaagatgaaacctgagaacaaactgctttattcttaactcagcccattttgcaaattaaaagtggggggcagaggtgggcggatcacctgaggtcaggagttcgagaccagcctggccaacagggcaaaaccccatctctactaaaaatgcaaaagttggcggggcgtggtggcgggtgcatgtagtcccagctgctcgggaggctgaggcaggagagttgcttgagcccgggaggcggaggttgcagtgagctgagattgtgccactgcactccagcctgggtgacagcaagactctgtctcaaaa

SEQ ID NO: 19355 - DNA, 414 bp, Homo sapiens
  SIMILAR (199)..(414): 1001254mologous to Homo sapiens RAB4, member RAS oncogene family,accession number BC002438,Smith-Waterman Score=363.
cggacgcgtgggcccaccgagacgcgccggcggaccgcgggcgagtgcagccggtgacccggcgagaggcggcgccgctcccaagatgtcgcagacggccatgtccgaaacctacgattttttgtttaagttcttggttattggaaatgcaggaactggcaaatcttgcttacttcatcagtttattgaaaaaaaatgtccgtgacgagaagttattaccgaggcgcggccggggctctcctcgtctatgatatcaccagccgagaaacctacaatgcgcttactaattggttaacagatgcccgaatgctagcgagccagaacattgtgatcatcctttgtggaaacaagaaggacctggatgcagatcgtgaagttaccttcttagaagcctccagatttgctcaagaaaat

SEQ ID NO: 19356 - DNA, 662 bp, Homo sapiens
  SIMILAR (9)..(443): 911254mologous to Homo sapiens RAB4, member RAS oncogene family,accession number BC002438,Smith-Waterman Score=678.
atatgggatcagcaggaccagaccgattcaggtccgtgacgagaagttatcactgagggcggccgggggctctcctcgtctatgatatcacagcccgagaaacctacaatgcgcttactaattggttaacagatgcccgaatgctagcgagccagaacattgtgatcatcctttgtggaaacaagaaggacctggatgcagatcgtgaagttaccttcttagaagcctccagatttgctcaagaaaatgagctgatgtttttggaaacaagtgcgctcacaggggagaatgtagaagaggcttttgtacagtgtgcaagaaaaatacttaacaaaatcgaatcagaaagaatgggctcaggtattcagtacggagatgctgccttgagacagctgaggtcaccgcggcgcgcacaggccccgaacgctcaggagtgtggttgttaggagagcacacaggtgttcatacagtggcatttgggacccaatcgttggaacctgaagaatctgaagttttttttacccccatctttttttactctgtatggaagtagatctttatggggaaaagagaatttggggtgttttgcaagccagtcaaagtggcccagcaaatcatataaatcgaattaaatggacaaccccgttaaaaaaaaaaaaaaa

SEQ ID NO: 19357 - DNA, 669 bp, Homo sapiens
  SIMILAR (1)..(669): 1001254mologous to Homo sapiens p25 protein,accession number X16660,Smith-Waterman Score=1225.
atgcgctgtgcacacgcccccgccccgcgcacccgctaccccacccgagcccccagcggcccgcgtcccccatcccggtcccaagcccagacacctccgagatccgtcccgcggctccggccgcgccaccgccaccctcaagacccccgcagcccaggcccggccccgcgccaccgacgccccccgcggcccgacccgcgcgccccgccagcccgggcctcgtaccgtaggtttcggacatggccgtctgcgacatcttgggagcggcgccgcctctcgccgggtcaccgtgcactcgcccgcggtccgccggcgcgtctcggtggggaaggacctggggcgggggaccggaggagggaggggcccgaccggtccccacggcaaccgccggtcctcccagcggctgcggcccagccggactccagctccgcgcaggcgccagggccctccaccctccgtccggccgcgaccgcgaggaggaagaggagatgggctacgcgaggcccggcccaccccgcgttcgcgcgtgcgcacggggaggccggggcggggcgcgtgaggacttcggcgcgcgccggaagcacgtgcgcgggctgggcgctctggcggtgtgcgctgaggtgggcagagcggcaggtgggggcgttgggggctgagtcccgatttccc

SEQ ID NO: 19358 - DNA, 486 bp, Homo sapiens
  SIMILAR (322)..(477): 981254mologous to Homo sapiens RAB4, member RAS oncogene family,accession number BC002438,Smith-Waterman Score=261.
atggggtcaggcctgaaaagagggaaattaagtgaaaatgaaagcctctggcccccaacccacctcccctacctcttccctggtcgctggcagccagagagggtggggaccttgacaggcttttggggagtagcagagatggacactaggttggcggtgaagaagaggaagctgcagggcagggatgcaggtgggtgtagggccgtggtgactatggattcctgtggtgactatggattccaccgcgccgagaggtggcgagaactggaagagatggagaaaattgtgccagggagtggggtagatgaggagctcgcagagaaccgagaaacctacaatgcgcttactaattggttaacagatgcccgaatgctagcgagccagaacattgtgatcatcctttgtggaaacaagaaggacctggatgcagatcgtgaagttaccttcttagaagcctccagatttgctcaagaaaatggcaagtga

SEQ ID NO: 19359 - DNA, 609 bp, Homo sapiens
  SIMILAR (282)..(142): 401254mologous to Homo sapiens HTRM clone 3279329 protein sequence,accession number Y73386,Smith-Waterman Score=72.
atggcagcagctgacccgctcaaaggaactgcacaggcagctggtccttcagagacaaacagcaccaaaaggaaacctgcaacatcaggaatgaagaaaagcaaccaaaatggcaactatctgggcatcaggcacaccaaagcagccctgtcccagggagctcttagcccaggagagaagacaaacaaggacaaggtacaatcaatgagatcaatagcaagaaaggaggtccagacagagaatcatgggagttgggtgtctgcatatgctgaggtcagagaaagcgccgcagcagagaagttttgcacactgcaccccaaagagcagcaggccttccgctcgactgacttagagggctggctgaggagcattccagaaaaagcacagtacaatgtgttttctagcagggagaccagcaaactggaagtggatgagcggccccagcttacatggtctattgtatttgatcaactgctgagagaagtattagtagcccagagaggagtggacactctgcttgctcacctcctacttcttcctaacggacggccagccatcttctaccttcataattctgctgaaattgttcttgatcaaaatgatcactga

SEQ ID NO: 19360 - DNA, 2512 bp, Homo sapiens
  SIMILAR (118)..(732): 671254mologous to Mus musculus rab 4,accession number D86563,Smith-Waterman Score=626.
ggaattctcccaccgagacgcgccggcggaccgcgggcgagtgcagccggtgacccggcgagaggcggcgccccctcccaagatgtcgcagacggccaatgtccgaaacctacgattttttgtttaaagttcttgggtattggaaatgcaggaactggcaaatcttgcttacttcatcagtttattgaaaaaaaaattcaaagatgactcaaatcatacaatagcgagtggaatttggttccaaagataataaatgttggtggtaactatgtaaagttacaactatgggatacagcagggacagaccgattcagctccgtgacgagaagttactaccgaggcgcggccggggctctcctcgtctatgatatcaccagccgagaaccctacaatgcgcttactaattggttaacagatgcccgaatgctagcgagccagaacattgtgatcatcctttgtggaaacaagaaggacctggatgcagatcgtgaagttaaccttcttagaaagccctccagatttgctcaagaaaatgagctgatgtttttggaaacaagtgcgctcacagggggagaatgtagaagaggcttttgtaccagtgtgcaagaaaaatacttaacaaaatcgaatcaggtgagctggacccagaaagaaatgggctcaggtattcagtactggagatggctgccctgaggacagcgtgaggtttcaacccgccgcgcacaggccccgaaacgctcgggagtggtggttgttaggagaggcacacaggtgttcatacagtggcatttgggacacaattcgttgggaacctgaaggatcttgaagtttttttttaccaccatctttttctactctgtaaggaagtagatctttatggggaaaagagaatttggggtgttctgcaagccagtcaaagtggcacagcaaatcatataaatccgaattaaatggacaacaccgttagatgtgtatgtaaaaattttctgtttcatatttttcctttcacctttcggtttaaaacatgctatatgtactgtatgtcctgtagcccagtgcggctccacagcatggaatctgatgtatgatatgatagaatgtggccactaaatgcagtttcagattttatttttttttaatcatatgaacttaaaattgtcaattgtgaggtgtgcttttcttcatcatgttggttatattgcacaattggttatatttatgacctgatattcaaagactctggcattggatagccagtgtgttttcttatttaactccgtttactacattctacatggtgtttacgtgattccacacttgaaaatactaggatcagtagacattcactaatataccaaaataaaatgaaaaattgcgtttttccgtgaactttatactgtccaggctctgttgattctaaagcctcttcatccaggtcagttcaggaagtatatctggagtacctgctctgtttttggcttgtgagactagcactaaggattctggtacctttacccaaacctactgggctactaatacttctctcagcagttgatcaaatacaatagaccatgtaagctggggccgctcatccacttccagtttgctggtctccctgctagaaaacacattgtactgtggctttttctgggaattcagtataatgggcatcactggcctgtttttcacatctttttgttttcctgtttcattttaaggaaacctactaaatcccagttaatattaaatgggacacccactcattaagaaatttctttatggcttctgctgaatacttaaatgccttactacagttatccagtttgacatggtttttaattcatataaggtatattgggtatattgaagtatatattgtattacaaagacttgttcttgtattttaaaatgtcagtgcaaaaaatatatggtggaacctttctttaaagttgaaatgcagtattatttaaatctgaaaggttaaaaagctttcttcaccttatatatgttcttccactgtgacttttttagtttgaagactagtaaattaacttttagttagaagatgcctactgcttttgttgtttattttaatcagcagagcacagagacacataaaaactctgggaaatgactaggataaaaatatcagtatgtatctgttttagatattttggagttttgccttttttatgccctgaatattttatttccaaaaagtatcctgaagcaaattctcagactgaactactttttagacctcactgtaagaatattttattcaatgtcctcatttatgatagatttgcaagctgcctcatttttgaacagctttttgcatgggataggagcatgtctattctaacacatcagcttattcaaaagcaagaattttaaaaataagataaatgtaaagttgttttataaacgatcctgttaattaaaccacagacaccatatatccttctgcatcctttggccaataaaagttgctggagaaccaaaaaaaaaa

SEQ ID NO: 19361 - DNA, 907 bp, Homo sapiens
  SIMILAR (422)..(766): 341254mologous to Homo sapiens similar to salivary proline- rich protein P-B,accession number D89501,Smith-Waterman Score=108.
  misc_feature (1)...(907): n = a,t,c or g
atggataataaattagatgaacgggtcactcaagggtcctttggtgatgggcgagacagagaaaggggcaggaagcgtaagaaggttggaactttctaccagagacagggcaggctacaccgaggaggtgatattgaagcagagacccagaggagagcacacggccgcggagatgacgtcacgcaagcaacggcgctngacgtcacatatcaccgtggtgatgggcgtcacgtggccatgtagacgtcacgaagagatatagcgatggcgttcgtgcagattgcaggcacgttcgcacacagacatggggaacttggcatgacgtcacaccgagatgcagcaacgacgtcacgggccatgtcgacgtcacacatattaatgtcacacagacgcggcgatggcatcacacagacggtgatgatgtcacacacagacacagtgacaacacacaccatgacaaccgacacctatagatatggcaccaacatcacatgcacgcatgccctttcacacacactttcttacccaaattctcaccttagtgtcacgttcccccgaccctgggcacacgggggcaaggtacccaccaggatccccatccctcccgcacagccctggggccccagcaccttgccctcctccagcttcctggggcctcccaggccatttccttcacccccagtgcctggacccggaggtgagaacaggaagccattcacctcacctccttgagcgtgagtgtttcccaggacccccctcggggccctgagccgggggtgagggtcacctgttgtcgggaggggagccactccttctcccccaactcccagccctgcctgtggcccgttgaaatgttggtggcacttaataaaaaattagtaaatccttaaaaaaaaaaaaaaaaaaa

SEQ ID NO: 19362 - DNA, 760 bp, Homo sapiens
  SIMILAR (168)..(518): 411254mologous to Mus musculus acidic ribosomal phosphoprotein P1,accession number U29402,Smith-Waterman Score=151.
  misc_feature (1)...(760): n = a,t,c or g
tccggatcgacccacgcgtccgccaaggtgctcggtccttccgaaggaagctaaaggctgccgttggggttgagggcccctcactttcatccggcgaactaggcacccgcgtcccggcagcgccagccctacaactcgccccgcgcaatggccttctgtctccgtagctcgccctgcatcctactcggcccctcattcctgccaccgacgatgaggtgaacagtcacggaggataagatcaatgcccctcattaaaagcagcccgttgtaaatgttgagcctttttgcccctggcttgtttgcaaaggcccctggccaacgtcaacattgggagcctcatctgcaatgtaggggccggtggaccctgctgccagccagctggtggctgcacccagccaggagggtcctgccccctccactgctggttgcttccagcttgagggagaagaaagtgggaagcaaagaaagaaggattccgagggagttttgattgattgacatggggctttgggtctttttgactaaaacctcttttataaacatgtttcaataaaaaagctggaactttactgctgttggtcttgtccatagttttggaatgtgctctgcaaaaatggtctggtttgtaatgttggctttcagcctattctgccatgacacaggctggattttccctgccaccattgccggatgtgagatttagacaatcctgatgctaacaagaangcaccttatggtacagtgntgaaaactgcacctg

SEQ ID NO: 19363 - DNA, 415 bp, Homo sapiens; identical to SEQ ID NO: 11674
  SIMILAR (16)..(276): 961254mologous to Homo sapiens aldose reductase (EC 1.1.1.21),accession number M34720,Smith-Waterman Score=441.

SEQ ID NO: 19364 - DNA, 1612 bp, Homo sapiens
  SIMILAR (604)..(1176): 531254mologous to Homo sapiens aldose reductase (EC 1.1.1.21),accession number M34720,Smith-Waterman Score=369.
  misc_feature (1)...(1612): n = a,t,c or g
atggcaagccgtctcctgctcaacaacggcgccaagatgcccatcctggggttgggtacctggaagggcagcatcctgcgagtggggtttgggagcagctcacgggagcccccgccctaccgcgggcaacccttgatgggcggcccaccagtccgcattttgggtcctagcgggcgccccaagcggcacaacgcgagagggaggcggggaaagtgggcttcacagaccggtggacctcgggcgcagacagggacgtggagccgtcggcaagggcaggtgactgaggcccgtgaaggtggccattgacgtcgggtaccgccacatcgactgtgcccatgtgtaccagaatgagaatgaggtgggggtggccattcaggagaagctcagggagcaggtggtgaagcgtgaggaagctcttcatcgtcagcaagctgtggtgcacgtaccatgaagaaaggggcctggttgaaaggaagcctgccaagaagacacttcaagcgacctgaagcttggacttacctggacctctaaccttaattcactggccgactggctttaagcctgggaaggaatttttcccattggatgagtcgggcaatgtgggtcccagtgacacccacatttctgacacgtgggcgggccatggagaagctggtggatgaagggctggtgaaagctattggcatctccaacttcaaccatctccaggtggagatgatcttaaacaaaccctggcttgaagtataaaccctgcagtaaaccagattggagtgccacccatatctcactcaggagaagttaatccagtactgccagtccaaaggcatcgtggtgaccgcctacagccccctcgggctctcctgaacagggccctggcccaagccccgaggacccttcttctcctggaggatcccaggattcaaggcggttcgcagcccaagcacaataaaaactacagccccaggtcctgatccggggttccccatgcaagaggaacttggtggtgatcccccaagtctgtgacaccagaacgcatttgctgagaactttaaaggtctttgaactttgaactgagccagccagggatatgacccaccttaactcagcctaccaaccagaaactggaggggtctggtgcccttgttggagctgtaccttcccaccaaggattaccccctccccatgaaagaagttttgaaagctngtggttgccctgctcgtcccccaagtgaccctataccctgtgtttccttgccctcattttttttccttgcaaaatggtagtatggcctgctgtcactcagcagtgggacagcaaccctgtagattgcccagcgaaggcgtgttctagcttgatggttggatctcaagggccctgtcagtagagttgaaggtctcttccaattttctttgcccttctttcttaccctgctgggagaaagtacaacccgaactacacctcctccgaaacaaagagaaagcaaaatctaccaggctcacaacagtgccacctaccgttggggtttgaacggctgggaactggaatcctttcagcaagacttctctttgcctcccaaccaaaagtgcttttgtgaaaaaaaaaaaaaaaaaa

SEQ ID NO: 19365 - DNA, 489 bp, Homo sapiens
  SIMILAR (327)..(371): 801254mologous to Homo sapiens Human secreted protein, SEQ ID NO: 6475,accession number G02394,Smith-Waterman Score=64.
  misc_feature (1)...(489): n = a,t,c or g
atcactgaaggccattttccacaggatttactggctcttttaatgggttcatccaccagggctgaatgccgatgtcggagactcgccactgacttccaaccctccggatccggcagggtgtccactgtgcttctgatccagtgaggcgcccattgccactcccgatcgggctagaggctcgtcattgttcctgcatggctaagtgcccaggttcatcctaaccaggctgaacactagtcgctaggttccacggttctcttccgtgacccacggcttctaaaagctgtaacactcaccgcatggcccaaggttccattccttggaatcaaaacttatgggatgccacaaaagcagttctaagagggaagtttaaatgccgcacagggagcggagccgaagcgccgggcgcgcgcgggagagagggcggcgactggcagcggaattccnccgcnctgtctagggtctacgatagggtttccttccccctcg

SEQ ID NO: 19366 - DNA, 471 bp, Homo sapiens
  SIMILAR (209)..(451): 311254mologous to Homo sapiens Human secreted protein HCHPF68, SEQ ID NO:163,accession number Y86248,Smith-Waterman Score =114.
atggaggaggaagcgctcaagtttgtccttgaggagggcccttctcaaagttccagagtggaacgaagagccctggcggtaggacgagatgtggagacagatggaccaatacaggacagtcaggaaggatgtgactccctgagagctgactgtagtaattgttatttcttttctgcatctagccacccagcagggctacaggctctgggctggtactgggagttgtctgcagagtcctgtgatgtgatcatcttcaggtctctcggccacggataccagcaactgttccagtggagtggaaaaggagtgaaatggactctaaagaggaagaaaaggaaaagaaggagaagaaggagaaaagaagaagaagatgaagaagaagaggaaaagaagaagaagaagaaaggaggaggaggaggaaaaggaggagaaagaaaagaggaagaaaaaaatagattaaaaaaagagtag

SEQ ID NO: 19367 - DNA, 848 bp, Homo sapiens
  SIMILAR (227)..(418): 441254mologous to Arabidopsis thaliana F15O4.29,accession number AC007887,Smith-Waterman Score=135.
atgggactgtataaggatttattagatactagatacctcttctaccttgtgccaggttatggcctgacacaaattgaactggaagtgatagcaaaggattcagccaagccagtaggcactccacgtgtggggctgaagctggagatgggaatttacctgagtgggcatcttgataagtttatttttgctatgccttttaaaataaaggatatcctttctttgaagaaagaggaagaaaaggaagaagaagaaggagaagaaggagaaaagaagaagaagatgaagaagaagaggaagaagaagaagaagaagaaaggaggaggaggaggaaaaggaggagaaagaagaagaggaagaaaaaaatagattaaaaaaagaatccggcagggtgtccgctgtgcttctgatccagcaaggcgcccattgctgctcccgatcgggctagaggcttgccattgttcctcatggctaagtgcccggaactgcgcaggaatatactaggaaagctgagagaatccacagaccctctgaaggagtggattgcttctgcaggacccaagaaacagcccaaatactgtgagtgccaaactgtgacagtgggaaaagaggattgtctgcccccaaacacaccctactggggaacctggaggtatagatcatggaaaatggatttgaccttaccggatctgattctggtatccgtggccgagagacctgaagatgattcacatcacaggactcgcagacaactcccagtaccagcccagagcctggtagccctgctgggtggtagatccagaaaagaaataacaattactacagttcagctctcagggagtacatcctag

SEQ ID NO: 19368 - DNA, 508 bp, Homo sapiens
  SIMILAR (283)..(125): 901254mologous to Homo sapiens brk kinase substrate,accession number AJ245719,Smith-Waterman Score=243.
tcgatacgacttttttttttttttttttttttttggggtcagagttttaatcctgggaaaaagaatctggccgctgggccatgccctgggactagcccgctgggtccctggtgtgtccgaatcagtgctccagtgcccgcctcttctccagcttcttctgtagctctgccgtcatgtctgccagcccggctgtggggaagagaggctgggctgaactgactggcagcttcctgcccaagccaccattaaagactttgggctctggaagagaagacagatgaggccaggtgtggtggctcacgccggtaatcccagcactttgggaggctgaggtgggtggatcacttgagggtcaggagttcgagaccagcctgggcaacatggtgaaaccccttctctactggcttgggtccaacgggtggctttggaagcttggcaggaggctttggcaacttctttggcttcaggatgactggccaactagaggaagccacatcttggttctcat

SEQ ID NO: 19369 - DNA, 1413 bp, Homo sapiens
  SIMILAR (447)..(1304): 651254mologous to Homo sapiens brk kinase substrate,accession number AJ245719,Smith-Waterman Score=788.
cttcccggcccagctggggcacccactggaatgagtatgccaggcggttgaccctggctccgtcatggcctctgccctgaggccaccccgtgtccccaagcctaagggtgtcctgccttcacactactatgagagcgttctagagaagaaggggccctgtgaccgggattacaagaagttctgggcaggcctgcagggtctcaccatttatttctacaatagcaatcgggacttccagcacgtggagaagctcaacttgggagcatttgagaaactcacagatgagattccctggggaagctcacgtgaccctggcacccacttcagcctgattctccggaatcaggagatcaagttcaaggtagagaccttggagtgtcgggaaatgtggaaaggcttcatcttaacggtggtggagctccgtgtcccgaccgacttgaccctagcttcctgggcacctatacatgatgtctgaagtcttggccaaagaggaggcgcgccgtgcactggagacaccctcgtgcttcctgaaggtgagccggctggaggcacaactgctcctggaagcgctaccccgagtgcgggaacctgctgctgcggcccagcggggacggcgcccgacagcgtgtcggtcaccacgcggcagatgcacaacgggacgcacgtggttccggcattacaaggttgaagcgggaaggggccccaagtacgtgattcgatgtggaacagccgttctcttgcacctcccctggacgaccgtggtcaactatttcgtgtcgcataccaaaaaggcgctggtgccattcctgttagacgaggactacgagaaggtgctaggctacgtggaagccgataaggagaatggcgagaatgtgtgggtggcgccctccgctccgggcccaggtccttcacccttgcacaaggtgcccccaagccgctgtcaacctgcgtctagccaggacaagctgcccccactgcccccattacggaacccaggaagagaaattacgtgaccccccattggagatggcccagctgttgacttatgagaacccaagattgtggcttccttctagttggcccagtcatccctgaagcccaaagaagtttgccaaagcctcctgcccaagcttcccaaagcccacccgttggaccccaagccagagccccaaagtcttttatgggtggctttggccaggaagctgccagtcagttcagcccagcctctcttccccacagccgggctggcagacatgacggcagagctacagaagaagctggagaagaggcgggcactggagcactgattcggacacaccagggaccagcgggctagttcccagggcatggcccagcggccagatttctttttcccaggattaaaactctgaccccaggaaaaaaaaaaaaaaa

SEQ ID NO: 19370 - DNA, 1600 bp, Homo sapiens
  SIMILAR (811)..(1467): 481254mologous to Homo sapiens ribosomal protein,accession number D23660,Smith-Waterman Score=358.
  misc_feature (1)...(1600): n = a,t,c or g
ccaatcgagatcatagtccgtgtggtggaattcgccgggctgagaggagcgtggctgctntcctcatctccgccatggcgtgctgctcgcccactgactatcggtgtacttccgaaaagggggagtcatctggcaaaaatgtcactttgccctgctgtattcaaggctcctattcgaccagatattgtggaactttggttcacacccaaacctgcgcaaaaacaacagacagcccgtatgctggcaagggaattaagcaggtcatcagactaagtgctgaagtcttgggggtactggnccagagctgttggctcgaaattcccaagaagttcgaggtggtgggactcaccgctcttggccaagggtgctttttggaaacaatgtgtcggtggaggccgaaatgttttgcacccaaccaaaaccctgggccgccgttggcatccgtaggagtggnacacaacccaaaaaacggatacgcccatctggttctgcccctggctgccctcagcccttaccagcactgggtcatggtctaaagggtcatctgtattgagggaagtttcctgaaacttccttttggtaagttgaaagataaaagttgaaaggctaacaagaagaaccaagggaagctgtttttgctcccttaaggaaacttaaaaggcctgggaatgatattcaaaaagggtctatggcctcttcagcgaaatgaagagctgggcaaaaggcaaaattgagaaaacccgtcgcccgtatcccagcggcaggggccccgtgcatcatcctataatgaggataatgggtattcattcaaggcctttcaggaaacatccctggggattactcatgcttaattgttaaggcaagctggaacatttttgaaagcttgctcccttggtggggcatgtgggaccgtttcctgcatttgggacttgaaagtgctttgcgggaagtttaggatgatttgtaccggcactttggcgttaaagccactttccccttcaaggagttaacttaccaatcttttccccatggcacaaggatgattaaatacagattcttaggcagaatccttgaaaagcccagagattccaagagagccccttcgagcaccacggcaagaagatccattcgcagagttcctaaagaaggaacccactggaaaaactttgagaaatcatgttgaaggcttaaaccccttttgcaaaggcccatgcggccggaacaccattttttggccaggccaggaattcacaagctccgggtggataaggcagctgctgcagcagcggcaacttacaagccaattcagatgagaaggcggcggttgcaggcaagaagcctgtggtaggtaagaaaggaaagaaggctgctgttggtgttaagaagcagaagaagcctctggtgggaaaaaaggcagcagctaccaagaaaccagcccctgaaaagaagcctgcagagaagaaacctaactacagaggagaagaagcctgctgcataaactcttaaatttgattattccataaaggtcaaatcattttggacagcttcttttgaataaagacctgattatacaggcagtgagacaaaaaaaaaaaaaaaa

SEQ ID NO: 19371 - DNA, 730 bp, Homo sapiens
  SIMILAR (46)..(624): 481254mologous to Homo sapiens 23 kD highly basic protein,accession number X56932,Smith-Waterman Score=281.
  misc_feature (1)...(730): n = a,t,c or g
ccaagcggctgccgaagatggcggaggtgcaggtcctggtgctttgatggtcgaggcccatctcctgggcccgcctggcgggccatcgtggctaaaccaggtactgctgggccggaaaggtggtggtcgtaccgctgtgaaggcatcaacagtttctgcaaatttcttacagaaacgaggttaaagtaccttggcttttcccctccaagcggaatgaacaccaacccttcccgaaggccccttaccacttcgggggcccccagccgcatcttcgtggcggacccgtgcgaggtatgctgcccccacaaaacccaagcggaggccaaggccgcntcttggaccgtcttcaaggtgtttgacgggcatccccaccgccctacggacaagaaaaaagcgggatggtggttcctggctgccctcaaggtcgtgcgttttgaagcctacaagaaagttttgcctaatctgggggcgcctgggctcccgaggttgggctggaagtaccaggcagtgacagccccccctggaggagaaagaggaaagagaaaagccaagatccactaccggaagaagaaacagctcatgaggctaccggaaacaggcccgagaagaaacgtggagaaagaaaattgacaaatacacagaggttctcaagacccacggacttcctggtctgagcccaataaagactgttaattcctcaaaaaaaaaaaaaaaaaaaagggcggccgct

SEQ ID NO: 19372 - DNA, 886 bp, Homo sapiens
  SIMILAR (53)..(322): 411254mologous to Homo sapiens Human secreted protein, SEQ ID NO: 5089,accession number G01008,Smith-Waterman Score=99.
cccacgcgtccgcggacgcgtgggcggcgaacgcggaagagcacgccaatgaagggcctcggggcacgctaccgagagtacaaggtatgtgggtcgctgcctgcccaccccccaaaatgcaacacgcggcccccttttaccggcatgcgaaatctttgcgccctaatcaatgtcgtcgccaaagtccccgctttctggtaactttgtatcctcagttaaaagaagatgaagaaattcttccaggggaagattgtctacttgtggggcaaggtgttttgagaaggttcccccctgcgggttgaaagaactttcggggatctgggcttgcggctattgactccccgggagcgggcaccccacaacattgttaccggggaatacccggggaccttgacccaccgcaggcggctgttcaacccagttgcttacccgagacaatggggttgcccggcaccggcgccccgaagcccacttccatttcagattcatggaagggtgggagggagatcgtgggccagcaagattccgccgggcgggctggtcaaagcaagttccaacgactccaagatcaaagtttcccgctggccccaccgggttccttgcggccttcaggaacaaggcacgcttcaccacccaagaggcccaacaccttcttctagggtgcagggcccctcgttccgggttgtgcccccaaaataaaactcaggaaacgccccggtgaatgattttaagatgaagaaaaaaatagatgagataacatttttcaccatgtggaaaaatggaatagtggaaagagatcagagtccacagcctggaaactgctgccggggctcttctgaggctcgtatttttaggctctttcccaccgtacataggatcctttttt

SEQ ID NO: 19373 - DNA, 471 bp, Homo sapiens
  SIMILAR (275)..(469): 951254mologous to Homo sapiens lectin precursor,accession number J04456,Smith-Waterman Score=337.
  misc_feature (1)...(471): n = a,t,c or g
gaggccgcgttctgntcccacgtttaccgacgtacnncaannannnntntgaagctgggcgcctgcccgggaacatcctcctggactcaatcatggcttgtggtctggtcgccagcaacctgaatctcaaacctggagagtgccttcgagtgcgaggcgaggtggctcctgacgctaagagtgagttcttccagcaaggtgcgttcatgggatactgagtgacagattagtcggtcagtggggctggagctggccgaggtggcctcatgcccacccgttaccccccagcttcgtgctgaacctgggcaaagacagcaacaacctgtgcctgcacttcaaccctcgcttcaacgcccacggcgacgccaacaccatcgtgtgcaacagcaaggacggcggggcctgggggaccgagcagcgggaggctgtctttcccttccagcctggaagtgttgcagaggtgtgcatcan

SEQ ID NO: 19374 - DNA, 822 bp, Homo sapiens
  SIMILAR (77)..(508): 361254mologous to Homo sapiens lectin precursor,accession number J04456,Smith-Waterman Score=100.
  misc_feature (1)...(822): n = a,t,c or g
ggctgaggaattcggacgaggacagctggtgccgcctgccacgggaaccatcctccntgaaactcaatcatggccttgtggtctggtcgcccagcaaccctgaatttcaacaccttggagagctgccttcgatttccgaagccgagttggcttcctgacgcttaagagctttcgttgctgaaacctgggacaaagaccgccaacaacctggtgcctgcactttcaaccctctgcttcaacagcccacgagatctgccagacacgcatcgctgtgcaacagccaaggcacggcggggcacgaggggggaccgacgcagcgggaggctgtctttcccttccaagcctgggaagtgttgcagaggtgttgcattcacctttcgaaccagggccaacctgaaccgttcaagcttgccagatgggattacggaatttcaagtttccccaaacggcttcaaccttggaagccatcaactacatggcagcttgacggtggactttcaagatcaaaatgtgtggcctttgactgaaatcagcgcagcccatggccccctaatagaagagcagctggcctctgctccctctgaagaaaaacagaagaaacaaagtagatatatatacttgcatctaataattaataatgaataatatggggggggccccttctataagaagcaaatttttattcccgtgcggttgccgtattttttattttttttgggcctcacaaaatttttaggctcggcgccttgttttaaacctcggtgagtaggagaaaacccgcggggacccacaatataaatgtcccggcgacgacaaataccg

SEQ ID NO: 19375 - DNA, 440 bp, Homo sapiens
  SIMILAR (2)..(274): 621254mologous to Homo sapiens Human fibulin type 1 isoform (variant A),accession number W27598,Smith-Waterman Score=299.
  misc_feature (1)...(440): n = a,t,c or g
caagcagcagtgccgagacacgggtgacgaggtggtctgctcctgcttcgtgggctaccagctgctgtctgatggtgtctcctgtgaagatgtcaatgaatgcatcacgggcagccacagccgcgnctttggagaatcctgcatcaacacagtgggctctttccgctgccagggatcagcagctgcgngactggctatgagctcacagaggacaatagctgcaaagaatactctgggatccttccgctgccgacccaagctacagtgcaagagtggctttatacaagatgctctaggcaactgtattgatatcaatgagtgtttgagtatcagtgccccgttgccctatcgggatnacatggcatcaacacagagggctcctacaagtgccagaagaacgtgncccaactgtgggccgttggttaaccatcttaaagagg

SEQ ID NO: 19376 - DNA, 2156 bp, Homo sapiens
  SIMILAR (11)..(2059): 1001254mologous to Homo sapiens fibulin-1 C,accession number X53743,Smith-Waterman Score=3800.
cccgccgcccatggagcgcgccgcgccgtcgcgccgggtcccgcttccgctgctgctgctcggcggccttgcgctgctggcggccggagtggacgcggatgtcctcctggaggcctgctgtgcggacggacaccggatggccactcatcagaaggactgctcgctgccatatgctacggaatccaaagaatgcaggatggtgcaggagcagtgctgccacagccagctggaggagctgcactgtgccacgggcatcagcctggccaacgagcaggaccgctgtgccacgccccacggtgacaacgccagcctggaggccacatttgtgaagaggtgctgccattgctgtctgctggggagggcggcccaggcccagggccagagctgcgagtacagcctcatggttggctaccagtgtggacaggtcttccgggcatgctgtgtcaagagccaggagaccggagatttggatgtcgggggcctccaagaaacggataagatcattgaggttgaggaggaacaagaggacccatatctgaatgaccgctgccgaggaggcgggccctgcaagcagcagtgccgagacacgggtgacgaggtggtctgctcctgcttcgtgggctaccagctgctgtctgatggtgtctcctgtgaagatgtcaatgaatgcatcacgggcagccacagctgccggcttggagaatcctgcatcaacacagtgggctctttccgctgccagcgggacagcagctgcgggactggctatgagctcacagaggacaatagctgcaaagatattgacgagtgtgagagtggtattcataactgcctccccgattttatctgtcagaatactctgggatccttccgctgccgacccaagctacagtgcaagagtggctttatacaagatgctctaggcaactgtattgatatcaatgagtgtttgagtatcagtgccccgtgccctattgggcatacatgcatcaacacagagggctcctacacgtgccagaagaacgtgcccaactgtggccgtggctaccatctcaacgaggagggaacgcgctgtgttgatgtggacgagtgcgcgccacctgctgagccctgtgggaagggacatcgctgcgtgaactctcccggcagtttccgctgcgaatgcaagacgggttactattttgacggcatcagcaggatgtgtgtcgatgtcaacgagtgccagcgctaccccgggcgcctgtgtggccacaagtgcgagaacacgctgggctcctacctctgcagctgttccgtgggcttccggctctctgtggatggcaggtcatgtgaagacatcaatgagtgcagcagcagcccctgtagccaggagtgtgccaacgtctacggctcctaccagtgttactgccggcgaggctaccagctcagcgatgtggatggagtcacctgtgaagacatcgacgagtgcgccctgcccaccgggggccacatctgctcctaccgctgcatcaacatccctggaagcttccagtgcagctgcccctcgtctggctacaggctggcccccaatggccgcaactgccaagacattgatgagtgtgtgactggcatccacaactgctccatcaacgagacctgcttcaacatccagggcgcgttccgctgcctggccttcgagtgccctgagaactaccgccgctccgcagccacccgctgtgagcgcttgccttgccatgagaatcgggagtgctccaagctgcctctgagaataacctactaccacctctctttccccaccaacatccaagcgcccgcggtggttttccgcatgggcccctccagtgctgtccccggggacagcatgcagctggccatcaccggcggcaatgaggagggctttttcaccacccggaaggtgagcccccacagtggggtggtggccctcaccaagcctgtccccgagcccagggacttgctcctgaccgtcaagatggatctctctcgccacggcaccgtcagctcctttgtggccaagcttttcatctttgtgtctgcagagctctgagcactcgcttcgcgtcgcggggtctccctcctgttgctttcctaaccctgccctccgggggttaataaagtcttagcaagcgtgggacacagtg

SEQ ID NO: 19377 - DNA, 2359 bp, Homo sapiens
  SIMILAR (11)..(2119): 1001254mologous to Homo sapiens fibulin-1D,accession number U01244,Smith-Waterman Score=3913.
cccgccgcccatggagcgcgccgcgccgtcgcgccgggtcccgcttccgctgctgctgctcggcggccttgcgctgctggcggccggagtggacgcggatgtcctcctggaggcctgctgtgcggacggacaccggatggccactcatcagaaggactgctcgctgccatatgctacggaatccaaagaatgcaggatggtgcaggagcagtgctgccacagccagctggaggagctgcactgtgccacgggcatcagcctggccaacgagcaggaccgctgtgccacgccccacggtgacaacgccagcctggaggccacatttgtgaagaggtgctgccattgctgtctgctggggagggcggcccaggcccagggccagagctgcgagtacagcctcatggttggctaccagtgtggacaggtcttccgggcatgctgtgtcaagagccaggagaccggagatttggatgtcgggggcctccaagaaacggataagatcattgaggttgaggaggaacaagaggacccatatctgaatgaccgctgccgaggaggcgggccctgcaagcagcagtgccgagacacgggtgacgaggtggtctgctcctgcttcgtgggctaccagctgctgtctgatggtgtctcctgtgaagatgtcaatgaatgcatcacgggcagccacagctgccggcttggagaatcctgcatcaacacagtgggctctttccgctgccagcgggacagcagctgcgggactggctatgagctcacagaggacaatagctgcaaagatattgacgagtgtgagagtggtattcataactgcctccccgattttatctgtcagaatactctgggatccttccgctgccgacccaagctacagtgcaagagtggctttatacaagatgctctaggcaactgtattgatatcaatgagtgtttgagtatcagtgccccgtgccctattgggcatacatgcatcaacacagagggctcctacacgtgccagaagaacgtgcccaactgtggccgtggctaccatctcaacgaggagggaacgcgctgtgttgatgtggacgagtgcgcgccacctgctgagccctgtgggaagggacatcgctgcgtgaactctcccggcagtttccgctgcgaatgcaagacgggttactattttgacggcatcagcaggatgtgtgtcgatgtcaacgagtgccagcgctaccccgggcgcctgtgtggccacaagtgcgagaacacgctgggctcctacctctgcagctgttccgtgggcttccggctctctgtggatggcaggtcatgtgaagacatcaatgagtgcagcagcagcccctgtagccaggagtgtgccaacgtctacggctcctaccagtgttactgccggcgaggctaccagctcagcgatgtggatggagtcacctgtgaagacatcgacgagtgcgccctgcccaccgggggccacatctgctcctaccgctgcatcaacatccctggaagcttccagtgcagctgcccctcgtctggctacaggctggcccccaatggccgcaactgccaagacattgatgagtgtgtgactggcatccacaactgctccatcaacgagacctgcttcaacatccagggcgcgttccgctgcctggccttcgagtgccctgagaactaccgccgctccgcagccacgctccagcaggagaagacagacacggtccgctgcatcaagtcctgccgccccaacgatgtcacatgcgtgttcgaccccgtgcacaccatctcccacaccgtcatctcgctgcctaccttccgcgagttcacccgccctgaagagatcatcttcctccgggccatcacgccaccgcatcctgccagccaggctaacatcatcttcgacatcacggaagggaacctgcgggactcttttgacatcatcaagcgttacatggacggcatgaccgtgggtgtcgtgcgccaggtgcggcccatcgtgggcccatttcatgccgtcctgaagctggagatgaactatgtggtcgggggcgtggtttcccaccgaaatgttgtcaacgtccgcatcttcgtctctgagtactggttctgagggctggtctgccgcacagccgcaggtgcacctccaggccaaatcattgctgccagtgactgtggtctgtacttgtttataccctcagacttttttaatgttaggtatttgtagcataaggccaacatgtatcaagctgagccagatgaataagtccatctgatgtattttcggtgtttaaaaaatgagcccagttgctcaactgtttggttgaaaaccttgctcattttttaatgc

SEQ ID NO: 19378 - DNA, 553 bp, Homo sapiens
  SIMILAR (15)..(452): 661254mologous to Homo sapiens dJ162H14.1 (Fibulin 1),accession number Z98047,Smith-Waterman Score=454.
ggcagccacagctgcggcttggagaatcctgcatcaacacagtgggctctttccgctgccagcgggacagcagctgcgggactggctatgagctcacagaggacaatagctgcaaagatattgacgagtgtgagagtggtattcataactgcctccccgattttatctgtcagaatactctgggatccttccgctgccgacccaagctacagtgcaagagtggctttatacaagatgctctaggcaactgtattggtaagaggtgtgccgccaggattagcgggttattccaggaggggtcagcgacctagccttggggcaggcctcttagaatctgcggggccgcatggtatacagaacaggggttggcaaactttttgtgtaaagggctggacagcaaatagagcaaatactttagccgttgtgggccatatggtctctgtcataatagtcaactctgctgttatagtctaaagcggccaagggccatctgtaaacaaatgggtgtggctgtgttccaataaaactttatttgcaaaaaaaaaaaaaaaaa

SEQ ID NO: 19379 - DNA, 2500 bp, Homo sapiens
  SIMILAR (11)..(577): 661254mologous to Homo sapiens fibulin-1 B,accession number X53742,Smith-Waterman Score=615.
  misc_feature (1)...(2500): n = a,t,c or g
cccgccgcccatggagcgcgccgcgccgtcgcgccgggtcccgcttccgctgctgctgctcggcggccttgcgctgctggcggccggagtggacgcggatgtcctcctggaggcctgctgtgcggacggacaccggatggccactcatcagaaggactgctcgctgccatatgctacggaatccaaagaatgcaggatggtgcaggagcagtgctgccacagccagctggaggagctgcactgtgccacgggcatcagcctggccaacgagcaggaccgctgtgccacgccccacggtgacaacgccagcctgggaggccacatttgtgaagaggtgctgccattgctgtctgctggggagggcggcccaggcccagggccagagctgcgagtacagcctcatggttggctaccagtgtggacaggtcttccaggcatgctgtgtcaagagccagggagaccggagatttggatgtcgggggcctccaagaaacggataagatcattgaggttgaggaggaacagagaggacccatatctgaatgaccgctgccgaggaggcgggccctgcaagcagccngtgccgagacacgggtgacgaggtggtctgctcctgcttcgtgggctaccagctgctgtctgatggtgtctcctgtgaagatgtcaatgaatgcatcacgggcagccacagctgccggcttgggagaatcctggcatcaacacagtggggctctttcccgctgccagcggaacagcagctgcgggactggctatgagctcacagaggacaatagctgcaaagatatttgacgagtgtgagagtggtattcataactgcctccccgattttatctgtcagaatactctgggatccttccgctgccgacccaagctacagtgcaagagtggctttattacaaggatgctctagggcaacttgttattggatattcaatggagtgttttgagtatccagttgccccgttgccctattggggattaacatggcattcaacacagagggcttctacaacgtgccagaaggaacgtgccccaactgtgggcccttgggttaccatcttcaacgggggaggggaacgcgctgtgtttgatgtgggacgagtgcgcgccaccttgcttgagccctgtgggaaaggggacatcgctggcgtggaactcttcccgggcagttttccgctggcggaatgcaaggacggggttactatttttgacggcatcagcagggatgtgttgttcgatgttcaacggagttgccagcgcttaccccggggcgcctgttgttggccacaagttacggagaacacgctgggctcctacctcttgcagctgttccgtgggctttccggctctctgtggatggcaggtcatgtgaagacatcaatgagtgcagcagcagcccctgtaagccagggagtgttgccaacgttttacggctcctaaccagtgttactggccgggcgaggttaaccagcttcagcgattgtgggatgggagttcacctgtgaaaggacattcgacggagttgcggccctgccccaccgggggcacacattttggttccttaccgctggcattcaaacatcctggggaagctttccagttgcagcttgcccctcgtctgggctaacagggtgggcccccaatgggcccgcaacttgccaaggacatttgatgagttgtgttgactgggcatccacaactgcttccattcaacggaggacctggtttcaaacattccaggggcgggcttccgttgcctgggcctttcgagttgccctgagaactaccgccgctccgcagccacatgatcgtaggggaactcttgcatgagggccatcggtgcaggctgggagaaggagaagggcaagttggcagggagttggaagaccacagggcatttgagccacttcctcatgtaacttaacttgtgccttcaggacctgctcaagcccgatcacgtatataccacttccatttgatgatgggaatgctgctgttcatgaccaactttatgggctagatggggtcagaaagcacccagtttcatggatagggcagtttcaggttcattatgggtgacttgatggacccaggagttcaaacatttcagttttccaccaaagccccattaaccagggccaagagctgtcttctcaaaagaagagtagttatctgcagaagatggcagggccttgctccgaaagcctagagaccgcccactgtgattcacctatgggggcctcgcaaacgcgtgcagccagcatccttatctgccactggacacctcaagcaacattggatctgctgggtcatatggcccaagtggcagagcaacttgcacaacagcctggacctgtcatagagctttctcctgttctggaccccactcaaaactggcagcctttcaggtcactcaataaatgtgctggagtaacacactcaaacgaggaatgtgttgcctccaaaatccaataggccc

SEQ ID NO: 19380 - DNA, 539 bp, Homo sapiens; identical to SEQ ID NO: 10488
  SIMILAR (539)..(264): 821254mologous to Homo sapiens splicing factor,accession number L04636,Smith-Waterman Score=388.
  misc_feature (1)...(539): n = a,t,c or g

SEQ ID NO: 19381 - DNA, 763 bp, Homo sapiens
  SIMILAR (763)..(584): 1001254mologous to Homo sapiens Human secreted protein, SEQ ID NO: 8160,accession number G04079,Smith-Waterman Score=302.
tttttttttttggaggagataaaccaattttatgtctatcatgttatacaaaaatctagaaattatatgttttgtgttctcatttattatcatttttttctgtacaaatctattatttctagatttttgtataacatgatagacataaaattggtttatctcctccaaggcagtttgtctttttctattcctcccccttcaacctgtgtcacaaaagaccaagaacagatgtcggaaaagtttttttttcttcagtattgtttaaaagtttcaatacaaaataagttataaataaaaggcttgtatgtacaaggctcctcagaaggaaatggagttgtcttcaaccccatagaatgatgtgagtccaagctggctctagaggatcacagcccaagtatcacaggcatgagatgggatggacaggccacactgacacaccaccacaccgcttgtgattctcaggttgtactttgtacatacaggacagatgaagtgggtttgcctcccactcagccagcatgatgctgagacacttttcatcaaactgcaagctcttctcatactcgctgatgatggactgctcttggttgatcagctcctgttgaatttcctccagcacagccatgtctatcagctcctccagctgagccaagtcttctggacaattctccactgactgcaaagcattccactcttcttccatcacctcttgaactagaaagctgttctgagaattccctggcccactgcttccagcctggcg

SEQ ID NO: 19382 - DNA, 693 bp, Homo sapiens
  SIMILAR (680)..(393): 751254mologous to Homo sapiens Human secreted protein, SEQ ID NO: 8160,accession number G04079,Smith-Waterman Score=333.
atgggactggaatcatacaactgatttgcttcccatctcctccacttactagctgtatgacctgcacgagaccacaccccactttctgttctaatactactatcttacagggcagtcacatggagaaaacagcatcattaaatgagaagttcttagcacaaagtctagcaccctggagacccttattattgagaagctagacagccaagatgtcagagtacaaaaggagtcttttggacacttgactgatggaggtagacaaaggggacttataaactaatcctgattggaggaaaggtcacagtattcccagtagctaaatacaggtaaggaaggaactaactaactaggggttaccttggttggatcaagctcctgttgaaatttcctcccagcacagccatgtctatcagctcctcccagctgaagccaagtcttctggacaattctccactgaactgcaaagcattccactcttcttcccatcacctcttgaaactagaaagctgttctgagaattcccctggcccactgcttccagcctggcggtacctgtttaggagcctgtcccggctgtttctcattctctccaggcatctctgccggaaagcctctttccaaggcggcgagcccaccagtttgtacagggagcggcgcggagacctcaacgactccgccatctcctcttcgcgg

SEQ ID NO: 19383 - DNA, 763 bp, Homo sapiens
  SIMILAR (627)..(379): 691254mologous to Homo sapiens Human secreted protein, SEQ ID NO: 8160,accession number G04079,Smith-Waterman Score=264.
ttttttttgttttgtgttctcatttattatcatttttttctgtacaaatctattatttctagatttttgtataacatgatagacataaaattggtttatcgtcctccaaggcagtttgtctttttctattcctcccccttcaacctgcgtcacaaaagaccaagaacagatgtcggaaaagtttttttttcttcagtattgtttaaaaggtttcaattacaaaattaagttataattaaaagctttgtaatgtacaaggctccttcaagaggggaaatgagttgtcttcaaccccattaggaatgatgtggagtccaagcttggctcttagagggatcacagcccaagtatcacagggccttgggttgatcagcttccttgttgaatttcctccagcacagccatgtctatcagctcctccaactgagccaagtcttctggacaattctccactgactgcaaagcattccactcttcttccatcacctcttgaactagaaagctgttctgagaattccctggcccacttgcttccagcctggcggtacctgtttaaggagcctgtcccggctggtttctcaatctctccaaggcatctctgccggaacagcctctttccaagggcgggcgagcccaccagtttgtacagggagcggcgcggagacctcaacgactccgccatctcctcttcgcgggagacaaagccacaagacccgttcccgaattccaccacatggtctaagggtcatctaagggtttcggg

SEQ ID NO: 19384 - DNA, 2182 bp, Homo sapiens
  SIMILAR (79)..(954): 591254mologous to Homo sapiens Mitochondrial matrix targeting protein, p33 protein,accession number Y21555,Smith-Waterman Score= 744.
ccggcggcgcctcaggtcgcggggcgcctaggcctgggttgtcctttgcatctgcacgtgttcgcagtcgtttccgcgatgctgcctctgctgcgctgcgtgccccgtgtgctgggctcctccgtcgccggcctccgcgctgccgcgcccgcctcgcctttccggcagctcctgcagccggcaccccggctgtgcacccggcccttcgggctgctcagcgtgcgcgcaggttccgagcggcggccgggcctcctgcggcctcgcggaccctgcgcctgtgggagtggctgcggctcgctgcacaccgacggagacaaagcttttgttgatttcctgagtgatgaaattaaggaggaaagaaaaattcagaagcataaaaccctccttaaagatgtctggaggttgggagctggaactgaatgggacagaagcgaaattagtgcggaaagttgccggggaaaaaatccccgttccctttcaacattaacaacagcattccccccaacatttgatggtgaagaggaaaccctcgcaagggccagaaggtttgaagacagggagcctgaactgacatcacttcccaaatttggtggttgaaggttataaagaatgattgatggcaagaaaggcccctggtgttggaccgttcattatccagaggatgaggttggacaagaagacgaggctgagagtgacatcttctctatccagggaagttagctttcagtcccactggcgagtctgaatggaaggatactaattatacactcaacccagattccttttggactgggcccttatatgacccacctaatgggatttccttgaccgaaccgaggggtggacaacacttttgccagatgagcctggtggagctcagcacagccccccggagcccccccggagtaccattaccttttccttgaagacctccaagaagttttgctcaagagcccagtagagcagacagatgctgaaagcccatagtttccatgggcaggctttggccaagtggaacaaatccctactctgaagcctagacatgtgtctttgmaaatgattatcgatcctaatatcatggggggbaaaaataccgaaatttaaattatatgttttgtgttctcatttattatcatttttttctgtacaaatctaattattttctagattttttgtataacatggatagacataaacacctggtttatctcctccaagagcagtttgtctttttctattcctcccccttcaacctgtgtcacaaaagaccaagaacagatgtcggaaaagtttttttttcttcagtattgtttaaaagtttcaatacaaaataagttataaataaaaggcttgtatgtacaaggctccttcagagggaatgagtggtcttcaacccccataggaatgatgtgagtcccaagctggctctagaggatcacagccccaagtatcacaggccaagacagctcaatgagaagactggacttttcttctgttccttccagtgactgaaaattcaggtgtgtggggacaatgtgcactggtgctcatttatactaccctctaaacaggcacggaagcttctgctctgtcaactcagaagaatgagatgggatggacaggccacactggacacaccaccacaccgcttgtgaattctcaggttggtactttgtaaccataacaggaacagatgaagtgggtttgccttcccactcagcccagcatgaatgctgagacaacttttcatcaaaactgcaaagctcttctacatactccgctgatgatggaactgcctcttggttaatcagcttccctgttgaatttccctccagcacagccatgttctataaggctcctccaggctgagccaagtcttctggacaattctccactgactgccaagcattccactcttcttccatcacctcttgaactagaaagctgttctgagaattccctggcccactgcttccagcctggcggtacctgtttaggagcctgtcccggctgtttctcattctctccaggcatctctgccggaaagcctctttccaaggcggcgagcccaccagtttgtacagggagcggcgcggagacctcaacgactccgccatctcctcttcgcgggagacaaagccacaagacccgttccctgcggacgcgtgggcggacgcgtggg

SEQ ID NO: 19385 - DNA, 387 bp, Homo sapiens
  SIMILAR (3)..(257): 621254mologous to Mus musculus D-dopachrome tautomerase,accession number AF068199,Smith-Waterman Score=276.
agctggacacgaatttgcccgccaaccgagtgcccgcggggctggagaaacgactctgcgccgccgctgcctccatcctgggcaaacctgcggaccgcgtgaacgtgacggtacggccgggcctggccatggcgctgagcgggtccaccgagccctgcgcgcagctgtccatctcctccatcggcgtagtgggcaccgcccgagacaaccgcaggcacaggggcccctttctttgggttctcacccagggaactagccctgggccaggaccggatacttatacggttttttcccttggagtcctggcagaatggcaagataaggaccggcatgacttttttatgaatgggcaccgaaggattccaggcatctggtaacctgggtgtg

SEQ ID NO: 19386 - DNA, 647 bp, Homo sapiens
  SIMILAR (39)..(419): 501254mologous to Homo sapiens phenylpyruvate tautomerase II,accession number Y11151,Smith-Waterman Score=210.
  misc_feature (1)...(647): n = a,t,c or g
cttcttccgccagagctgtttccgttcctctgcccgccatgccgttcctggagctggacacgaatttgcccgccaaccggagtgcccgcgggggctggaggaaacgactctgcgccgccgctgcctcccatcctgggcaaacctgccggaccgcgtgaacgttgaccggtacgncgggggcctngccattggcgcatgagcgggttccaccggagccctgcgcgtcagctgtccaatctcctccattcggcgtcagtggggcaccgccgaggacaaaccgcagccacagcgcccatttcttttgagtttcttcaccaagggagcttagccctggggccagggaccggataattttattccgttttttccctttggagtcctgggcagattgggcaagataggggacggtcattgatttttttatgatttggggcacggagggattccaggggcatcttgtgaacttggctgcttctttccagaagagatcttcttgggcagaagtgaagggcctgggangattaaccagcttttggattatccccgncattgcaacatttcctggtgattcacataatcctcttcttcatccttcatatgaaataaatgaagagagcttcctcattcagaaaaaaaaaaagtcgacg

SEQ ID NO: 19387 - DNA, 355 bp, Homo sapiens
  SIMILAR (76)..(288): 951254mologous to Homo sapiens chaperonin-like protein,accession number L27706,Smith-Waterman Score=331.
ggatagttcctcccggccacgccgcgccggctctgggcactcagcatcgtttccttttcctccgctggagcagctatggcggcggtgaagaccctgaaccccaaggccgaggtggcccgagcgcaggcggcgctggcggtcaacatcagcgcagcgcggggtctgcaggacgtgctaaggaccaacctggggcccaagggcaccatgaagatgctcgtttctggcgctggagacatcaaacttactaaagacggcaacgtgctgcttcacgagatgggccttcatcctagaataatcactgaaggatttgaagctgcacaggaagaggcccttcagttattggaagaagtcacag

SEQ ID NO: 19388 - DNA, 800 bp, Homo sapiens
  SIMILAR (10)..(480): 951254mologous to Homo sapiens chaperonin-like protein,accession number M94083,Smith-Waterman Score=741.
  misc_feature (1)...(800): n = a,t,c or g
ctgcagattgtcttaacagagcctgtagtgnactccattttgcccattaaaaagcaagatgancctattgatctctcaatgattgagatcatggagatgaaacataattctgaaactgatacaagcttaatcagagggcttgttttggaccacggagcacggcatcntgatatgaagaaaagggtggaggatgcatacatcctcacttgtaacgtgtcattagagtatgagaaaacagaagtgaattctggctttttttacaagagtgcagaagagagagaaaaactcgtgaaagctgaaagaaaattcattgaagatagggttaaaaaaataatagaactgaaaaggaaagtctgtggcgattcagataaaggatttgttgttattaatcaaaagggaattgaccccttttccttagatgctctttcaaaagaaggcatagtcgctctgcgcagagctaaaaggagaaatatggagaggtatccgagtaatttgacttttactcattttgcaagtgaattgggattatttctttttccttatactttatttttgggttttttcaactgtatagttaattggcattaactatattcacattgtgcaccccgtcagcactgtccatctctaggacttttttcatcatcacaaactgaaactgtatacccattaaatagttactccccatttctccctcccccttgccccttgtaaacattattttactttttgtttctgaattcaatatacttttttccaaagagctccccacaataaaaagcttttttaaaaaaaaaaaa

SEQ ID NO: 19389 - DNA, 2850 bp, Homo sapiens
  SIMILAR (97)..(1620): 531254mologous to Oryctolagus cuniculus chaperonin Cct6,accession number AF068483,Smith-Waterman Score=973.
  misc_feature (1)...(2850): n = a,t,c or g
ctggaagacccggatagttcctcccggccacgccgcgccggctctgggcactcagcatcgtttccttttcctccgctggagcagctatggcggcaggtgaagaccctgaaccccaaggccgaggtggcccgagcgcaggcggcgctggcggtcaacatcagcgcagcgcggggtctgcaggacgtgctaaggaccaacctggggcccaagggcaccatgaagatgctcgtttctggcgctggagacatcaaacttactaaaagacggcaatgtgcttgcttcaccgaaattgcaaatttcaacacccaacagcttccttaaatagcaaaggttagcaacaagccccaggaatgatataacttggttgatggtaccgacttcttaattgtcctaatcaattgggagagcttgctgaaacaggccggatctctacaatttctgaaggccttcatcctagaataatcacttgaaggattttgaaggtgcaaaggaaaaggcccttcagtttttggaagaagtcaaagtaagcagagagattggacagggaaacactttatagatgtggccagaacatctcttcgtactaaagttcatgctgaacttgcagatgtcttaacagaggctgtagtggactccattttggccattaaaaagcaagatgaaccctattgatctcttcatgattttgtgatcatggagatgaaacataaatctgaaactgatacaagcttaatcagagggcttgttttggaccacggagcacggcatcctgatatgaagaaaaggtgggngggatgcatacatcctcacttgtaacgtgtcattagagtatgagaaaacagaagtgaattctggcttttttttacaagagtgcagaagagagagaaaaactcgtgaaagctgaaagaaaattcattgaagatagagttaaaacaaataatagaactgaaaaggaaagtctgtggcgattcagataaaggatttgttgttattaatcaaaagggaattgaccccttttccttagatgctctttcaaaagaaggcatagtcgctctgcgcagagctaaaaggagaaatatggagaggctgactcttgcttgtggttgggggagcccctgaattcttttgacgacctaagtcctgactgctttgggacatgcaggacttgtatatgagtatacattgggagaaagagaagtttacctttattgagaaatgtaacaaaccctcgttctgtcacattattgatcaaaggaccaaataaggcacacacttcactcaggatccaaaggtggcagtgaggggacgggctttgaggggctgtccaaaaatgctattgatgatggctgtgtggttccagggtgctggtgccgtgggaagtgggcaatgggcaggaagccctggatttaaacataagcccagttgttaaagggccagggcacagcttgggagtcccaagcatttgcttgatgcatttgctcattatttccccaaggttctttgcttcaggaactctgggtttttgacctttcagggaaacattaagttaaaattcaaagcagaaccattcagaatcaggtccagcttgtgggtgtggacccttgaacaccaggtgagcccaattggtggccagccagaagtaaggccgtatggggataacctaattgtggtaaaagaaaacaagccttccttcaactccctgcacctggtgaattgcccacccaaccattcctcttgggttgatgaggatccatgccgagcttgggaatgtcctccccctgaaagggttgaaaattgaaagcctcccccctgtatcctgaatccttgaaagacctgccaaagtgatccctgagggatttacagcctgtggaatttttttgtcccaagccttcaaaataatttttggaaaagaaatttttcccataatgaaaaaaagcagagaacagctggcctcctgttgaaattttggaaagttctggaaattatagtaatttttaaaaaatttgcccctgaagtggtatacacaataaaagcaggctctttttatccaagtgaacaggatgttttgcctttagcagtcagtgacataaaattcccatgttagataagccatatgttacttaccctggtaattaaataattccttgaaaagccaatttttaatggtttaattttatgtgggacgtatgttcaaattatccaactacccctattgtttaagccatttggttttaaaatttttatgctaatattaaatgctcaagtaatttaaaattattgaaagccatccctggttgggtataaatttcctgagttaaatgccattgggatcagttgggactttggaacgcctttgaaaatgggcctttgctaaaaaatccccccgccacaaaagttgtcaggaaatggggaagaggagtccaacttaggaggccaagggaagttgaagaggagctgccaactgtaaaggggccaaggaacaggcagaggtaaaaaagatgatggaaggtggtggtgacctaagggcccacggttattgggtgaaatttgagattgtaggcccaactgtattttcaagcttctgaacttaggcaaaatattccatcgcaaagtctctagccgtcatatttttctcacccaaatttacgtttccacgagattatttatatatagttggtctatctctgccagtccttgaaggtgaaagttgtgtgttactaggctgtgttttgggatgtcagcagtggcctgaagtgagttgtgcaataaatgttaagttgaaaagaaaaaagataagagtcgccgagctaatccgtgagagggtatttatcggccggcggcggttcacgg

SEQ ID NO: 19390 - DNA, 618 bp, Homo sapiens
  SIMILAR (21)..(362): 1001254mologous to Homo sapiens HLA-A protein,accession number M64742,Smith-Waterman Score=600.
cgaggggcccgtcatggcgcccccgaaccctggtcctgctactctcgggggccctggccctgacccagacctgggcaggctcccactccatgaggtatttctccacatccgtgtcccggcccggccgcggggagccccgcttcatcgccgtgggctacgtggacgacacgcagttcgtgcggttcgacagcgacgccgcgagccagaggatggagccgcgggcgccgtggatagagcaggaggggccggagtattgggacgaggagacagggaaagtgaaggcccactcacagactgaccgagagaacctgcggatcgcgctccgctactacaaccagagcgaggccggttctcacaccctcttcccacgctgacctgtgctccctccccaatcatctttcctgttgcagagaggtggggctgaggtgtctccatctctgtctcaacttcatggtgcactgagctgtaacttcttccttccctattaaaattagaacctgagtataaatttactttctcaaattcttgccatgagaggttgatgagttaattaaaggagaagattcctaaaatttgagagacaaaataaatggaacacatgagaaccttccagagtcc

SEQ ID NO: 19391 - DNA, 178 bp, Homo sapiens; identical to SEQ ID NO: 7904
  SIMILAR (3)..(170): 1001254mologous to Homo sapiens MHC HLA-A24 cell surface glycoprotein,accession number M12758,Smith-Waterman Score=296.

SEQ ID NO: 19392 - DNA, 153 bp, Homo sapiens
  SIMILAR (3)..(98): 1001254mologous to Homo sapiens human leukocyte antigen- A*0104N,accession number Z97027,Smith-Waterman Score=171.
gctcccactccatgaggtatttcttcacatccgtgtcccggcccggccgcggggagccccgcttcatcgccgtgggctacgtggacgacacgcagttcactgaccgagcgaacctggggaccctgcgcggctactacaaccagagcgaggacg

SEQ ID NO: 19393 - DNA, 460 bp, Homo sapiens
  SIMILAR (7)..(351): 1001254mologous to Homo sapiens MHC HLA-A1 chain,accession number M24043,Smith-Waterman Score=609.
ccgaggatggccgtcatggcgccccgaaccctcctcctgctactctcgggggccctggccctgacccagacctgggcgggctcccactccatgaggtatttcttcacatccgtgtcccggcccggccgcggggagccccgcttcatcgccgtgggctacgtggacgacacgcagttcgtgcggttcgacagcgacgccgcgagccaaaaaatggagccgcgggcgccgtggatagagcaggaggggccggagtattgggaccaggagacacggaatatgaaggcccactcacagactgaccgagcgaacctggggaccctgcgcggctactacaaccagagcgaggacggtgagtgaccccggcccggggcgcaggtcacgacccctcatcccccacggacgggccaggtcgcccacagtctccgggtccgagatccaccccgaagccgcgggaccccga

SEQ ID NO: 19394 - DNA, 1682 bp, Homo sapiens
  SIMILAR (57)..(965): 441254mologous to Homo sapiens HLA-A*0204,accession number X57954,Smith-Waterman Score=416.
ccgggtcgacccacgcgtccgcgaggatggccgtcatggcgccccgaacccttcctcctgctactctcgggggccctggccctgacccagacctgggcgggctcccactccatgagggatttgcttcacatccgtgtcccggcccggccgcggggagccccgcttcatcgccgtgggctacgtggacgacacgcagttcgtgcggtttcgacagcgacgccgcgagccagaggatggagccgcgggcgcccgtggataagaagcaaggaagggtccggagtaattgggacgggggatacacggaaagtgaaggccccactcacagacttgacccgagcgaacctggggaccctgcgcggctactacaacccagagtgaggccggtttttcacaccattccagataatgtatggctgcgaacgtggggtcggacggggcgttttcttccgcgggttacccgcaagaacggcttacgaacggcaaggattacatcgccctgaacgaggaacttgcgctcttggaccgcggcggacatggcagctcagatcaccaagcgcaagtgggagactccgcccatgaggcggagaagtttgagagcctacctggatggcacgtgcgtggagtgggctccgcagatacctggagaacgggaaggagacgctgcagcgcaacggaccccccccaagacacatatgacccaccaccccatctcttgaccatgaaggccactctgaagatgctggggccctgggctttctacccctgcggagatcacacctgaccctggcagcgggatgggggaggaccagacccaaggacacggaagcttgttggagaccaggcctgcaggggctgggaaccttccagaagtgggcgtctatggtggtgccttctggacaggagcagagataacacctgaccatgtgcagcaatgaagggtcttgcccaagcccctcaccctgaagatggggagccatcttcccaagcccacccgtccccaatccgtggggcatcatttgctgggccctggttctcccttggaagcttgtgaatcactggaagctgtgggtcgctgctggtgatgttgaaggaaggaacagctcaggtggagaaggggtgaaagatagaaaaaggagggagcttactctcaaggctgcaaagccagtgaccagtgcccaggggcttctgatgtgtctcttcacagctttgtaaaagtgttgagacagcttgccttgtgtggggactgagaggcaagagtttgttccctgccctttcccttttgtgactttgaaggaaccctgacttttgtttcttgcaaagggcacctgcatgtgtcctgtgttcatggtaggcataaatgtgaggaaggtgggggagagcaccccccaaccccatgtccaccatggaccctctttcccacgctggacctgttgttccctccccaatcatcttttcctgttccaggagaaggtggggctgaggtgtctccatctctgtctcaacttcatgggtgcactggagctgtaaattcttcccttccctaattaaaaattagaacctgagtataaaatttaacttttctccaaatcctttgccatgaagagggttgatgaggtaaattaaaggagaagattcctaaaatttgagagacaaaattaatggaacgcatgagaaccttccag

SEQ ID NO: 19395 - DNA, 428 bp, Homo sapiens
  SIMILAR (1)..(300): 951254mologous to Homo sapiens ubiquinol-cytochrome c reductase core I protein,accession number L16842,Smith-Waterman Score=478.
ggggcacaagtgctattgcgcgcccgccgctcgccggccctgctgcggacgcaagccttgcggagtacggcaaccttcgctcaggcgctccagttcgtgccggagacgcaggttagcctgctggacaacggcctgcgtgtggcctccgagcagtcctctcagcccacttgcacggtgggagtgtggattgatgttggcagccgttttgagactgagaagaataatggggcaggctactttttggagcatctggctttcaagggaacaaagaatcggcctggctgcgcttctaggcgggaagcctatgtaagcaaaagggcagggccggggtttgtggtcccccccccaccacaaacacagcacttcggctcctttaacctgtgccacaggtgaccaccaataaaatcctctgctgagaaaaaaaaaaa

SEQ ID NO: 19396 - DNA, 355 bp, Homo sapiens
  SIMILAR (55)..(219): 1001254mologous to Homo sapiens ubiquinol-cytochrome c reductase core I protein,accession number L16842,Smith-Waterman Score=297.
ctgcgggagatgcaggagaatgatgcatctatgcgagatgtggtctttaactacctggctgaatgggaaagccggattgcggaggtggatgccagtgtggtacgtgagatctgctccaagtacatctatgaccagtgcccagcagtggctggatatggccccattgagcagctcccagactacaaccggatccgtagcggcatgttctggctgcgcttctaggcgggaagcctatgtaagcaagagggcagggccggggtttgtggtcccccctccaccacaaacacagcacttcggctcctctaacctgtgccacaggtgaccaccaataaaatcctctgctgagaaaaaaaaa

SEQ ID NO: 19397 - DNA, 500 bp, Homo sapiens
  SIMILAR (3)..(350): 991254mologous to Homo sapiens ubiquinol-cytochrome c reductase core I protein,accession number L16842,Smith-Waterman Score=608.
ccttcagcatctgctatgcagagacgggcttgctgggtgcacactttgtctgtgaccgaatgaaaatcgatgacatgatgttcgtcctgcaagggcagtggatgcgcctgtgtaccagtgccacggagagtgaggtggcccggggcaaaaacatcctcagaaatgccctggtatctcatctagatggcactactcctgtgtgtgaggacatcggacgcagcctcctgacctatggccgccgcatccccctggctgaatgggaaagccggattgcggaggtggatgccagtgtggtacgtgagatctgctccaagtacatctatgaccagtgcccagcagtggctggatgggaaagccggattgcggaggtggatgccagtgtggtacgtgagatctgctccaagtacatctatgaccagtgcccagcagtggctggatatggccccattgagcagctcccagactacaaccggatccgtagcggcatgttctggctgcgc

SEQ ID NO: 19398 - DNA, 444 bp, Homo sapiens
  SIMILAR (398)..(231): 961254mologous to Homo sapiens ubiquinol-cytochrome c reductase core I protein,accession number L16842,Smith-Waterman Score=282.
tttttttttctcagcagaggattttattggtggtcacctgtggcacaggttagaggagccgaagtgctgtgtttgtggtggtggggggaccacaaaccccggccctgccctcttgcttacataggcttcccgcctagaagcgcaccaggaacatgccgctacggatccggttgtagtctgggagctgctcaatgctctccacctccttctccagggcactgccaggccagattctttgttcccttgaaagccagatgctccaaaaagtagcctgccccattattcttctcagtctcagaacgggtgccaacatcaatccacactcccaccgtgcaagtgggctgagaggactgctcggaggccacacgcaggccgttgtccagcaggctaacctgcgttctccggcacgaactggagcgcctgagcaaaggtttgccgtactcg

SEQ ID NO: 19399 - DNA, 1665 bp, Homo sapiens
  SIMILAR (408)..(1208): 531254mologous to Bos taurus ubiquinol--cytochrome c reductase,accession number X59692,Smith-Waterman Score=601.
atggcggcgtccgtggtctgtcgggccgctaccgccggggcacaagtgctattgcgcgcccgccgctcgccggccctgctgcggacgccagccttgcggagtacggcaaccttcgctcaggcgctccagttcgtgccggagacgcaggttagcctgcttggacaacggcctgcgtgtggcctccgagcagtcctctcagcccacttgcacggtgggagtgtggattgatgttggcagccgttttgagacttgagaagaataatgggggcaggctactttttggaagcatctggctttcaagggaacaaagaatcggcctggcagtgccttggaagaaaggaggtggagagcatggggggcccatcttaatgcctacagcacccgggagcacacagcttactacatcaaggcgcttgccaaggaattgccgaaagcttgtggagctcctgggtgacattgtgcagaactgtagtctggaagacttcacagattgaggaaggaacgttgatgtgatcctgcgggaagatgcaggagaattgatgcatcctatgcgagatgtagtctgtaactacctgcatgccacagcattccaggggcacacctctagcccaggctttggaggggcccagtgagaatgtcaggaagctgtctcgtgcagacttgaccgagtacctcagcacacattaacaaggcccctcgaaatggtgctgggcagcagctgggagggagtgggagcaccagcaattgtttaggaccttcgcccaggaaggcacctcggtgggcatcccaatggacatatgcagaggacgctgtgcccactcttactccatgccgcttcactggcagtgagatcacgccaccgtgatgatgctctaccttttgcccacgtggccattgcagtagagggtcctggctgggccagcccggacaatgtggccttgcaagtggccaatgccatcagtcggccactgatgactgcactgtatggtggtggcgtgcacctgtccagcccactggcttcaggtgctgtggccaacaagctatgccagagtttccagaccttcagcatctgctatgcagagacgggcttgctgggtgcacactttgtctgtgaccgaatgaaaatcgatgacatgatgttcgtcctgcaagggcagtggatgcgcctgtgtaccagtgccacggagagtgacgcttgaccggggcaaaaacatcctcagaaatgccctggtatctcatctagatggcactactcctgtgtgtgaggacatcggacgcagcctcctgacctatggccgccgcatccccctggctgaatgggaaagccggattgcggaggtggatgccagtgtggtacgtgagatctgctccaagtacatctatgaccagtgcccagcagtggctggatatggccgttctcttggcctccccttccacctctgctcccgcactgctgctcagcttacagagcagccagttaaggccccaagcagctctccccagtcccctggctgccagggagttcttgctcagaaaacctgtcccagcagttccttgactgcctgccaaggtgccttcatcaataccctgcacccgtcaggccccattgagcagctcccagactacaaccggatccgtagcggcatgttctggctgcgcttctag

SEQ ID NO: 19400 - DNA, 1727 bp, Homo sapiens
  SIMILAR (136)..(1404): 451254mologous to Homo sapiens core I protein,accession number D26485,Smith-Waterman Score=611.
  misc_feature (1)...(1727): n = a,t,c or g
cgcccagtctacgcttgcgcggcgcaacagggccgactgcagctggaagatggcggcgtccgtggtctgtcgggccgctaccgccggggcacaagtgctattgcgcgcccgccgctgcgccggccctgctgcggacgccagccttgcggagtacggcaaccttcgctcaggcgctccagttccgtgccggagacgcaggttagccatnctggacaacggccctgcgtgtggccctccgagcagtcctctcagcccacttgcacggtggggagtgtggattgatgttggcagccgttttgagactgagaagaatgatngggggcaggctactttttggagcatctggctttcaagggaacaaagaatccggccttggcagtgccctgggagaaggaggtggagagcatgggggcccatctttaatgccttacagcacccgggagcacacagcttactacatccaaggcgctgtccaaggatctgccgaaagctgtgggagctctgggtgacattgtgcagaactgtagtctggaagactcacagattgagaaggaacgtgatgtgatcctgcgggagatgcaggagaatgatgcatctatgcgagatgtggtctttaactacctgcatgccacagcattccaggggcacacctctagcccaggctgtggaggggcccagtgagaatgtcaggaagctgtctactgcagactttacccgatacctgcagcacacattacaaggcccctgaaagtgtcctgccacagacggagggagtgcgcacagagcaactgttagacctcgtcccgcaaccaccgcgtgcacatcccttgcaacatatgcagagggagctttgctccactattactccatgccgcttcactggcagtgagatccgccacccgtaagattgctctaccttttgcccacggtggccatttgcagtagagggtcctggtttggccagccccggacaattgtggccttgcaagtgggcaatgcccatcatcggccactatgactgcacttttggggggtggcgtgcacctgtcccagcccactgggtttcaggtgcctgtgggccaacaaagctatgccagagttttcagaccctcagccatctgctatgcagaggacgggctttgctgggtgcacactttgttctgtgaccgaatgaaaaatcgatgacatgatgttcgtccttgcaagggccattggatgcgccttgtgtaccagtgcccacgagaagtgaggttggcccgggggcaaaaaaacatccctcagaaaatgcccctgggtatctcatcctaagatggcaactactccctgtgtgttgaggacattacccccgcagccctcctgaccctatgggcccgccgcaatccccctgggctgaaatgggaaagcccggattgccggaggtggattccaagttgtggtacggtgagatcttgctccaaggtacatttatggaccaagttgcccagcagtggcgtggatattggccccattgaagcatgctcccagactacaaccggattccgtagccggcatgtttctgggttgcgttttttagggcgggtaagcctatggttaagcaaaagggcaggggcgggggtttgtggtccccccccccaccacaaacacagcactttcggctcctcttaacctgttgccacaggttgaccaccgaataaaatcctctgctgagaaaaaaaaaaaaaaaaaaa

SEQ ID NO: 19401 - DNA, 422 bp, Homo sapiens
  SIMILAR (384)..(280): 1001254mologous to Homo sapiens cell surface glycoprotein,accession number M13560,Smith-Waterman Score=187.
agagaacccatgctctcttctgcttttcagaaggaggcggtgtgatgcaaggaaagttacaaactcctgctcttaaaggaaccccctcatttgacaagagagggagccggagcccagagcaggccaaagacttgctcaaaatctcccaaaaagtcaatgttagagtcagagcctgaatccctctttcctgtgactcccggccggtgcttcttcccagcacatgcgcacggctctgcagtccaggatcggtgtgccctttcctggtgctcacacatacctctccggggccccagggcgccggcccagcatgggcagttgctcattgttggagataaggtcgcgctggtcatccataactggcttctgatcttcccgacagctcctgcacgaaatcgtcgacccgggaattgcggtcccgaaca

SEQ ID NO: 19402 - DNA, 2166 bp, Homo sapiens
  SIMILAR (1126)..(1467): 481254mologous to Homo sapiens MHC Class II p41 specific region,accession number Y39883,Smith-Waterman Score=170.
  misc_feature (1)...(2166): n = a,t,c or g
cggatcagacttgactgttcccatacattcaccttcccacatttccagccctttggaaccctgaagatatcctcttctctgtcctgtcactctatgggacttacggctctttgttaaaatactatttaagcaaggcccctaagccactgccttgagagagaaatacttctcaactgaggcctctactgcataatgggtacagcatgggttaatcaactttggctgatttttcttttgttaagttgacttttgtttctaagggagcgtgtcaactaagaacctaaacagggaaggaaaggaaatgttttcacccctgcacgtcgtccaaacttcctcctgcgtgtttgagacgacataacggaggccagagaagaggacttgtctgagctcaccaagggtgcacagcccctttctgcacccactcatctgtggatgagaaaggggagacaaacaaaggtgtcttctgtttcaaagtgctttcctgtcttgggagtggacatttgcctttttcttgaaacattcaaagagccttatgaatccaaaggcctgcccagaaacaagtgatgagggccttgggccgccaatggggtcgtgctggcctttccaccttgcttggggagcccccccgccccacaccttgccccgcaaaaggcagttccaccaaagtggggtatttccagcctttgtagctttcacttccacatctaccaagtgggcggagtggccttctgtggacgaatcagattcctctccagcaccgactttaagaggcgagccggggggtcagggtcccttatgtctcaggaggagaagcatgagctgtccgggaagatcagaagccagatcatggatgaccatgcgcgaccttatctttatacaatgagcaactgcccatgctgggccggcgccctggggccccaggagagcaagtgcagccgcggacgcctgctacacagagcttttccatccctggttgactctgctcctcgctggccaggccaccaccggcntactttcctgttaccagcagcaaggggccggctgggacaaacttgacagtcaccgtcccaggaaccttgcagcttgggaggaaccttgcggcatggaagctttccccaagccttcccaaagccttgttgaagcaaagattgcgcaattggccacccccggcttgcttgattgcaaggccgcttgcccatggggagccccttgccccagggggcccattgcagaatgccaccaaagttattggcaacatgaacagaggaccatgttgatgcacctggctccagaaatgctgaacccccctgaaaggtgtacccgcccactgaaggggagctttcccggaagaacctgagacaccttaagaacaccatggagaccatagaatggaaggcttttgaaaactgggatgcaccattgggctcctgttttgaattgagcaagcaatccctttgggagcaaaaagcccacttgacgctccaccgaaaagaattcactggaactggaagacccctcttctgggctgggtgtgaccaagcaggatctgggcccagtccccatgtgagagcagcagaggcggtcttcaacatcctgccagccccacacagctacagctttcttgctcccttcagcccccagcccctcccccatctcccaccctgtacctcatcccatgagaccctggtgcctggctctttcgtcacccttggacaagacaaaccaagtcggaacagcagataacaatgcagcaaggccctgctgcccaatctccatctgtcaacaggggcgtgaggtcccaggaagtggccaaaagctagacagatccccgttcctgacatcacagcagcctccaacacaaggctccaagacctaggctcatggacgagatgggaaggcacagggagaagggataaccctacacccagaccccaggctggacatgctgactgtcctctcccctccagcctttggccttggcttttctagcctatttacctgcaggctgagccactctcttccctttccccagcatcactccccaaggaagagccaatgttttccacccataatcctttctgccgacccctagttccctctgctcagccaagcttgttatcagctttcagggccatggttcacattagaataaaaggtagtaattag

SEQ ID NO: 19403 - DNA, 1428 bp, Homo sapiens
  SIMILAR (610)..(1053): 981254mologous to Escherichia coli 100 pct identical to sp:YI5A_ECOLI,accession number AP002527,Smith-Waterman Score=731.
atggggtcccgggtccgccttagtaagcgccgggccaaggctggggttcagtcaggcaccaacgccctgcttgtggtcaaacatcgggacatgaatgagaaggaactggaagctcaggaggcacggaaggcccagctagaaaaccacgaaccggaggaggaagaggaagaggagattagacagccgagaaagaagctgggggctcagccggtggtgcactgggtggcacctgatgggcggctgctggggaactccagccggacccgggtccggggggacgggacgctggatgtgaccatcaccaccttgagggacagtggcaccttcacttgtatcgcctccaatgctgctggggaagcgacggcgcccgtggagcccagaggcctgtgcccggactacgcatgtaccaggttcagtacaacagttccgttgatgactccctcgtctacaggggttgatatagaagcagctcgaaaggaagaagaacggatcatgcttagagatgccaggcagtggctaaatagtggtcatataaatgatgtccggcatgcaaaatctggaggtacagcacttcacgttgcagctgctaaaggctatacggaagttttaaagatcatctctttacgttttggtgtcccccgaacccaggtcaggacatgggttgccctctatgaaaaacatggagaaaaaggtttaattcccaaacctaaaggcgttagtgctgatccagagttgcgtattaaggtcgtgaaagctgtgatcgagcagcacatgtcccttaatcaggctgctgctcactttatgcttgctggtagtggttctgtagccaggtggctgaaggtctatgaagagcgcggagaagctggtttacgcgcgctcaagattggcaccaaaagaaacattgcaatatcagttgatccagaaaaagcggcatcagcattggagctgtcaaaagaccgacgcattgaggatcttgaaaggcaagttcgatttcttgaaacgcggcttatgtatctaaaaaagctgaaagccttagctcatcccacgaaaaaggctgcggagataccgcgcagtacgttttattatcatctaaaggctctcagcaagcctgacaagtatgcggacgttaaaaagcgtattagtgagatttatcacgagaatagaggccgatacggataccgtagggtaacgctgtctcttcatcgagaagggaaacagattaaccataaagctgttcagcgcctgatgggaaccctctcacataaagcagcgattaaggtcaagcgataccgctcttacagaggagagatgaagaaactgagaatcagagaggttcagatacttgctggaggtcacacagctaagttgaatatggagcaagtgaaatctgcagatgctttcacgtatattaagcagccaattgcttaa

SEQ ID NO: 19404 - DNA, 2294 bp, Homo sapiens
  SIMILAR (1461)..(1877): 421254mologous to Homo sapiens Human hh00149 protein SEQ ID NO:4,accession number B12448,Smith-Waterman Score=235.
atggcgcggagcgaggcagcggcggcggggccgggcccgggcccccccgggctggcggcccgggagcggcggggggggcgcgggtgtgtgcgcgggtgtgagcgtgcgagcgtgcgagtgtggtccgtggcgctgcggcgggcccggcgtgcgcccgcgcggccctatgtggcccggtgccggcgtgtgcggcgccctgcccgtgtggccatcgggtgtggcggggtgtcgagcccggccggcgtgtccggctgtgcacgcgtgtcccccgagcggccgcccctccggctgtgtgtctgggcgctgtcgcgcgcccatggaggggctgtgtgcagggctggcccaggccctgactccctgaagagaggtctcacctcccaccctcctgccttcccactgcaccatggctccaggacccttctcctcggccctctctcgccgccgcccgctgccctgccctttctgctgctgctctgggcggggcatctcgtggccagccctgccccggccgctgcatctgccagaacgtgcgcccacactgacaatgctgtgcgccaagaccggcttgctctttgtgcccccgccatcgaccggcgcgtggtggagctgcggctcaccgacaacttcacgccgccacttcgccaacatgaccagcctggtgcactcactctctcccggaacaccatcggccaggtggcagctggcgccttcgcgacctgcgtgccctccgggccctgcacctggacagcaaccgcctggcggggtgcgcggcgaccagctccgcggcctgggcaacctccgccacctgatcttggaaacaaccagatccgccgggtggagtcggcggcctttgacgccttctgtccaccgtggaggacctggatctgtcctacaacaacctggaggcccgccgtgggaggcggtgggccagatggtgaacctaaacaccctcacgctgaccacaacctcatcgaccacatcgcggaggggaccttcgtgcagcttcaaagctgggcaccgggcccaagccgcccacccgctgaccgtcagcttcggcggcaaccccctgcactgcaactgcgagctctctggctgcggcggctgacccgcgaggacgacttagagacctgcgccagcccgaacacctcaccgaccgctacttctggtccatccccgaggaggagtcctgtaccaggtgccaacgattctgcggctgagcgtcgctcgtggcagccgagctcacctcgaactccgtgctcatccgctggccacccagaggcctgtgcccggaatacgcatgtaccaggttcagtacaacagtccgttgatgactccctcgtctacagaaaatattcgctgagcacctacatgaacccgaccagggatgatcccgtccaccagtcagacctttctggtgaatgacctggcggcgggccgtgcctacgacttgtgcgtgctgggcggtctacgacgacggggccacagcgctgccggcaacgcgagtggtgggctgtgtacagttcaccaccgctggggatccggcgccctgccgcccgctgagggcccatttcttgggcggcaccatgatcatcgccatcgggggcgtcatcgtcgcctcggtcctcgtcttcatcgttctgctcatgatccgctataaggtgtatggcgacggggacagccgccgcgtcaagggctccaggtcgctcccgcgggtcagccacgtgtgctcgcagaccaacggcgcaggcacaggcgcggcacaggccccggccctgccggcccaggaccactacgaggcgctgcgcgaggtggagtcccaggctgcccccgccgtcgccgtcgaggccaaggccatggaggccgagacggcatccgcggagccggaggtggtccttggacgttctctgggcggctcggccacctcgctgtgcctgctgccatccgaggaaacttccggggaggagtctcgggccgcggtgggccctcgaaggagccgatccggcgccctggagccaccaacctcggcgccccctactctagctctagttcctgggggagccgcggcccggccgaggccgcagcagcgctattcgttcgacggggactacggggcactattccagagccacagttacccgcgccgcgcccggcggacaaagcgccaccggtccacgccgcacctggacggggctggagggggcgcggccggggaggatggagacctggggctgggctccgccagggcgtgcctggctttcaccagcaccgagtggatgctggagagtaccgtgtga

SEQ ID NO: 19405 - DNA, 408 bp, Homo sapiens
  SIMILAR (162)..(254): 581254mologous to Homo sapiens Similar to TCF3 (E2A) fusion partner (in childhood Leukemia),accession number BC001728,Smith- Waterman Score=88.
taagacttatcaaacatttgtattcaagcaaacaaacacaaaacctcttaaaacggcacgttacaatcaaaggtatttatcgcccctcccctccagggcagggggggagcaggagaagagtgggagcgcacccggacacaaggcgatcagtgccgctgggtctctcccctgcccgccctctccacctgcccccagagcttggcccacctgcgggtggagaagggccttcgcaccgtcggtctccccgcattccaagtaagtagcagcttccaaagttgtgcgccctaatcgccctcttcttgccactttctgctgagttcagagtctgggcgctctcctccgactgccaggcatgaggactttcagagggcgagggagaaaccggtcgcttctttccgaaaggccgaa

SEQ ID NO: 19406 - DNA, 2323 bp, Homo sapiens
  SIMILAR (1407)..(1189): 1001254mologous to Homo sapiens Reprimo,accession number AB043585,Smith-Waterman Score=371.
  misc_feature (1)...(2323): n = a,t,c or g
gcacgaggtgaaatataaaatattcacgataagaggaaacaaaggatgctgcctccaggacggctactgtgcctgaggctgggctccttctcagtcatcccagggcctctccgtctggccccaccctcgcccctccaggggatccacaagttgaatcgcagctctccagggttaattgccctggccgggagccagactcctcaccgccgccccgttcccccctgctggggagcgcagaatgaccaccaggaggccaggaacaaaacgcttaaatgttgcatttattaaggaaatgttaaataagaaaaaaacaaaaagtcaaaacggtgtcacggatgtcaagagcacttttgtggcgtaaaccgtgcagtcacgagctacgagttctattctgggtctttgtcccagggccagcaggaacgctagacgcctcccaaaagacccagtgggaaatgcactaaaagaaacaactcaccccgttcaaattcgcagggtcccccctccccccaccccctttctttcccacaaatgaaaaaaactgtaactcctcagggcagggcaaacaggccactgggggcaggaaaaagacttnattcaaacatttgtatttcaaggcaaacaaacacaaaaccttttttaaaacgggcacgtttacaattcaaaggtattttattcgcccctcccttccgggggcagggggggagcagggagaagagtggggagcgcacccggacacggatttgtgagaccccatgagtctgctgcgtggcttttaacaggtcactcttccggtcacaaggcgatcagtgccgctgggtctctcccctgcccgccctctccacctgcccccagagcttggcccacctgcgggtggagaagggccttcgcaccgtcggtctccccgcattccaagtaagtagcagcttccaaagttctgcgccctaatcgccctcttcttgccactttctgctgagttcagagtctgggcgctctcctccgactgccaggcatgaggactttcagagggcgagggagaaaccggtcgcttctttccgaaaggccgaagtcgagagaaataattgactccgacaggtttgcttcgcccagtctctgatagtgaggggcacaaccgggctagcaaagtgggcaggcgtgggagcggttgccgcgggggcatagggcgggtcagtagggccccacgaccaccgcctccacctccttagacggcctccggtccttcacgaggaagttgatcatgccctcggacttgatgagcagattgcagccgaggaagaagatgccgaagaccacggtgagtgagagcacgcacatgaccgcgatctgcaccacgcgcattatgtacaggctacgctcgtccgggcctccctccgcgaagccgtcgtcggttcacccacggacgcctggttgcagcagcgcacggctcgctccagcgcctcgctgctgttggccaggaacaggcccgccacgtccgtctggttgcctagggccggattcatcgcaggaacgggcgggcgccgcgagcggcgcgggtccgaggggtgggaaggcggcggcgctggaggaacaggtgccgggctgagcgctcactcgcagactagcgcgtgcgagggctccattgctctgctttcgaaagtccctgggccgtgggagtttcccaggagcctctccgacgcgcgcagcagctaggctcttctaaagccgtccgctccagccctggtggtgctcgttcccggcgctcgctcgagggggggctgttggaacttggcggggctggaccagcccggccgtgggaggtgcgggccgcggcggctgcagcggcggggtggctgcgctgagcaaacagcggccccttccggccgagccgccgcgctgccgtgctcttctgctgaatatatcttgtgcccactgggcttgttccgcccttgaaggctggcaggctgtgcttggctaacgctattggcccagatcccatacttgccaagggcgagccaggcgcagagcagctaggggtatgtaggcgagtgagcacggggtccagccactttgcacagccaggcatgctggctgctgtggtggggcgggcagctacaggtgctggtacaggtgccacttctgtgtgaggctgtggctggaccagatgtaccatgtgtggcttcctctgcgggcacccacatctggaactgacagcctgctccccatgcttcaggccgtcactggcttgaaggtgggatttcactggggacctgcccctttccacccaggagcctgtctgcctcctgccaccatcagtcatgtcgtccat

SEQ ID NO: 19407 - DNA, 447 bp, Homo sapiens
  SIMILAR (252)..(446): 961254mologous to Mus sp. LMW G-protein,accession number S72304,Smith-Waterman Score=338.
tcgacccacgcgtccgcaattcggctggcgtctccgagaccgcggactcccgtatggtccccgtggccccgagttgtagtcgggacaccccggccgcgggtgatcgtcgggtctccacgcgcccgggtcgctgacgcggatccggcctcggcgccttctcagggcgccctgcaaggccgcaggcaggatgaacattctggcacccgtgcggagggatcgcgtcctggcggagctgccccagatttaagatctccaaggtcattgtggtgggggacctgtcggtggggaagacttgcctcattaataggttctgcaaagacacctttgataagaattacaaggccaccattggagtggacttcgagatggaacgatttgaggtgctgggcattcccttcagtttgcagctatgggataccgctgggcatgagaggttcaaatgcattg

SEQ ID NO: 19408 - DNA, 594 bp, Homo sapiens
  SIMILAR (148)..(534): 911254mologous to Mus sp. LMW G-protein,accession number S72304,Smith-Waterman Score=624.
atgaacattctggcacccgtgcggagggatcgcgtcctggcggagctgccccagtgcctgaggaaggaggccgctttgcacgggcacaaagacttccacccccgcgtcacctgcgcctgccaggagcaccggacaggcaccgtggggttctgcaaagacacctttgataagaattacaaggccaccattggagtggacttcgagatggaacgatttgaggtgctgggcattcccttcagtttgcagctttgggataccgctgggcaggagaggttcaaatgcattgcatcaacctactatagaggagctcaagccatcatcattgtcttcaacctgaatgatgtggcatctctggaacataccaagcagtggctggccgatgccctgaaggagaatgacccttccagtgtgcttctcttccttgtaggttccaagaaggatctgagttatgcgctgatggagaaagacgccctccaggtggcccaggagatgaaggctgagtactgggcagtctcatctctcactggcatcaacagtgatgacagcaacctctacctaactgccagcaagaagaagcccacatgttgcccatga

SEQ ID NO: 19409 - DNA, 421 bp, Homo sapiens
  SIMILAR (320)..(421): 671254mologous to Homo sapiens small GTP-binding protein Rab36,accession number AB023061,Smith-Waterman Score=118.
cccacgcgtccgccagatgctgcgcagcagactccgattccccatcaccaattcgggtggcgtctccgagaccgcggactcccgtaagggccccgtggccccgagttgtagtcgggacaccccggccgcgggtgatcgtcgggtctccacacgcccgggtcgctgacgcggatccggcctcggtgccttgtcaaggcgccctgcaaggccgcaggcaggatgaacattctggcacccgtgcggagggatcgagtcctggcggatctgccccagtgcctgaggaaggaggccgctttgcacgggacaaagacttccaccccgcgtcacctgcgcctgccaggagcaccggacaggcaccgtgggatttaagatctccaaggtcattgtggtgggggacctgtcggtggggaagacttgcctc

SEQ ID NO: 19410 - DNA, 512 bp, Homo sapiens
  SIMILAR (246)..(512): 751254mologous to Bos taurus GTP-binding protein rah,accession number AF058807,Smith-Waterman Score=315.
ggaattcgggctgtttctgccactcttccagccatcatcattgtcttcaacctgaatgatgtggtatctctggaacataccaagtaagtgagcatcctgcaatataatgggaggctccgggaagagagggttcagaacagaggggtggtcaggaagaagaagaatgcatgtaggaccagagagggggtaattgggcctatgaatgtcagtgggaggggccctgcagactcactcatcccttactttccacctcccatggcaggcagtggctggccgatgccctgaaggagaatgacccttccagtgtgcttctcttccttgtaggttccaagaaggatctgagtgtgagtgtgccagtggggggacttcccagcttggtgagggaatgcccccctctgactctggccttccctcagacccctgctcagtatgcgctgatggagaaagacgccctccacgtggcccaggagatgaatgctgagaactgggcagtctcatctctcactggggag

SEQ ID NO: 19411 - DNA, 1817 bp, Homo sapiens
  SIMILAR (796)..(1080): 661254mologous to Bos taurus GTP-binding protein rah,accession number AF058807,Smith-Waterman Score=279.
cccacgcgtacgggagtgggactcgaggtcctgtaactggactgggcccctcgccccctcctccagcggtctgcgggccttggcagcgccgcccctgcccacactgaccccgtgtggcggggccgttccgcgcccccgggccgctatgtaatggtaggagagcctaagccccgagatgacgtctggtcttcgcggccccgggatattgtaggaaccatgcggccccgcgtaatgcgatgaactatccggccccgcgtaatcgtagggtctgcgcgggcccggcccccaccagacgggactccccgcccccaattggcggccgaagaagtctcctcgccccagaagtcatcttcgggacgcccagggcccgggtgattttgggctcgccgcggccccgggtgattgtttcatctccgtggcccgcggtggtcgtaacgtctccgaagaccgcggactccccgtaaggtccccgtggccccgaagttgtaagtcgggacaccccggcccgcgggtgactcgtcgggtctccactgcgcccgggtcgctgacgcggatccggcctcggcgccttctcagggcgccctgcaagggcgcaggcaggatgaacattctggcacccgtgcggagggatcgcgtcctggcggagctgccccagtgcctgaggaaggaaggccgctttgcacgggcacaaagacttccacccccgcgtcacctgcgcctgccaggagcaccggacaggcaccgtgggcagatttaagatctccaaggtcattgtggtgggggacctgtcggtggggaagacttgcctcaataataggtttttgcaagaacacctttgataaaaattatttaggccaccattggagtggacttcgagatggaacgatttgaggtgctgggcattcccttccagtttgcagctttgggataccgctgggcaaggagaggttcaaatgcattgcatcaacctactatagaggagctcaagccatcatcattgtcttcaacctgaatgatgtggcatctctggaacataccaagcagtggctggccgatgccctgaaggagaatgacccttccaggtgtgcttctcttcccttgtaggttcccagaaggatctgagtaccctggctcagtatgcgctgatggagaaagacgccctccaggtgggcccaggagatgaaggctgagtactgggcagtctcatctctcactggtgagaatgtccgagaattcttcttcccgtgtggcagcactgaacctttgaggccaatgtgctggctgaagctggagaaaatcggggggctcgaacgcattggggaatgttgtccgcattcaacaagtgattgaccagcaacctctaccttaaattgccagcaagaaagaagccccacatgtttccccatggagggctggaggaagactgttcaagagaactgccccaagcccttagggcaacttgtggccacccttcatttccttccagagcttgaacccctgggacatttgcactgacttttattccagaccaaaagagctggcctcttgggtgggcagttatttcccacagaggggttagctggggatcatgttagtcacttccttgcccccaaggcacccgtgccaaagacttgatgccccctaatttcttagggggactgttccaggggcgcccagtggtagtgagggagagtgtctctgttcttttgctcagcctgctgggccctttgtgtttgaggatgcttaatgattccagcctctcactgtgccttatgcattaaaatttctttgttacgagcaaaaaaaaaaaaaaaaaa

SEQ ID NO: 19412 - DNA, 1623 bp, Homo sapiens
  SIMILAR (214)..(1347): 871254mologous to Homo sapiens tripartite motif protein TRIM31 alpha,accession number AF230386,Smith-Waterman Score=1666.
atgggggcaaaggatggccgtctactcagtgagtcctcacaaggtctttcctcatgtggagcatccctggtgcccttctgtgtgtccaaatctcgtcttcttatgaagacgccagtcagattagacaaagaaacagtatccacagtggactccggggctcctacagacttggcacagcttcctacagtcttgaaacagccctgttgttctgtcatggccagtgggcagtttgtgaacaaactgcaagaggaagtgatctgccccatctgcctggacattctgcagaaacctgtcaccattgactgtgggcacaatttctgcctcaaatgcatcactcagattggggaaacatcatgtggatttttcaaatgtcccctctgcaaaacttccgtaaggaagaacgcaatcaggttcaactcgctgttgcggaatctggtggagaaaatccaagctctacaagcctctgaggtgcagtccaaaaggaaagaggctacatgcccgaggcaccaggagatgttccattatttctgcgaggatgatgggaagttcctctgttttgtgtgtcgtgaatccaaggaccacaaatcccataatgtcagcttgatcgaagaagctgcccagaattatcaggggcagattcaagagcagatccaagtcttgcagcaaaaggagaaggagacagtacaagtgaaggcacaaggtgtacacagggtcgatgtcttcacggaccaggtagaacatgagaagcaaaggatcctcacagaatttgaactcctgcatcaagtcctagaggaggagaagaatttcctgctatcacggatttactggctgggtcatgagggaacggaagcagggaaacactatgttgcctccactgagccacagttgaacgatctcaagaagctcattgattccctgaagaccaagcagaacatgccacccaggcagctgctggaggatatcaaagtcgtcttgtgcagaagtgaagagtttcagtttctcaacccaacccctgttcctctggaactggagaaaaaactcagtgaagcaaaatcaagacatgactccatcacagggagcctgaaaaaattcaaagaccaactccaggctgataggaaaaaagatgaaaacagattcttcaaaagcatgaataaaaatgacatgaagagctgcggcagaactacatcggggccaccaaatcaccactcttcagccccatcccactccctgtttcgggcctcgtctgctgggaaagtcacttttccagtatgtctcctggcctcttatgatgagatttctggtcaaggagcgagctctcaggatacgaagacatttgacgttgcgctgtccgaggagctccatgcggcactgacctcggcccacccggatctcatcctttcccaggatgagatagtgacgctgaacctcgcatcccagggcggttcgcagaagcggggcaacccccgacgcttctacaggcggggcttcctggaggtggagcccttgaccggcttcgtggagctgcacagcagcggctcccagtgccaggcgctcatcgagagcggttcccgcgaggatctcccggtctgtccgaacaaagtgggcgtccgcgtggattactag

SEQ ID NO: 19413 - DNA, 583 bp, Homo sapiens
  SIMILAR (236)..(331): 931254mologous to Homo sapiens platelet factor 4,accession number M25897,Smith-Waterman Score=146.
atgtctgcacttaatgagcgtctaaagaatcctgaaaattcagaacccaagtcttcccagtactatcttagtttccgcaccgcagttcctcggtgtccacttcaggcttccggactggaaggacagccgggaataaaacgtgccggcgaggctcaggagtcattggccacagagacccagcccgagtttcccatcgcactgagcactgagatcctgctggaagctctgccgcagcatgagctccgcagccgggttctgcgcctcacgccccgggctgctgttcctggggttgctgctcctgccacttgtggtcgccttcgccagcgggaaaccttgcataccctggaggcccaccccatagcttctgcactggcagactcatgcctgactggtgaagagatccagcagagcagcccctacagccacacaccagcctgcattctccctccccatactgaagcttcccccacatccattgctactccccacattgctttgctggtgtctgcctgcaggtggcagattttgctttccttgtcctgccagcgcacaggaatacatgcggtcctcacccctcccaatg

SEQ ID NO: 19414 - DNA, 625 bp, Homo sapiens
  SIMILAR (199)..(453): 481254mologous to Homo sapiens Platelet factor 4 fused to lambda N gene,accession number R42639,Smith-Waterman Score=126.
  misc_feature (1)...(625): n = a,t,c or g
gcaccgcagttcctcggtgtccacttcaggcttccggactggaaggacagccgggaataaaacgtgccggcgagnttcaggagtcattggccacagagacccagcccgagtttcccatcgcgactgagcactgagatcctgctggaagctctgccgccagcatgagctccgcagccgggttatgcgccctcacgccccccggctgttgtccctggggttgctgctcctgccacttgtggtcgcctttcgccagcgctgaagctgcaagaagatggggacctgcagtgcctgtgtgtgaagaccaccctcccagggtccgtcccagggcacattcaccagctgggaggttgattcaagggccgggacccccactgccccacttgcccaacttgataagccacggtggaaggaatgggaagaaaaattttgcttgggacctggcaagccccgctgttacaaggaaaataatttaaggaaactttttgggagagtttagctaattagctggcctacgtgttgtgcatttgctatatagcatacttcttttttccagtttcaatctaactgtgaaagaaacttctgatatttgtgttatccttatgattttaaataaacaaaataaatc

SEQ ID NO: 19415 - DNA, 468 bp, Homo sapiens; identical to SEQ ID NO: 18797
  SIMILAR (195)..(467): 1001254mologous to Homo sapiens Nascent polypeptide associated complex alpha subunit,accession number X80909,Smith- Waterman Score=438.
  misc_feature (1)...(468): n = a,t,c or g

SEQ ID NO: 19416 - DNA, 628 bp, Homo sapiens
  SIMILAR (421)..(119): 1001254mologous to Mus musculus alpha-NAC, muscle-specific form gp220,accession number U48363,Smith-Waterman Score=487.
tttttttttttttccaacaagaagccataactttatttatgatagaaacagtacaaatttcaaaccaagctgcagttactcctttgagacaccaaaaaaagttgcttccatatggttacattgttaattccataatcgcatttacaatatcattactgttgttcttcagggctcggactgcctttgctctcgacacatttgcttgtgacatgaccaattctatgtccttaacttctacacctgtttcatcgacctcttcctcttcactctcctcttgtacagttggagtctgtgtgttttcttgaatgtttgagacagcttcaccttgaactttgaatttctcagcagctgctagttgtgcttgctgggataaatcttcgatcttggcttccccaaaaactatgtaagtatctgaagcaggatgtcctcacagcgctggacctgagtgtcgaggtgcctgagttctgccccttcgtggaccacttggtagtagcgctggaggaagagggaccagccctcgggggtgaggtacagcggggcctccaggtccttgtcgatgtccatgtgggccaagttgctaaggtactcctagcacgcacacagagcttcatccacaaactctggggac

SEQ ID NO: 19417 - DNA, 1359 bp, Homo sapiens
  SIMILAR (330)..(992): 401254mologous to Homo sapiens Nascent polypeptide associated complex alpha subunit,accession number X80909,Smith-Waterman Score =210.
ggcacagtaagtactttctgtgccgctactgtctatccgcaggcatccgcctttctttcgggctaagccgccccggggactgaaagttaaggagagttgttggctttactgggccacagggttcctactcgcccctgggcctccggacaaaaaggggtctgcggttggtgtcctggcaaaagcacgttacaagggctgaggtgcgggcccacaatccgagcctgcagagatgggagcagttgcagtgttgagggcggaagaggagtgcgtcttgttttgggaactgcttcacaggatccagaaaaggaaatgcccggcgaagccacagaacccgtccctgcttacagagcagggagttgccgccagccccagggctgagacaggttctgggacagaatctgaccagtgatgaatcagtaccagagccttgaagaacaggattcccacccagggcaaccacacaacaaagcccaagctggccggcagcagtctgaaattgatgaggacccagtcagttaaggcaaaacagagtcggaattgaaaagaaggccccggaagggctatgtcccaaactggggtcttcggccaggttacaggagttaccaaggaattcactatcccggaaatctaagaatatcctcctttgtcatccaccaaaaccagatgtctaccaaggagcccctgcttccagatactttaccatagtttttgggggaagcccaagatcggaagatttatcccccagcaagcacaacctagccagctgcctgagaaattcaaagttccaaggtgaagctgtctcaaacattcaagaaaacacacaggactccaactgtacaagaggagagttgaagaggaagaggtccgatgaaaccaggtgtagaagttaaggacatagaatttggtcatgtcacaagcaaatgtgtccgagagcaaaggcagtcccgagccctgaagaacgaacgagtaatgatattgtaaatgcgattatggtaagtgttcaagcctttgttccttgactccctctgccctgaccaattatgagtgactttattttgtcttgctaaatatcagccaattaaggaacctcattccagagcctcttttgagttgccgtataggttttagtggcctaaattctcctgatttgcctgtaagagttttagtgacctgaattctcctgatttgcctataagaaccgctaattatcttttctctgttacaggaattaacaatgtaaccatatggaagcaactttttttggtgtctcaaaggagtaactgcagcttggtttgaaatttgtactgtttctatcataaataaagttatggcttcttgttggatgaaaaaaaaaaaaaa

SEQ ID NO: 19418 - DNA, 528 bp, Homo sapiens
  SIMILAR (323)..(39): 981254mologous to Homo sapiens unnamed protein product,accession number AK024693,Smith-Waterman Score=495.
atgtggggccacttccattcccacccgggcacaggtcaggcacgggcatacaccgacactagtgggtctccgatccctctgatcatgcatgtcaaccggggcaggcactctgaaattcccgttttggagaggaatttgttacatttcaggatggatgcctccacgtaaaatcttggaatgagttccctgatggaggcaatcttgaaaaaccaatttaggcatgtttccttggccgtgtcatttgcattctctggagaaaagtgatctggtaagacgctgcggctatccacacacatggaaaagatgcgctcgtacacgagctcttcctggatgactatttttagagccttcactttctggtctgaggcccaggcatccttcagcgattggttgagctcctctatgcggttcacgtaatcctgctgagtcaagttcaacagctccttttgggaaccctcctcaaagtcatccagctcctccagccgggtccgcaccttctctgacattgccaatgtggcagtcccagct

SEQ ID NO: 19419 - DNA, 442 bp, Homo sapiens
  SIMILAR (2)..(217): 331254mologous to Homo sapiens Human semaphorin W partial sequence,accession number W51315,Smith-Waterman Score=77.
ctctcccactccctgtattccacaaatgacttgctcacctcctcaaagtcatccagctcctccagccgggtccgcaccttctctgacattgccaatgtggcagtcccagctttgcctaaacagaatgaatttacgtcacacaggtggcttttctcgtgcaccaatacccccagtggaggcatctttcactctacacttcatcgtgaataaagacacaagggaatgattccattatagaaaactatcccagattttcaaagcaacttccttatgtaaccagaattccatcgaaacatttcccacttagaagctgcccctggtgacccagtgggccagcctcaaagaggttaaccgctgcatttgagatttacaaactttgctctgtatcatctgtttattcctaaagaaaggcagtccagataaggatgccaaaaatcaaaaa

SEQ ID NO: 19420 - DNA, 2185 bp, Homo sapiens
  SIMILAR (1710)..(298): 801254mologous to Homo sapiens unnamed protein product,accession number AK024693,Smith-Waterman Score=1809.
tcactctccaattggcccagaatgcccttgggagaggcactggttggccaaggccacctgaccagaatgcaggtagagattgagacgtgtgaagatgcccgccagggaggggatggtgatgaagcagtaggcaacacaggcatgaatcaactgcacaagaacaggctccagattgcaaaacatcgacctggactcaacataaaaactcagctgttgttcaaaatcacggccaaaggaaaccatttttataaatccattaatcaaatatgacagcattcttttctcatcctcaagagtgagtgcattcacagagtcatgcatggtcttgcaaacatgcaaaagggcattcaagatgaccgggtccttggtgggctcttgttgatgcttgataaaggcgtccatgatgcatttgcaaacctccacccgcacactctctttttggaacatgtccagaaacggcagaaatttttcctgggggtaggaatcttcaaatgcacgatctggagtcatgtgcttgatgacatctgccaaaacggtattcacctctcgtttcgtgaaatgcttgcaggtgtattccacccacacttcggcacaattaatgtagtcctgtgggttcttcagcttagtgatgactttccaagcttcgttgagaatctgaagtcggtcactctcaggaggatcagccaaggccaagtttaatcccagtgatcgaaaaagaagatgcttggggaaaccagattcatcacactctttaatcatgccaatgaaatccatagaccttgtggcgatgaactcagcccggaaggcagacatcacagaattcaacagcaaggcattgtttcctagtttcttacacctttccatcatctcggtcagcagagcctcgggggcatggtaggagatgcactggaagatccagtccatggcaggcgggtacaaggggaggtaagatgggagctccactccttggaccaccagctggttctggaccgtatccccatgaatctgtttgaacgtaaggaggaagtcaaaaaagttcttatttagggtttctttgagatgtggggccacttccattcccacccggcacaggtaggcacgggcatacaccgacactagtgggtctccgatccctctgatcatgcatgtcaaccggggcaggcactctgaaattccccgtcttttacttgtactgactctttgaaatccggtgtcttttttaatagttacgtcacatctcaatttggactggccacatctcaagtgctcaagagcaacacgtggccagtggctgctgtactggacaatgtagatgcagcacccaggaacagctgcgacattacctggtaagacgctgcggctatccacacacatggaaaagatgcgctcgtacacgagctttccaaatgtatcaagtatgtcggtgataaggacaaatttgcttgggtagaactgaataacactggtgtctgaaagaagctttgaacactggatgactatttttagagccttcactttctggtctgaggcccaggcatccttcagcgattggttgagctcctctatgcggttcacgtaatcctgctgagtcaagttcaacagctccttttgggaaccctcctcaaagtcatacagctcctccagccgggtcagcactttctctgacattgccaatgtggcagtcccagctttgcctttttcagatcccataaacagattaatagacagcttttcggtagtggtgtaccgggcaaggatttctccccgtttgttggtccaaggctcaaaatccgatcctacaacggagttatcatctctatcacgtttccttctggagctgtccatggcagctgccaaggctgcggggtcagcagtggctgcaaacatggagagggggtcagtcccatcgaggacgatgctcagcgggtccacctcggagctggagcaggaggaggacgtggaagaagtgcttcctttaaaggaacactttctttgtctttgactctgtgaccctacgtagctcttcatctggctgttcatctgtattctttgtaatatccttaataataaaagttatgggtttcagagggtgatagtccccaaactccaatggtacagcctccagtcggcatgatgcaaattcagctttgtagttcctattcctggagtgcctccgtttcctcat

SEQ ID NO: 19421 - DNA, 1752 bp, Homo sapiens
  SIMILAR (1025)..(1339): 401254mologous to Mus musculus T2,accession number X67863,Smith-Waterman Score=158.
atgacggctcggagccagctcattaaaggcaatggtgtgaataatataactatgttgcttttgaaagaaccgaatatgtattatccacctatcagtgcaccaaagcagcgtcataaacatagatctctaactgcagcccatttaaatgatgaaaggggttcattcagagccggtgtgattgaccgtctacctgaatgcgggaattcacggttcagaccccgtgcccgggcggtcggatacccgttacaggtaatgtccagacagagtacaggcgcgacacggggcccccaggccagaaaaagccaagacaacctccgaaacacggatccgactgacaaactacacccctacgatgtgacctttgcaccacctcgacgccccagcgacgacacgacgcccacccacgcacaacaaacaccactcaccctcccgcccatgcaccaccccccgcgcccagccacccagacgaagcgaatggctcaaatggtactgacagagcgcagctcggtccgccgccgccttctcctcctcctccccgccatattacggatctcaggctgcaacgcgggctcctggcaaccgccgccgctgccaccccgactccacctctcagggccggcacttccggtggttgattcccgggctgttaaaaccgttgggccaccagaacactaccatccccgaggtgcattgcgcgcccgcgatggaggacgtaatgcttacggccagcacgctgcacgccgggaaacaatggggatccccggagagagggacacatcgtacgtactcttgcagatacacacgcataatgcgcggcctcctacaagaggacacccaccgcggtttagggagagtccaggggatgggagcggcgcaaatgtgttcgtcctctctcctcctacgccactcacttgtctgtgtgcgactgccacattggcaatgtcagagaaggtgcggacccggctggaggagctggatgactttgaggagcacgacaacaacaaacacacacccacaaaccagccaaagccacacagagaggagaagatagagaagagaagaagagagagacaaagcgagaggagcggctcggccaacaggagaatgagcgagacgaaagaggaagacgagagaaggagccgagaaacagaggaacaaaaaggagggaagcagaaaaagggagaagaagaggagcgaagggaaaagagaagaaaagggggaggaagagaggcaggagaggcagcagaaaagagcacgggagaagaggcgagggagaggggcacgacggagaggacgggagaagaagaagacgcagaggccgcggacgcaggcccaaagaccaccactcaaaaaaataaaagactacacacaccacacgacacagacacccacacaacaacaccatacacatacaacaaaacacaaacaaccccacacaaacaacacaacggtattcctgtttttctttctcctcgccaaagaacaccggcgagcggcacggaagcaacacgaaccagagcgaggaagaggaggaggaagcaaggcgggggcgaagataaaacatacgtctatagccgcagcagccgacagaagacacgaccgacccacacagcgagataccaggagaaaagaagggagaagagcccaaagcgggaagcacggccgaacggcacacaagacagaggcgggcggcggaatcccagtgcactctacctcccgggttcaagtgattctcctgcttcagcctcctga

SEQ ID NO: 19422 - DNA, 470 bp, Homo sapiens
  SIMILAR (160)..(468): 1001254mologous to Homo sapiens ribosomal protein L8,accession number Z28407,Smith-Waterman Score=539.
  misc_feature (1)...(470): n = a,t,c or g
nattatcgacatcactaggccagngcggnggaattcgctggtgaacaggtaggtcatccttgcggccttgcggcatgggcagtatccgccgccatcctcttccgtgaggcgcgctgagacccggaccggccctcctgagaggatgccggacccgtcgccatgggccgtgtgatccgtggacagaggaagggcgccgggtctgtgttccgcgcgcacgtgaagcaccgtaaaggcgctgcgcgcctgcgcgccgtggatttcgctgagcggcacggctacatcaagggcatcgtcaaggacatcatccacgacccgggccgcggcgcgcccctcgccaaggtggtcttccgggatccgtatcggtttaagaagcggacggagctgttcattgccgccgagggcattcacacgggccagtttgtgtattgcggcaagaaggcccagctcaacattggcaatgtgctccctgt

SEQ ID NO: 19423 - DNA, 328 bp, Homo sapiens
  SIMILAR (69)..(281): 901254mologous to Homo sapiens ribosomal protein L8,accession number Z28407,Smith-Waterman Score=346.
tgagggtacaatcgtgtgctgcctggaggagaagcctggagaccgtggcaagctggcccgggcatcagggaggtggccgaattgacaaacccatcttgaaggctggccgggcgtaccacaaatataaggcaaagaggaactgctggccacgagtacggggtgtggccatgaatcctgtggagcatccttttggaggtggcaaccaccagcacatcggcaagccctccaccatccgcagagatgcccctctggccgcaaagtgggtctcattgctgcccgccggactggacgtctccggggaaccaagactgtgcaggagaaagagaac

SEQ ID NO: 19424 - DNA, 434 bp, Homo sapiens
  SIMILAR (35)..(322): 701254mologous to Homo sapiens ribosomal protein L8,accession number Z28407,Smith-Waterman Score=269.
  misc_feature (1)...(434): n = a,t,c or g
ccgtccgcccatgggcccgtgtgatcccgtnaacagaagaaagggcgcccggtcntgtgttccagcgcgcaacgtgaaagcacctgtttaaagggctggcttgcgcgccgtggattttgcttgagcggcacggctacatcaagggcatcgtcaaggacatcatccacganccccgccgcgcgcgcccctcgccaaggtggtcttccgggatccgtatcggtttaagaagcggacggagctgttcattgccgccgagggcattcacacgggccagtttgtgtattgcggcaagaaggcccagctcaacattggcaatgtgctcctgtggcaccatgcctgagggtacaatcgtgtgctgcctggaggaaccaagactgtgcaggagaaagagaactagtgctgagggcctcaataaagtttgtgtttatgccacc

SEQ ID NO: 19425 - DNA, 464 bp, Homo sapiens
  SIMILAR (25)..(366): 1001254mologous to Homo sapiens ribosomal protein L8,accession number Z28407,Smith-Waterman Score=599.
cgctggtgaacaggacccgtcgccatgggccgtgtgatccgtggacagaggaagggcgccgggtctgtgttccgcgcgcacgtgaagcaccgtaaaggcgctgcgcgcctgcgcgccgtggatttcgctgagcggcacggctacatcaagggcatcgtcaaggacatcatccacgacccgggccgcggcgcgcccctcgccaaggtggtcttccgggatccgtatcggtttaagaagcggacggagctgttcattgccgccgagggcattcacacgggccagtttgtgtattgcggcaagaaggcccagctcaacattggcaatgtgctccctgtgggcaccatgcctgagggtacaatcgtgtgccaccgttatctccaagaaggttatctcctcagccaacagagctgtggttggtgtggtggctggaggtggccgaattgacaaacccatcttgaaggctg

SEQ ID NO: 19426 - DNA, 376 bp, Homo sapiens
  SIMILAR (1)..(219): 1001254mologous to Homo sapiens ribosomal protein L8,accession number Z28407,Smith-Waterman Score=399.
gctggaggtggccgaattgacaaacccatcttgaaggctggccgggcgtaccacaaatataaggcaaagaggaactgctggccacgagtacggggtgtggccatgaatcctgtggagcatccttttggaggtggcaaccaccagcacatcggcaagccctccaccatccgcagagatgcccctgctggccgcaaagtgggtctcattgcggcaagaaggcccagctcaacattggcaatgtgctccctgtgggcaccatgcctgagggtacaatcgtgtgctgcctggaggagaagcctggagaccgtggcaagcttggcccggcatcagggaactatgccacccgtatcttccacgtcgacgccggcgggaattc

SEQ ID NO: 19427 - DNA, 505 bp, Homo sapiens
  SIMILAR (13)..(327): 871254mologous to Homo sapiens ribosomal protein L8,accession number Z28407,Smith-Waterman Score=469.
  misc_feature (1)...(505): n = a,t,c or g
gcgcgagcctacgggtccaagaaggttatctcctcaaccaacatagctgtggttggtgtggtggctgtaggtggccgaattgacaaacccatcttgaaggctggtcgggcgtaccacttatataacgtgaacaggaactgctgtccaccagaacggggtgtggccatgaatcctgtggagcatccttttggaggtggcaaccaccaacacatcgccgagccctgcaccatccgcagagatgcccctgctggccgcaaagtgggtctcattgctgcccgccggactggacgtctccggggaaccaagactgtgcaggagaaagagaactagtgctgagggcctcaataaagtttgtgtttatgccacctgnnnnnnnnnnnnnnnnnnnnnnnnnnngggggggagatttaaaaaaatccttaggggggcaaaatttatcggttgtagaaacaaaaanggggggggcgggggattattatttttttggggggggtttttttggggg

SEQ ID NO: 19428 - DNA, 427 bp, Homo sapiens
  SIMILAR (235)..(426): 1001254mologous to Homo sapiens ribosomal protein L8,accession number Z28407,Smith-Waterman Score=333.
cggacgcgtgggtgaggagttaacgtcctaagccgatatgggatttctcgcaggcagaagcttcaggtggggacatccgcgtgaccagaccagtggccaccggtgggtgccgagagagttgtaccgggaggctggatgttgaatgctgtgctcgcaacttcgcgggttgcctagagcgagggggttcgcattgtttcttactgtgctgacggcctgatgctgcttccccttgcagcccagctcaacattggcaatgtgctccctgtgggcaccatgcctgagggtacaatcgtgtgctgcctggaggagaagcctggagaccgtggcaagctggcccgggcatcagggaactatgccaccgttatctcccacaaccctgagaccaagaagacccgtgtgaagctgccctccggctccaagaaagtta

SEQ ID NO: 19429 - DNA, 2262 bp, Homo sapiens
  SIMILAR (1353)..(1018): 531254mologous to Homo sapiens dJ63P18.1 (novel zinc finger protein),accession number AL356379,Smith-Waterman Score=329.
tcaggctttcttccggcacttcctgaggccacgcacgcgtcctttgggcccttcaccaccttcctgcacccagttccttgtggcccctgcttctctgggtcgagggccgccgctgctcacctcttcctggaacagtcctaaagccgctgaggcagaaaaggcccagctccctccaccccgacgggagggatccgcgctgaggtccgatccgaacatgttccagacccccctgcaggactggacccggtcaccccgcggcctctgcacgacgctcacccgggctggcctcctcttcttcccagtcctcactggccgagcctgcgcctcccaataagccaagaatacaggaagcctcacctcagggtctgcttctggggaccccaccccgacgcgaatggccggcattgcaagttcgctccgggactgcgagcgcttctgggcacggccccgccacacgccgccaccattgcgcccactgccacttctaggggctcctccgacggtcagggatgtgctgaggcaacgccgggcgggcagcaggggcgagtccgcgcttccctggagccgaaaggagcactgcggccggtgaccccgggcggaaacctgttgggagcgcaccggaagtagccgtccacagaggtctgcgcacctgctctcggtctgctctgagacacccggatgaccgcccactcggtggttcaacggtccccgacaggagctccgggtccgggcaaggaaggggccagttgggctcttagtgtgaagcgactgtgggacatcctggtgaagacaggacctaaagccggcagatgctgctgtgatgtagatgcaaattggggcgtcttgatggtcagtgatgccactgagctcgcgaggtcgcccagagacagtgttgagtgagaagcggccctggtgcccctggggctgttgaagagggaagaggcgccctgggcatggagaccgctggggcggcctgtgaaggttggtggctccatttttgaagtcagtgagaccacgaaccaagtgtgatggctgactgaagctttttccacactcttgacattcaaaaagtttctctcctgtatgaattctctgatattgcatgggatttgctttcggattaaaggctttcccgcactcaatacatttatagggcttctctccagtatgtatcagttggtgtttaataaggtttgaattcccactaaaggctttgtcacattcatcccacctatagggcttttctccagtatgaattctctgatgtttaacaagctttgatgtctccctaaagcccttaccacattcactgtgcagggaggccctggcaaagcaatgacccatggcattttcccctgctcctgctgggagataaccctgagtgtggacactgaaaaacctgtctatcaagaagataatggtcagtgctagaatatctgagctgcccctggctgagggccacagaggcatgtgatgcttatccagagctggtagggtgcagtggttctcgagcatcacatcctggtagagtgctctctgagggggtcccaggtgctgcccctcctcctgtgtgaggtacatggccacctcctcaaacatcactgtgccccaagccagcagcggcaacacgctggggtccccttccatgctgtggaagctttgttcttttgctcttcgcactaaatcttgctggtgctcactctttgggtccgcgccgcctttatgagctgtgacactcaccgagaaggtctgcagcttcactccgcgaaggtctgcagcttcactcctgaagccaggaagaccacgaacccaccggagggaacgaacaactccagatgcactgcctttaagaactgtaatactaaccacgaaggtctgcagcttcactccgtctttaagagctgtaacactaaccacgaaggtctgcagtttcactccgcgagggtccgcggcttcgttcttgaagtcagcaagaccaagaacccaccaatttgggccggcggcggcggcggaagaccccgacagcacgggctgccgcggcagcagcggcggagcagcagagaggccggggagcggcggctggctcacgcgcgtcgcgcgggccgggatgagggactgtggcggcgcggcccgcgcgcagccggccggtgaaagcgcgggcaacgggcggtgggcggcgcgggccaagaagatggcggaggggccggcgctgcggtccccgtggtcctggcccagcctcggcggaggctccaggcccggcat

SEQ ID NO: 19430 - DNA, 814 bp, Homo sapiens
  SIMILAR (173)..(577): 1001254mologous to Homo sapiens ribosomal protein L8,accession number Z28407,Smith-Waterman Score=711.
  misc_feature (1)...(814): n = a,t,c or g
atcgagaccactagtccagngncgnggaattcgngaacaggtaggtcatccttgcggccttgcggcatgggcagtatccgccgccatcctcttccgtgaggcgcgctgagacccggaccggccctcctgagaggatgccggtgcgggcgcccgcggagagggacccgtcgccatgggccgtgtgatccgtggacagaggaagggcgccgggtctgtgttccgcgcgcacgtgaagcaccgtaaaggcgctgcgcgcctgcgcgccgtggatttcgctgagcggcacggctacatcaagggcatcgtcaaggacatcatccacgacccgggccgcggcgcgcccctcgccaaggtggtcttccgggatccgtatcggtttaagaagcggacggagctgttcattgccgccgagggcattcacacgggccagtttgtgtattgcggcaagaaggcccagctcaacattggcaatgtgctccctgtgggcaccatgcctgagggtacaatcgtgtgctgcctggaggagaagcctggagaccgtggcaagctggcccgggcatcagggaactatgccacccgttatctcccacaaccctgagaccaagaagacccgtgtgaagctgccctccggctccaagaaggttatctcctcagccaacagagctgtggttggtgagtatcaggcagcagttgaatgctgagggctgtgggtgaacatgctgtgagtgccggtggacagccagtggctagacttggtccctggaattcgattacctgttgttctaaaacttgggttctgtaagtttgagctcat

SEQ ID NO: 19431 - DNA, 1950 bp, Homo sapiens
  SIMILAR (194)..(33): 611254mologous to Homo sapiens Human secreted protein, SEQ ID NO: 7115,accession number G03034,Smith-Waterman Score=172.
  misc_feature (1)...(1950): n = a,t,c or g
atggtgcgtctggagttgttcattccttccggtgggtttgtggtctcgctggcctcaggagtgaagctgcagacctttgtggttagtgttacagctcttaaaggcagtgcatctggagttgttcgttcctgccggtgggttcgtggtcttcctggcttcaggagtgaaactgcagaccttcgtggagtgaagctgcagaccttcgtggttagtattacagttcttaaaggcagtgcatctggagttgttcgttccctccggtgggttcgtggtcttcctggcttcaggagtgaagctgcagaccttcgcggagtgaagctgcagaccttctcggtgagtgtcacagctcataaaggcggcgcggacccaaagagtgagcaccagcaagatttagtgcgaagagcaaaagaacaaagcttccacagcatggaaggggaccccagcgtgttgccgctgctggcttggagctgccgtgtgactgagaggagcctcttcaggactggagatagtcccatggtaccccggcagtggcattcaaagagacaacagacccctcttgctgtctgccatcacttagcaggagcctcatctctgcgcaaccgtccggctcggcggagcgggtctcgggggcccggccgcacgcccccgaccacagccagcatggaccggggcgcagggcccttcgccccgataagggttcggaacccaaggcgagcggaggcgacagtgccggctgcgggtcactcaaccacttggcgcctcctcggccactcagaaaacacctgccctcccggagaccccggtgaaagccgagcaatcctgcaccctccttccgagcccacgcacaccaggacaccttcagccgcgtctcctggacccgtcgccatgggccgtgttgatccgtggacatgaggaagggcgccgggtctgttgtccggcgcgccacgttaaggcacggtaaagggcagtgcggcgcctgctgcgcagatggatttcgcctgagcggcacggctacatcaagggtcatcgtcaaggacatcatccaccgcccccggggncggcgggcgccgccccttcgccaaaggtggttcttccgggattcgtaatcggttttaggaacgggacggagctgtttcattgccgcccgaggggcatttcacaccgggcccagttttgtgtattgccggcaagaaaggcccagcttcaacattgggcaatggtgctcccctgtggggcaccattgcctggagggttacaattcgtgttgcttgccttggaaggaagaaaccttggagacctgtggcaaagctgggcccggggcattcaagggaaactaatgccaaccggttaatcttcccacaacccctgagacccaaagaaagaccccgtgtgaaagctgcccttccggcttcccaagaaaggtttatctcccttcagcccaacaagagctgttggtttgggtgtggtggcttggaggttggccgaatttgacaaaacccccatctgaaggcctgcccggggcgtacccacaaatataaaggcaaagagggaacttgctggcccacgagtaacgggggttgttggccatgaaaccagtcgtgtggaccatcctttttggaggggggcaaccaccaagcacaatcggcaaagccctccaaccatcaagcagagatgccccctgctggcccgcaaaagtgggtctcatttgcttgccccgcccggacttggacggtttccgggggaaccaaagacttgttgcaggaagaaaagagaactagtgctgaaggggcctcaataaaagtttgggttttatgccnnnnnnnnnnnnnnnnncttgggggggggcccgggcccccatttggccttataggggggcgtgttacaacttaggggccgtagtttacaaacgcgggaactgggagacaggccnnctgttgcgagtctacattt

SEQ ID NO: 19432 - DNA, 816 bp, Homo sapiens
  SIMILAR (574)..(789): 361254mologous to Methanothermobacter thermautotrophicus conserved protein,accession number AE000877,Smith-Waterman Score= 83.
atgggttccgtgacctgtgaagtggagatgctatggacgtacatttcctggtacacagtgatggatgaatgtgttgatgatttagcatatgtggaatgccagaggctcagtggagcagctaaaaaccagaaatcaatacaggagtttttcaacaaagaacataatgtcttttccttcaggttagagcctccacctggaaaacgtgaatgccgagttgggcagtatgtggtcgacctgacttcttttgagcagttggcactacccgtcttgaggaatgccagtcccaagtgctcagagcatgaggaggacgaggagtactgggctctccgtctcactggactgactgtcagccaggaggtgttgtttcagtcccaagatagcttggaaaaccccatggctaccattcaagcgctcttcagtcgggtgaccatgtggaacttgctgctgtttggcgaagggctgcagttttgctgcctaacttctgagagacactccttattcactttcatgactttccatacttgctgtcccaggtgggccgactgcagcagtggcccagggcaaagagtgtgcgtcatcgatgagattgggaagatggagctcttcagtcagcttttcattcaagctgttcgtcagacgctgtctaccccagggactataatccttggcacaatcccagttcctaaaggaaagccactggctcttgtagaagaaatcagaaacagaaaggatgtgaaggtgtttaatgtcaccaaggaaaacagaaaccaccttctgccagatatcgtgacgtgcgtgcagagcagcaggaagtga

SEQ ID NO: 19433 - DNA, 569 bp, Homo sapiens
ttcgaggaaatctgtctgggctccaaacccactttgactttttgagctgtcacttggcagaaactgatgctgggactcggtgattcctgtcctgtttctgagtgctcctgaagagctgggcctcctgcctgggtaacaaaacatacctcaccctctcccagccttccaggcttttcttttagagagttacctagcacaagattgaagaagaggaaaggagctctgaagcctgttctctcacttcttcccacaggtcaccaaggaaaacagaaaccaccttctgccagatatcgtgacgtgcgtgcagagcagcaggaatgtgaatgacacggtgcattccctgccttcccgtgaaggagtgcccagttcaagaggagcctgatggagccctgcctgtcgaggctgtatgcctatggggttatggaaccttgtgggcttttctagagaaaactcaacagctgtttcccataaaatgtttaaaagatcaaattagccttaatgctggattgtctgtacaagattaactatccattgtggcttatctatgcttaaagatttcttgtttattt

SEQ ID NO: 19434 - DNA, 1584 bp, Homo sapiens
  SIMILAR (174)..(374): 411254mologous to Methanothermobacter thermautotrophicus conserved protein,accession number AE000877,Smith-Waterman Score= 133.
  misc_feature (1)...(1584): n = a,t,c or g
cgaaaggagcccgggggatttatccgaacgctganttagaaccatcggaaaaccccggncgacccacgcgtccggtcgcgaccctggtccggacctgacctgaattgcgaccccaacctggactgctcccctgaccgcaacccctacccccgcccaccagtatggcccggcacgtgttcctaacggggcccccaggagttggaaaaacaacattgatccataaagccagtgaggttttaaaatcctctggtgtgcctgttgatggattttataccgaagaagtcagacagggagggagaagaataggattcgatgtcgtcacggttgtccggcacccggggggccttttatcgagagttgggttagagcctccacctgggaaaacgtgaatgccgagttgggcagttatgtggtcgacctgacttctttttggagcagttgggcactaacccgtcttgaaggaatgtgagccgactgccagcagtgggcccagggccaaagagtgtgcgtcatcgatgaagaattgggaaagatggaagctctttcagtcaagcttttcattcaaagctgttcgtcagacgctgtcttaccccagggacatataatccttgggcacaaatcccaagttcctaaaggaaagccactggctcttgtagaagaaatcagaaacagaaaggatgtgaaggtgtttaatgtcacccaaggaaaacagaaaccaccttcttgccagatattcgtgacggtgcggtgcagagcagcaaggaagtgaagaccacgtgcattcctgcccttccgtgaaggagtgcccagttcaaagaggagcctgatggagccctgcctgtcgaggctgtatgcctatggggttatggaaccttgtgggcttttctagagaaaactcaacagctgtttcccataaaatgtttaaaagatcaaattagccttaatgctggattgtctgtacaagattaactatccattgtggcttatctatgcttaaagatttcttgtttatttccttttgcgagtcatgccacatgatttggggtaaactgtgagatgagaaatgggttttccagagtattagatggaattcactcccgttgaagtttataaatgtgttcaggggaagcgggaggaaagagttcactgcctaatcagttttgcatgtcatgaaaattaaattcctctccaggtgccagcttcagcctcatgcaacttaaagtgataacagttatttgattttttaaaaaatattattccaaaagaaaaccattttaggtcatctaccccaacatctgtttgcctactgcctaataaattttaaaattaaatctgatggttacagacaggaaaaaaaaaaaaaaaaaaaaaccaggatttgaaggagctattttttttwaatgttgcaactagcaactcatcttcggaagacacagccaggggaatmaagtagaagtgaaaggtttataaatccatttgtaagcatttatcccatatattttaaattcaaggaaaattgtmtttatctttgaattttgtattcaatactttatgtactatgtgactcatgcttctggataaata

SEQ ID NO: 19435 - DNA, 596 bp, Homo sapiens
  SIMILAR (54)..(374): 741254mologous to Homo sapiens ribosomal protein L5,accession number U14966,Smith-Waterman Score=381.
  misc_feature (1)...(596): n = a,t,c or g
ccgctggnctnaggntcntctgtcgagcagcggacncggtctctgttccgcagatggggtttgttaaagttgttaagaataaggcctactttaagagataccaagtgaaatttagaagacgacgagagggtaaaactgattattatgctcggaaacgcttggtgatacaagataaaaataaatacaacacacccaaatacaggatgatagttccgtgtgacaaacagagatatcatttgtcagattgcttatgccccgtatagagggggatatgatagtctgcgcacgtaatgcacaccgaactgccaaaatatggtgtgaaggttggcctgacaaattatgctgcagcatattgtactggcctgctgctggccccgcagaatggaggagatgtataagaaagctcatgctgccatacgagagaatccagtctatgaaaagaagccccaagaaagaagttnaaaagaagangtggaccgtccccaaatgtcccttgctcagaagaaggatcggggtagctccaaaagaaaggcaagcntcctcagagctcaggagcgggctgctgagagcctaacccagccantttctatgatttt

SEQ ID NO: 19436 - DNA, 497 bp, Homo sapiens
  SIMILAR (20)..(448): 891254mologous to Homo sapiens MSTP030,accession number AF113210,Smith-Waterman Score=657.
  misc_feature (1)...(497): n = a,t,c or g
ccggtctctgttccgcaggatggggtttgttaaagttgttaagaataaggcctactttaagagataccaagtgaaatttagaagacgacgagagggtaaaactgattattatgctcggaaacgcttggtgatccaagataaaaataaatataccacccccaaatacaggatgatagttcgtgtgacaaacagagatatcatttgtcagattgcttatgcccgtatagagggggatatgatagtctgcgcagcgtatgcactcgaactgccaaaatatggtgtgaaggttggcctgacaaattatgctgcagcatattgtactggcctgctgctggcccgcaggcttctcaataggttcggcatggccaagatctataagggccaagtggaggtgtctgctaatgaatgcaataacgaaatcgttcatggtcagccacgtgccatctcatgatgtttgcatcagagccanttgnnagctagtcantacgagagcagtc

SEQ ID NO: 19437 - DNA, 3048 bp, Homo sapiens
  SIMILAR (70)..(672): 471254mologous to Homo sapiens ribosomal protein L5,accession number U14966,Smith-Waterman Score=267.
tgcaggcccagcggcgctagggggtgcaggtctctgtcgagcagcggacgccggtctctgttccgcaggatggggtttgttaaagttgttaagaataaggcctactttaagagataccaagtgaaatttagaagaccgacgagagggtaaaacgtgattattatgctcggaaacgcgttggtgatacaagataaaaataaatacaacacacccaaataccaggatgatagttctgtgtgacaaacagagattatcatttgtcagattgccttatgcccccgtatagagggggtatatgatagtcttgcgcagcgtattgcacaccgaacttgccaaaaatatgggtgtgaagggttggccttgacaaatttatgctgcagcatatttgtacttggccctgcttgcctggcccgcaggctttctcaataggtttgggcatgggacaagatctatgaaaggccaagttggagttgactggtgattgaataccatgttgaaaagcattgatggtcagccagggtgccttccacctgcctattttggatgcaggcccttgccagaacctacccactgggcaataaagttttttggtgcccctgaaagggagctgatggatgggaggcttgtctatcccttcacaggtacccaaccgattcccctggttatgattcttgaaagccaaggaatttaaatgcagaaagtacatccggaaagcacatcatggggccaaaatgtttgcaaaattacatggcgctactttattggaagaagatgaagatgcttacaaagaaacagttctctcaatacataaagaacagggggacaagactggagggcagagtggaggagattcaggtgtccaggcacctgctgccaggtgggaagtgtgatgaggcctctccccacactccctgctttgtggaggaggctgagcgcagcggccctggcccgagagagcccttggggtgcacgtgccccagcagaggctgcactctggtgctagaggccaccgaaggtcccagggctctgccggtccctatcatggatgcagggcctatgaaccccgaggaggccgaccctctctgcgggcagtgggccttcttccgaaatgtctcagccctacccggcctttgcactggagcccacacctgctcccggggctggggctgcgtctgcctgtgcctgctatcccgggagcagcgtgcgggctcggcaaagactgtgctccctgccctcaaccacggagaggccctcgctgtctggagcaggacgggagaaaggggcgctacagaccatggcttgggggatctagaggaggaaacagatgttacagggggccaccacttcgtctatggctggccagggaaggtgcctcatcttcctgcccacagcagggccaactggggagtctgcatgaagctggctgcggggaacagcgtcttcctcatggctgatggtgctctggggataaaaccagacgacccacctgacacgcggagttgcagggggtcaggtgacacggcggctgagctccgagcccagatgacaccctcacagccgagctctgccgtgcccgtccttcgtgcacccagcccatcccttcggctgcgtgtgaccccaggacccgggttccggttttcaggtgttatttctgacagcgccgagtgccgctgtgcagggagacgctcggctgcgcgcggtccgggcacagttctcggggagtccagaggagggagcacgagctccagggatgagcatcggggccggactcagccgtccgtggctatggctggagcggctggtgtgaggctgtgggaccggccagggccccatgagtactggggagcacaggtgtggggcactgtgtccggctgtggtgacagatggagcccccgacacaggtttgtaactcaaggcactgacatccaacctgaagggcaagagcagggcagcgaaagtgctgcagacggaggccgcttcaagcctggacacctgcgggagagaaacccccaggagccaggatcaccgaacacccaaagacgtcccgctctgaaaagaggctgccgcctcaataaacaggaggagtcacagctgagaaaccagagaatttacactggactcggtgtcacggggggcctggagatgattgacagcatccaggaggatgtgcctgggtttcaagcaaatgctgcactgttttcgacaaaggacgtgagcacctgcggatgcccctgccatcgtcctagatctggccacttggggctgctgggccccacctgcctgggcttcctcttccctgggccggatgctcctctgaacctgcccagaacaagggttctgtgctggggctggtctggcgctggggagaaagagccggggggcagggcttggcaatgggaagcatcacaaagcagcgtggccccacccctggagcgctcccctcccctctcctgtcctgagatgctgctgcagactcacgtcttcctccccaaaggtcctgggagcccagcgagggagcccagagtgtctaccattcacagagagcctttccagagcagcaggtgcgccgaggacggggactcaggcatgcaccaggtttgcagcaccagcagcagcgagggaggaaatcagaggcttctgggaggaggaagaaacgaaaacattttcatgggtccccaaagcatcctggacgctgctgatgccctgtgcccagtggggagtcgagtctggctttatcgatgtgtagccgacatgcaggagctgctcaggactgagcagtgcgcactttgccttcaaatgcgggagcggcaagcagggtatctgcctctcggtgtccccgattcccaccagcccttgatatggcccgtgtcggagttctgggcattcgaaaagggcgtcctgtccaccatgccccgaaaatctcaggctgcctctccatcttctcccatccagcaggagctcagcgatgcctgcccgtcttctcccatccagcaggagctcagcgatgcctgcccgtctcctcccatccagcagaagttcagcgattga

SEQ ID NO: 19438 - DNA, 396 bp, Homo sapiens
  SIMILAR (168)..(395): 971254mologous to Homo sapiens MSTP030,accession number AF113210,Smith-Waterman Score=390.
  misc_feature (1)...(396): n = a,t,c or g
gcaggatggggtttgttaaagttgttaagaataaggcctactttaagagataccaagtgaaatttagaagacgacgagagggtaaaactgattatnatgctcggaaacgcttggtgatacaagataaaaataaatacaacacacccaaatacaggatgatngttcgtgtgacaacagcgtatgcacacgaactgccaaaatatggtgtgaaggttggcctgacaaattatgctgcagcatattgtactggcctgctgctggcccgcaggcttctcaataggtttggcatggacaagatctatgaaggccaagtggaggtgactggtgatgaatacaatgtggaaagcattgatggtcagccaggtgccttcacctgctatttggatgcaggccttg

SEQ ID NO: 19439 - DNA, 497 bp, Homo sapiens; identical to SEQ ID NO: 19436
  SIMILAR (20)..(448): 891254mologous to Homo sapiens MSTP030,accession number AF113210,Smith-Waterman Score=657.
  misc_feature (1)...(497): n = a,t,c or g

SEQ ID NO: 19440 - DNA, 1240 bp, Homo sapiens
  SIMILAR (167)..(703): 421254mologous to Homo sapiens ribosomal protein L5,accession number U14966,Smith-Waterman Score=183.
cgggccccctttgcattgcactcgcgctgcaggaattcggcacgaggcgccgctgggccttgcaggtctctgtcgagcagcggacgccggtctctgttccgcaggatgggggtttgttaaagttgttaagaataaggcctacctttaagagatcaccaggtgaaattttagaagacgcccgaaagggtaaaacgtgattattatgctcggaaacgcgttggtgatacaagataaaaataaatacaacacacccaaataccaggatgatagttccgtgtgacaaacagagatatcaatttgtccagattgctttatgcccccgtatagaggggggatatggatagtcttgcgcagcggtaattgcacaccgaacttgccaaaatattggttgttgaaggtttggccttgacaaatttattgcctgcagcattatttgtacctgggcctgcctgcctggccccgcaggctttcctccaataggttttggcaatggacaaagatctattggaagggccaagttggagttgactgggtgatgaatacaatgtgggaaagcattgacggtcagcccaggtgcctttacctgctatttgggatgcagaccttgccagaactaccactggcaataaagtgtttgggtgccccggagggagctgtggatggaggtttgtctaaccctcacagtagcaaacgattccttggtttgtctatccccttcacagtacccaaaccgattcccctgggtttatggattctgaaaagcaaaggaattttaatgccagaagtacatccggaaagcacatcatggggcagaaattgtttgcaagattacattgcgctactttaatgggaaagaaagatgaaagatgcttacaagaaaccagttctctcaatacataaagaaacagcgtaacttccagacatgatgggaggagatgtataaggaaagctcatgctgctatacgagaggaatccagttctatggaaaagaaggcccaaggaaagaagtttaaaaagaagaggttggaaccgttcccaaaatgtccccttgctcaggaagaaggatcgggtagctccaaaggaaggcaagcttcctccagagctccaggagcgggctgctggagagcttaaccccagccattttcccatgattttttcagatatcgctaactaaacttatgaacagcaactaaaaaaaaaaaaaaaaagtcgacgcggccgcaatttagtagtagtaggc

SEQ ID NO: 19441 - DNA, 1244 bp, Homo sapiens
  SIMILAR (218)..(736): 801254mologous to Homo sapiens Human RNA-associated protein-7 (RNAAP-7),accession number Y70226,Smith-Waterman Score=677.
  misc_feature (1)...(1244): n = a,t,c or g
ccttgacctcccgcggcgtgggaagctgcgcggtgatgctgttgctcgtccgggccggggcgcgggcctggctgcggcctaccggcagccagggcctgagcttccctggcggaagaggcagcgcgtgcgaccgagaacccggagcaggtggcgagcgagggtctcccggagcccgtgctgcgcaaagtcgagctcccggtacccactcatcgactgcccagtgcacgcctggatcgagtccttgcggggcttcgagcacgagcgcgtgtgcctggtcgacctgcaccccgatgttttcgccaacgcgcccaggctggacatactgcaccaggatgctatgttgcagaagaacttctagagaattagctatgccaagaccaagacgagagccgaggtgcggcggcggtggcggaaagcctttggccgcagaaaggcatttgggcgggcccggcatggcagcatccgctctccgctctggcgaggaggaggtgttgcccatggcccccggggccccacaagttactactacatgctgcccatgaaggtgcgggcgctgggtctcaaagtggcactgaccgtcaagctggcccaggacgacctgcacatcatggactccctatagcttgcccacccggagacccacagttaccttgaccagagctggcgcacttaccgccgctggggggactccgtactcctcgtggacttaacacacgaggagatgccacagagcattcggggaagccacctctaggcttaagaccttcaacttgatccacggctgttggcctaaatgtgcacagcatgctcaagcaccagacgctggtcctgacgctgcccaccgtctgccttccttggaggacaagctgctctggcaggactcacgtttacagacccccctctaccccttcagccttgccctacagcgactttcccccgacccctaccccacgctacccaggggcccagcggccaccccgtaccactgttgaagtgaagcacctcttctgagccagggncgagcccctggcccaacttgggagcctcaggcccacgcccaccccttcgaggaaggtgtcacctggaccccttcattccacggaggaagctgaggccacagggagcggccatcgccattgggaaggggcgactcctacggaaacgccagacgggcttctgcatccattccctctttttgtttttaaaataaattgtatttttgaatcaaggaggaaaaaaaaaaa

SEQ ID NO: 19442 - DNA, 458 bp, Homo sapiens
  SIMILAR (52)..(303): 961254mologous to Homo sapiens metallopanstimulin,accession number L19739,Smith-Waterman Score=431.
  misc_feature (1)...(458): n = a,t,c or g
tttgactgcctacatcaggcgngcaannngacgacctacgcacacgagaacatgcctctcgcaaaggatctccttcatccctcttcagaagaggagaagaggaaacacaagaagaaacgcctggtgcagagccccaattcctacttcatggatgtgaaangnnnaggatgctataaaatcaccacggtctttagccatgcacaaacggtagttttgtgtgttggctgctccactgtcctctgccagcctacaggaggaaaagcaaggcttacagaaggatgttccttcaggaggaagcagcactaaaagcactctgagtcaagatgagtgggaaaccatctcaataaacacattttggatgnnnaaaannganntnattanantataaaaaanngggcttttaatgtgtagggcgtgaaaacccctgggtcatccggtccggccctcttgtgggcccc

SEQ ID NO: 19443 - DNA, 802 bp, Homo sapiens
  SIMILAR (370)..(459): 661254mologous to Xenopus laevis ribosomal protein S27 homologue,accession number X71350,Smith-Waterman Score=109.
tttcgtgacgacctacgcacacgagaacatgcctttgattgctttggtccaggtttcggcggaaatcgggctgttctgtccgaactctcccctcacgctgatttcggatcgaagagggtcctcatttaccctctgcactttttaggacattaactccagggaccgcagcggcccacgggccaccctcatagacgggagcggagaggagataagatggcggcccagctgcgcatacaccaggggcggcgaggggcgagctctccccggtgggtgacagtgggggctattttcgaccatcccatttacgctgttggattctaaatctctgcatttctgtccctcttagctccgcaaaggatctccttcatccctcttcagaagaggaggagaaggaaccccatgaagaaccgcctggtgcagagccccaattcctacttcatggatgtgaaatgcccaggtgaggagacggtttgctgtattggggaaagcactggacctcaacagttggaaaatgttgtagtgttagctgtctcgtatccttgaagctgtgcagcagcttcagtttcttcgcctgtggaaaatattttccctgatactcttaaaatttgaatgtatgagactggcaaagttttgcatcttaggaggagtgattcatttcaccgtgatctctcatcacatttcacatacaacccctacgtttttttgtgttgggaaacaatgtaatggatgatgagttgggcataagtgcaggaaagacgggtgtaatagaggaaaaaaatgttatctgcttttctttcaggag

SEQ ID NO: 19444 - DNA, 801 bp, Homo sapiens
  SIMILAR (283)..(540): 481254mologous to Xenopus laevis ribosomal protein S27 homologue,accession number X71350,Smith-Waterman Score=164.
tctagtccccgtggtgtaattcgtgacgacctacgcacacgagaacatgcctgtgagttctttgggccatgtttcggcggagatctcgctggtctgtccgaactctcccctcacgctgatttcggatcgtagagggtcctcatttaccctctgcacttcttaggacattaactccagggaccgcagcggcccacgggccacccgcatagacgggagcggagagggagataagatggcggcccagctgcgcagacaccaggggcggcgaggggcgagctctccccgcttcgcaaaggatcatgcttcatccctctccagaagagggagaagaggaaacacaagaagaaacgcctgggtgcagagccccaattccttatttcatgggtgttgaaatgcccagggttgttttaaattcaccacggtcttttaggccatggcacaaacggtagttttgtgtgttggttggctgctccactgttcctctgccagcctacaggagaaaaagcaaggcttacagaaggatgttccttcaggaggaagcacgcactaaaagcaactctgagtcaagatgagtgggaaaccattcttcaataaacacattttggataccccaagcaaacaaagcaaaaaaattttttttaaaaaaaatttggcgggggggttttatattaaaggggggttaaaaaacctttaggagaatcgccgggggttttttttaacacccaggggtgtggcccacccccgcgggtatatttgttttgggggggggcctctctccctcttaaaataaagggggggagg

SEQ ID NO: 19445 - DNA, 1355 bp, Homo sapiens
  SIMILAR (400)..(777): 411254mologous to Caenorhabditis elegans similar to histone H3,accession number U28732,Smith-Waterman Score=125.
  misc_feature (1)...(1355): n = a,t,c or g
ttttcttttgacttgtttgtggatggaatgtttacagacatttctaattactgctttaattaaataaattggatcaaaggccgttcgaggtatttttgttttgccgtttgtcgctcagaattggcattttgagaggtgattgatactgctaacaattttctagtactctagtttgtttcaagaagagattttgggtagacgtaatcttcaccctttcaaattagataacaatacgaacattattttttatactgatcataagttccagatttgccgagggggtgatcgtggcaggaaaagttgtatgtttggtagttgcatatggcgacctgtgagcttatcaatgctggtaggtaagtaaggaggtcgctgtaccatggctcgtacaaaagcagactggcccgcaaatcggaccggtggtaaagcacccaaggaagccaactggcttacaaaaagcccgcttcgcaagagtgcggccctctacttggaggggtngaagaaacctcatcgttacagggcctggtactgtggcgcccccgtgaaatttagacggttatcagaagtccactcgaacttctgattcgcaaacttcccttccaagccgtctggtgcgagaaattgctcaaggacttttaaaacaggattctcgcttccaggagcgcagctatcgggtgctttgcaggaaggcaagtgagggcctatctggtttggccttttttgaaagacaccaacctgtgtgcttatccatgccaaaccgtgtaacaatttatgccaaaaagacattccagctcagcacgcccgcataccgtggagaaccgtgctttaaggatccactcatggatggggaaacatttcattctcaaaaaaaaaaaaaaaaaatttctcttcttcctgttattggtagttctgaacgttagatatttttttttccatggggtcaaaaggtacctaagtatatgattgcgagtggaaaaataggggacagaaatacaggtattggcagtttttccattttcatttgtgtgtgaatttttaatataaatgcggagacgtaaagcattaatgcaagttaaaatgtttcagtgaacaagtttcagcggttcaactttataataattataaataaacctgttaaacttttctggacaatgccagcatttgggatttttttaaaacaagtaaatttcttattgatggcaactaaatggtgtttgtagcatttttatcatacagtagattccatccattcactatacttttctaactgagttgtcctacatgcaagtacatgtttttaatgttgtctgtcttctgtgctgttcctgtaagtttgctattaaaatacattaaactat

SEQ ID NO: 19446 - DNA, 1609 bp, Homo sapiens
  SIMILAR (301)..(435): 401254mologous to Arabidopsis thaliana F24J5.4,accession number AC008075,Smith-Waterman Score=65.
atgatgacagggctgcagacagcacctgccatcaagaaaagtcccaaaagcagctttagagatgagaagaacacaggccttaacaagccaggacctggaagccggcgagagagacccctgtctgcaacccgcaaaactctttgcgaggctgagtacccagaggaagatgcctctgctgtgctccaagccatccaggtggagaacgcagccctgcagagggcgctcctcagcagaaaggccgagcagccagccagcccactgcagcatggagtgaatggctttgttccaacatcacatcatgtgatcacatccttccaggatgcagaaggaccaccagcaaaaccatggaccagtctgctggaggagaaggaagagacccttgagctgcttcccatcaccacggcgactactactcaggagccggccggggcagcaggaggagccagggccatcaaccaggccatggacagaattgggcttctgggaagcagacaacagcagaagcttctgaaagtcctccaggccgtcgaaagtgactctgcccatctcggcagggtggtttcaccaaccaaggagcaagtatcagacacagaggacaaacagagaatgagggcagacgagatcaaagatgccatctacgtgaccatggagatcctgtccaactggggcaactcgtggtgggtgggtctcacagaagtcgagttctttgacttgaatgacacaaagctttatgtgtcgccccacgatgtggatatccggaacacagccacgcctggggagctgggccgcctcgtcaacaggaacttagctctgcctgactctactgaggtggccatgtgccccactaagacggtcacattgctgggggcccttgcagctagggatggccacgagatccagcccccaaaagccagccaaccatgtcctctggtagtgaaccagagaaactgccacctgctccaaggccacagcactactgctcacctcgcagaggtgtcaggacccaggtttgcagtcggcattaaggcactgaatcagcaagcttttactgagcgccgactgcatacaagcctgtgcccagtgcccgctgctctcactgtcccctcacctgaaagcctcccccagccacagatctttccggggctggctccagccacccacactctgtattctaaagcgtgggctggggccacagtctccagacctggtgccatcctcggcgctggactttactgggggcttgtccgtgaaactgcgtcttaaggcttcttcagctttctacgaaacagagttcttcgtccataatctgcaccagagacgagggaaggagacttgccagttcctctcttcatccatgcgtgtccacatcagcccctccccgtcctggggaatcttcaagcccaaggagtcttctctatcatcccctgtgaaaattcatctctccttcacctactccaaaatgaccaatgatctcttagaaggtgccttagaggaaggtgccttatttggaattctcatagccccttacattccagggcgcactctcaattactttcgaatagcagcagttttaaaggccaacctaacattaggcaagagcctgggttga

SEQ ID NO: 19447 - DNA, 1853 bp, Homo sapiens
  SIMILAR (99)..(371): 831254mologous to Homo sapiens Human NP25 protein,accession number Y93187,Smith-Waterman Score=386.
agactgagctgcagcagctgggccaaaaaactgcagacggttcaccaggtctaaagagagccttaatatttgcccttaactttcacagttccccgccagggaaggacatggcagctgtgcagaggaccctgatggctttaggcagcgttgcagtcaccaaggatgatggctgctatcggggagagccatcctggtttcacaggaaagcccagcagaatcggagaggcttttccgaggagcagcttcgccagggacagaacgtaataggcctgcagatgggcagcaacaagggagcctcccaggcgggcatgacagggctgtcagatcccacaccatggactgcacacctcgggatgtatgttcaggggaatgccaagtttgtctccccggtgagaagaattgtggtccacgagtactataacagtcagacttttgattatgatattgctttgctacagctcagtattgcctggcctgagaccctgaaacagctcattcagccaatatgcattcctcccactggtcagagagttcgcagtggggagaagtgctgggtaactggctgggggcgaagacacgaagcagataataaaggctccctcgttctgcagcaagcggaggtagagctcattgatcaaacgctctgtgtttccacctacgggatcatcacttctcggatgctctgtgcaggcataatgtcaggcaagagagatgcctgcaaaaagaggaaactgggcacagagaggcccggcacccaggcagcccctaaacggagatggtctgcatctgcaggcgcggggaaaggcatagcaggcagcgccctgaacaaatcagaaaaacagccttcggctctggagcccactccggcacggcctcaggtgctctaccccgcgggatccagggagtggccgccactcacagttgcccctcctgtccgctccggtccgctcccgccgcccgaggtccgcgacgccccgcccagtgggtggagtgtgaggcggggaggtcgctcgactcgccggcgctgtggcctcccgcggagccgctcagactttccctgccggcacatggacctggcccaaccctcacagccagtagacgagctggagctctcggtgctcgagcggcagccagaagagaacacgcctctcaatggtgccgacaaggtcttcccttctttggacgaggaggtccccccggccgaggatgctgacctgttggatgttgaaagcaaacactttgaagacctggagttccagcagcttgaacatgagagccgtctagatgaagaaaaggagaacttgactcaacagctcctgcgtgaagttgctgaatatcaacggaacatcgtttctagaaaggaaaaaatttctgcattgaaaaagcaagccaatcacattgttcagcaggctcagagagagcaagatcattttgtgaaagaaaagaataatttaataatgatgttgcaaagagaaaaggagaatctttgtaatttggaaaagaaatactccagcctctctggggggaaagggtttcccgttaaccccaatactttaaaagaggctaacaaggaaagcccctggagctcctgtaataagaatgtggttggaagatgcaaactgtggatgatcatcacctccattttcctaggtgtcattacagtgatcatcataggcttatgtcttgctgcagcctggcttagaggtagatcaaatcgaatggtgggggggaggaggatgacttcagtgaataattggcttagtcttcgtaacctggctgcctgcctctccgtgctctaccagctcatgcttacgcgatcccacctaaaagaagacagtgcacctctgcactaa

SEQ ID NO: 19448 - DNA, 1655 bp, Homo sapiens
  SIMILAR (697)..(1386): 651254mologous to Homo sapiens neuronal protein NP25,accession number AF112201,Smith-Waterman Score=644.
tttcgtgttggtagaacggaccctcccacaggccctcatccccttgtgcagctgctggcctcgtagacaatcggctgtctccccagaagagggaaagaattgtgcagatgagaaagaggctctcagcgggagggaggcaggcgggcttgattgacacaggagagggctggctttttggagggctcttagcaacggccctggttgagccccttcagccatgagaaaatcaaatcaatgtgccattcttccaggcgcgaggcagcagcggctgcagttcaacatgaaaggaggcttcctccctgcctgctaattacctgctcttcccgatctcatcgtttctgcctttgcaaagagctactgacaagggggaagaaacgtccgccacccatcccccttgctggcctggggttcagacttgattgtgaaaccccattggcttcattggctccttgatttaaaccacgcccggctttctgccctctttgctgctgctggggccaggttgcccagccatatcccagccccgtctgcagggagccggaggctgctgctgctgctattgggtggatgccgcgcgtgtcttctcttctttccagagatggctaacaggggcccgagctatggcttaagccgagaggtgcaggaggaagatcgagcagaagtatgatgcggacctggagaacaagctggtggacttggatcatcctgcagtgcgccgaggacatagagcacccgccccccggcagggcccattttcagaaatggttaatgggacgggcgggtcctgtgccaagctgagtaaatagattatacccaccagggacaagaagcccatacccaaggttctcagagtcaaaagatggctttttaggcagatgggagcaaatctcccagttccctaaaagcttgcggagacctatggtgttcagaaccaccgacatcttttccagacggtggttcttatgggaagggaaggacatggcagcttgtgcagaaggaccctgattggctttaggcagcgttgcagtcaccaaggatgatggctgctatcggggagagccatcctggtttcacaggaaagcccagcagaatcggagaggcttttccgaggagcagcttcgccagggacagaacgtaataggcctgcagatgggcagcaacaagggagcctccccaggcgggccatgaacagggtaccgggaatgccccaggcagattcatgttaggacgcggcatcctgccccctggttagagaggacgaatgtttccacaccatggtcttttacgaaaaagaaatagttagtcaccttctgaccttctcctctttctccaagcctttctgtccctggtttttgcaagtgctgcatttcccgccgagaatcacgcgttgcctactgctgccacctcctgttcatttagaactatgcaaagactccgcttccgttttcccgagctatggcttaagccgagaggtgcaggagaagatcgagcagaagtatgatgcggacctggagaacaagctggtggactggatcatcctgcagtgcgccgaggacatagagcacccgccccccggcagggcccattttcagaaatggttaatggacgggacggtcctgtgcaagctgataaatagtttatcccaccagtgtatt

SEQ ID NO: 19449 - DNA, 2519 bp, Homo sapiens
  SIMILAR (1173)..(2516): 921254mologous to Homo sapiens Human Zsig43 polypeptide,accession number Y96513,Smith-Waterman Score=2119.
atgccgccggcgagtggccccagcgtcctcgcgcggctgttgccgctgctggggctgctgctcggcagcgcctcccgggctcccggcaagtcgccgccggagccccccagcccgcaggtggaggagacccttcccagcgactcaccgggcgcagagatcctgatcaaggtgcaggtgtatgtgagcggggagctggtgcccctggcccgggcctcagtggatgtgtttgggaaccggactctgctggcagctggcaccacagactcagagggtgtggccaccctgcccctcagttatcgcttgggcacctgggtgctggtcactgctgcccgccctggcttcctcaccaactctgtgccctggcgtgttgacaagctgcccttgtatgcgtctgtcagcctctacctgctccctgagcggccggccacgctcatcctctatgaggacctggtgcacattctcctaggctctcccggtgcccgctcccagcccttggtgcagttccagcgccgggctgcccgcctgcctgtcagctccacctacagccagctctgggcgtcacttacgcctgccagcacccagcaggaaatgcgggcctttccctgccttcctgggcactgaggcctccagctcaggcaatggctcctggctggagctgatgcccctgactgctgtgagcgtgcacctgctgacaggtaatgggacagaggtgccgctctcaggccccattcacctgtccctgcccgtgccctccgagactcgtgccctcaccgtgggcaccagcattccagcctggagatttgaccccaagagtgggctgtgggtgcgcaatggcactggtgtaatccggaaggaaggccggcagctctactggaccttcgtctccccccagctggggtactgggtggccgccatggcctcccccacggctgggctggtcaccatcacgtcgggcatccaggacatcggcacctaccacaccatcttcttgctcaccatcctggcagccctggccctgctggtgcttatcctgctgtgtctgctcatctactactgccggaggcgctgcctgaagccgaggcaacagcaccgcaagctgcagctctcggggccctctgacggtaacaaacgagaccaggccacctcgatgtcccagctccacctcatctgtgggggacccctggaacccgccccgtcgggggaccccgaggctccgcctccaggccccctccactcggccttctccagctcccgggacttggcctcctcccgggatgacttcttccgcaccaagccgcgctctgccagccgcccgcgccgccgagccttcgggtgcccgcgggggcgagagcgccgggctcaagggcgctcgctcggccgagggccccggcgggctggagcccggcctagaggagcaccggcgggggccctcgggggctgcggccttcctgcacgagccgccctcgccgccgccgcccttcgaccactacctgggccacaagggggcggccgagggcaagacccccgacttcctgctgtcgcagtcggtggaccagctggcgcggccgccgtcgctgggccaggcggggcagctcatcttctgcggctccatcgaccacctcaaggacaacgtctaccgcaacgtcatgcccaccctggtgatccccgcgcactacgtgcgcctcggcggcgaggcgggcgccgccggcgtgggcgacgagccggccccgccggagggcacggcacccggcccggcgcgcgcttttccccagcccgacccccagcgcccgcagatgccgggccactcgggcccggggggcgagggcggcgggggcggcggcgagggctggggggccgggcgcgcggcgcccgtcagtggctcagtcaccatccctgtgctattcaacgagtccaccatggcgcagctcaacggggagctgcaggccctgaccgagaagaagctgctggaactgggcgtgaagccgcacccgcgcgcctggttcgtgtccctcgacgggcgctccaactcgcaagtgcgccactcttacatcgacctgcaggcgggcggcggggcacgcagcaccgacgccagcctggactcgggcgtagatgtccacgaggcgcggcccgcgcgccgccggcccgcgagggaggagcgggagcgcgccccgcctgccgcgccgccgccgccgcccgcgcccccgcgcctggcgctcagcgaggacacggagcccagcagcagcgagagccgcacgggcctctgctctccggaggacaactcgctgacgccgctgctggacgaggtggcggcgcccgagggccgggcggccacggtaccccgggggcggggccgcagccgcggggacagctcccgcagcagcgccagcgagctgcggcgcgactcgctcaccagcccggaggacgagctgggggcggaggtgggcgacgaggcgggagacaagaagagcccgtggcagcggcgggaggagcggccgctgatggtgttcaacgtcaagtag

SEQ ID NO: 19450 - DNA, 1127 bp, Homo sapiens
  SIMILAR (465)..(1124): 801254mologous to Homo sapiens NADH-ubiquinone oxidoreductase 39kDa subunit,accession number AF050641,Smith-Waterman Score=893.
aacgagcctctgactccaggttatcatggattcccagcgcgggacagccagatttgggaggcatttatcagcgtgaaacactggtcgctgaacagtctgagctggcggaaatggaacttgtgatctttacgtctcctcagcatggttttggctcagcaaatcgaggaactggggaatggggtgaagggtggtttacatcccctaactggaaagtggcagccatatctacgccttctcccatgagtcgctactgctgcatgtggccagtgcctctgtctagaccagcttctcagatttcgccacatccgtgtgtcacagcccactccattgccagcttcatcatgccctcatacctcatgggaaaggtgaatgttcctcaagtcagtgggattgtggccactgggtttggagcaacaggattcctgggccgatgtgttgtcaaccaccttggacgcgtggggtcacagattccccaagcaattgctcaggtgtccaaggaagctgaagttggaaaattcattcatgttgcacatctgaatgtgaatattaaaagctcttctagatatttgagaaagaaggctgttggagagaaagcagtgagagacacatttccagaagccattatcgtaaagctgttggacatctttggaagagaggatagattccttaattattttgcaaatatgtgttggtttggtgctataccccttgtttccttgggctggaaggcagttaaacaaccagtatacgtcgtagatgtatccaaaggaattgttaatgcagttaaggatcctgatgccaatgggaaaacctttgctttcgttgggccaaatcgatatctcctctttgacctggtgaagtacatctttgctgtggctcacagcaaagggtgggtagcaagagactttgaaataagcccatttgagtcctggacaacaagggataaagtggagcgtattcacatcacagacatgaccttgtctcacctgcccagcttagaagaccttggtattcaggcaacaccactggaactcaaggccattgaggtgctgcggcttcatcacacttactgctggctgtctgctgaaattgaggatgtgaagctggccaagaccgtcaacatttag

SEQ ID NO: 19451 - DNA, 553 bp, Homo sapiens
  SIMILAR (459)..(1): 981254mologous to Homo sapiens A suppressor of cytokine signalling protein designated HSCOP-3,accession number Y53883,Smith -Waterman Score=792.
  misc_feature (1)...(553): n = a,t,c or g
ttcaattatttcatgtacaaactcaggtgggtttccttcttcacaagtggcttcanagtcaataatacaaatgtagtcataataactgtcagcaaaattgctctctttcagcatcagcttctgcttcttataatagtttttcagtctcttctttagaacatcctttactcctctagtttcaagcttgaattctgaaagcttagctctgagttcttccttactcattctattaatacagccattcgtaatggcaatctctttgtaaaccgggtcactgaagtcactcgctctggaggtaatgaacttggatccttttgtctcctggccatcaaatttacactgttgagtttcctcgggactgggacgcggcggctcctccccgccctccggccgcggcgactccagcagcgcgggagccacggcctcgccggcaggctctttactctgtggatcctccatgccggctgtcacgccagaggagagttgctggagccggacacttgctaactctcactctgcagagcccgaaagcctcgcctttctacgttgaaaa

SEQ ID NO: 19452 - DNA, 566 bp, Homo sapiens; identical to SEQ ID NO: 12150
  SIMILAR (25)..(378): 941254mologous to Homo sapiens Q1Z 7F5,accession number M81806,Smith-Waterman Score=604.

SEQ ID NO: 19453 - DNA, 904 bp, Homo sapiens
  SIMILAR (136)..(699): 461254mologous to Homo sapiens Q1Z 7F5,accession number M81806,Smith-Waterman Score=314.
agtaagcgcagttgtcgtctcttgcggtgccgttgctggttctcacaccttttaggtctgttctcgtcttccgttccgactctctctttttcgttgcagccactgaagatcctggtgtcgccatgggccgccgccccgctccgttgttaccggtattgtaagaccaagccggtacccaaagtctcgcttcttgccgagggtgtcccttgatgccaaggattcgcatttttgaccctggggcggaaaaaaggcaaaaagtggaatgagttcccgcttttgtgcccaacatggtgtcagatgaatatgagcagctgtcctctgaaagccctggaaggctgccccgaatttgtcccaataaagtacatggtaaaaagttgtggcaaagatggcttcccatatcccgggtgcggctccacccccttccacgtcatccgcatccacaagatgttgtcctgtgctggggctgacaaggctcccaaacaggcatgccgaggtgccttttggaaaagccccaagggcaacttgttggccaggggttcacaattggcccaagttatcatgtccatccgcaaccaagcctgcagaacaaggagcatgtgatttaaggccctgcggcaaggccaagtttcaagtttcctggccgccagaagaatccacatcttcaaagaagtggggctttcaccaagtttcaatgctgatggaatttgaaagacatggtggctgaaaagcgggttcatccccacatggcttgtgggggtcaaagtacatcccccagtcgtggccctctggaacaagttggcgggccctgccactccatgaagggcttcccaatgttgctgcccaccctcttaatactcccccaataaaattcctacttccctggtccaaaaaaaaaaaaaaaaaa

SEQ ID NO: 19454 - DNA, 515 bp, Homo sapiens
  SIMILAR (434)..(514): 1001254mologous to Homo sapiens cytomegalovirus partial fusion receptor,accession number AF189251,Smith-Waterman Score=140.
gcggccgctccgggagaaggcggcggtggcggcgtggtctggtccgcagcgggacggccgcggcgaggcggagcagccgggcggcagcggcggcacaggggcccccgccggcgcctcagctcacagagacgctgggcttctacgagagcgaccggcggcgggagaggcgccggggccgcacagagctttcattgttgaggttcctcagtgctgaactaacaagagggtacttccttgaacattatgaggccaagtttacagaaagaggagaaagagtatgcacttgtttgcgaataccaagagaattggaaaagctgatggtttttggaatctttctgtgcctggatgcgtttttgtatgttgttcaccctgcttcctttaagagttttcctgggcactattcaggctcctcactttgccttgctatggcttaagggacagacgtttgcttcagcctgcccaggtgtgtgacattttgaagggtgtcattttggtaatctgctattttatgatgc

SEQ ID NO: 19455 - DNA, 3492 bp, Homo sapiens
  SIMILAR (1670)..(1260): 741254mologous to Homo sapiens Human fetal brain cDNA clone vc11_1 derived protein,accession number Y50924,Smith-Waterman Score =477.
  misc_feature (1)...(3492): n = a,t,c or g
cttttggttgttttcccaacaagccataacaagatgcttccccacaccaacagccacccatacgcctcaaacaccccatttactttcacacaaaatcctctccagacccaggcttgccccatccccagcacaggcccaccctgatagtcacatccccacagacaccctcccacagaacacacaccttgccccagcacaggcacactcgctgtcgacccaaacacaaagactaatgcatttggtaagcccaagcaagatgatgctgtctaacacacttggagcatttactttacagttaaagttgacagtttggaattttgtacattgacaatttttcagcctgttcaacatcgaatccttttagctgtaataatttatgaagtaattagttttaaagcaaaatcagttaagtataccttaaagttaacactgctctgcttccttggtgtaaaaagtgcccttttgtaaggaaatttgttttatccaccaattaaatgacatacagctcacattttgctttaaagagtaaactgaaaaattatgaaggatttttcccagtaatgcatagccttcattaattatttttttaataaataaaactagttagccttttttttttaacccctacaaaatggctctattcatcatgtcttatttaaggtagcgcttttatttctgattaattaagatacatctttaagtggttattctggtggtaagaacatttatcttgacttatgtttaatttttttaatgctttggcagatgaagtaacgtttgaaaactgtttgtgaaaatagtatgagactggaaagaaattanccgctcgtggtaaaagtttcacagttttccagggtatttccttatactgaagaggccttgaggcaaattcaacattctgggaagcccagactgacaaaggcaaaacaggattttgatgttgcctttgttgggtcctgggaaatgatgctgactgcttggccagggcaggagggaagttttaataatccatcaagcttccccagacagtcaaaggccggaaggtcgctccctgtccctgtgggtctgacccctnaagcccaggcccatattactgggaagaaagaataactaaagatttgcttgcccaataaataatttaaagtttttaaaataaatatttaaagtgcccatgtttagcatcctatttgtccctggcaacacagcacttgttgcccccaggacccagcttcttcagcgcattgaaagccacagattcagtcaattcggtttccacaaattgtgaacctgtctatctctaacaaatctttctttgaggatctgtgttttaattcagaattgtcctgcggttatgtccttctcgtcaccatctggagttgtcaaaacctgatcagcacctgcttgtcacaagtaatggtatgatattttccttttgatgaagtaggttgtttggtgatggaggcagacaggttttcttctgtggaaaggccttgagagggtttacatttgttctgtgatttactggacggcttgcctggagtgcaggttgcgggaggattcgacagcttctcttccattttggcttccttcacatactggcacgatttccccaacagcacgatgctattaagtactttcagggatatcaaccttggcatgaatataattaagaaatcagccgtgtgcttctcacgtttgggctccgagacgtgggagatgcccgctaacctaagaccttccgagggcggtgcaaggacccggacagaactttcccggccgcagaccccttctagggcacacctggcctggcgcggccgcgggggcctcggggctgtgcggccccggcgcctctcccgccgccggtcgctctcgtagaagcccagcgtctctgtgagctgaggcgccggcgggggcccctgtccgccgctgccgcccggctgctccgcctcgccgcggccgtcccgctgcgggccgtccacgccgccaccgccgccttctcccggagcggccgcgtcgccgacgcccgccatgttccgagcacaacaaactgtccccgccgcctccctccagcctctgcctccggccggccccctccccgcctcgccccgcccctcgccggagcccgagccgccgccgccgccgccgccgccatccgcggcccgccgaccggcgcgagccattggcgtcagcgacgcgtgtgaggccgctgccgccgccgccgccgccacggtagccgccatcttcttcctgccctcgccgtggcgggcgacggtttctcgcgccgtggctggctcggccggccggggcaccgcgccgggctccatgcagccgggctgcgcggtcccgcagagcgggcgcctccggggctcgagtcggggacccggcaggagcgggccggggatggcggcggcgggcggcgggtcggccgtggagccccggagaggcggccgccaccaccgctgcccgcagtctgcgaggtgtccggcggtccgctcagggcctcttttgcagactcggtgcccggagtgcgccggcgccgcccgccaggtcttggcactcccctttccagctctggcgtgtgaccccgcaacgagcgtggtgtcgagaccaccaccagctggggcggtgggagcgaaggtgccccaggctcgggggaaggtggaaaccttttccccgctccccaagtgattgttgcgcgctccggtgaggggacagtggtacctcgatttcccgtgtgccagcttcgggactcagctgtgcttttgtgtctctttgattagcaaaagcaaaacgaattcctccccgaacactaagcttcctggaaacttccctagacctaaacaacatgatactcacaatagttattacgcgaagtgcaacctcaaccggatcagaaaaacctccctttccttggatctttccattcacccgtgtttttcctctgttcctctgaacctcaaaccccctgagggaacagggtaccatgatgcagtcacagccagtgagtgccctgggtttgggaataaggagatcctcattgtccacactaagtgcaaggaaagaaattacgcagcccacaagaatgccatctgtgctcccactgcagcttgggctgacttctgtgaagctacactctttactagttgctcccttacaagaccatgaactttctaagagcaggccccatgtatccctatattctcgaagtccagccctagtccagcgtgctctctcccctacatcaaaatgatcaaccatctctctgacattataatttggctgtgattcatggtgaaggagtaagaaggtacagtgcctcactgccagagccatcgagttagcctcgctgcttctgctctgcccagaccattccaccttatagactttctggggcatgaattttttaattcggatgattaaaatgattttattgtagggatgaccttgaatctgggcctttatttccccaaagtccttgggcctcgtaggcat

SEQ ID NO: 19456 - DNA, 256 bp, Homo sapiens
  SIMILAR (1)..(129): 1001254mologous to Homo sapiens Secreted protein encoded by alternate reading frame of clone dh1135_9,accession number W85460,Smith-Waterman Score=237.
ggcataaggaaagggagatgctggcctctgtgctcctgctgtcttttcctgtttctgtttgcgtttgacttagtagcaaccgacagagtggcaagggatttggttttcagcagtagacatccttccaccttttcctcccactacagcctcaacagtatgtaccatctcccactgtaaatagtcccagttagaacggaatgccgttgttttataactttgaacaaatgtatttactgcccttttcaaaaaaaaaaaa

SEQ ID NO: 19457 - DNA, 2309 bp, Homo sapiens
  SIMILAR (927)..(1205): 1001254mologous to Homo sapiens Secreted protein encoded by clone dh1135_9,accession number W85459,Smith-Waterman Score=474.
  misc_feature (1)...(2309): n = a,t,c or g
tgccccatcctccgcaagcagacgtcagattccaaccctcccatcaagctcatctgtggccatgttatctcccgagatgcactcaataagctcattaatggaggaaagctgaagtgtccctactgtcccatggagcagaacccggcagatgggaaacgcatcatattctgattcctacctggaaggaattttgttgaaaggggttttcacctgtgagccttggtctgtctcggtagggtggtcaacttcagtggactgtggttggtttcagagcgcctggctgaggagttccactgaggggagcactggagcagccctttggcagaggcttaggagggagttgctcggactcaaacgtccagtcctcgtgcgaccgcgctgggtcggaagtgagcaggctgaggccaccatggagcagtgtgcgtgcgtggagagagagctggacaaggtcctgcagaagttcctgacctacgggcagcactgtgagcggagcctggaggagctgctgcactacgtgggccagctgcgggctgagctggccagcgcaggtgggtggccacccttgcaagtgccctgcgacagcctccctgaggacatgggagacccgaagctactgagtgacagggttccggaaggacgatgatgaggatgttggtacctgcatctgtaggcctccttgaaaccggccctccaggggacccctctctcagccaccctctctctggtgatgtcacagtgctgccggaagatcaaagatacggtgcagaaactggcttcggaccataaggacattcacagcagtgtatcccgagtgggcaaagccattgacaggaacttcgactctgagatctgtggtgttgtgtcagatgcggtgtgggacgcgcgggaacagcagcagcagatcctgcagatggccatcgtggnaacacctgtatcagcagggcatgctcagcgtggccgaggagctgtgccaggaatcaacgctgaatgtggacttggatttcaagcagcctttcctagagttgaatcgaatcctggaagccctgcacgaacaagacctgggtcctgcgttggaatgggccgtctcccacaggcagcgcctgctggaactcaacagctccctggagttcaagctgcaccgactgcacttcatccgcctcttggcaggaggccccgcgaagcagctggaggccctcagctatgcttcggcacttccagccctttgctcggctgcaccagcgggagatccaggtgatgatgggcagcctggtgttacctgcggctgggcttggagaagtcaccctactgccacctgctggacagcagccactgggcagagatctgtgagacctttacccgggacgcctgttccctgctggggctttctgtggagtccccccttagcgtcagctttgcctctggctgtgtggcgctgcctgtgttgatgaacatcaaggctgtgattgagcagcggcagtgcactggggtctggaatcacaaggacgagttaccgattgagattgaactatgcatgaagtgcttggtaccactccgtgttcgcttgccccatcctccgccagcagacgtcagattccaaccctcccatcaagctcatctgtggccatgttatctcccgagatgcactcaataagctcattaatggaggaaagctgaagtgtcggtactgtcccatggagcagaacccggcagatgggaaaacgcacntcatattctgaatccttacctggaaagaaattttgtttgaaaagggggttttcaacctgtgagccttgggtcctgtctcggtagggtggtcaacttcagtggactgtggttggtttcagagcgcctggctgaaggagttcccactgaggggagcactggagcaagccctttggcagaggctgaaggagggaagatggaccagcccacgccctggcaccctggctcccatggccataaggaaaggggagatgctggcctctgtgctcctgctgtcttttcctgtttctgttggcgttttgactttagtagcaaccgacagagtgggcaagggatttggtcttcagcaagtagacatccttccaccccttgccctcaagccaagtctcttgcttgccatgccaatgctatgtccaccccttgcccctcggcccaagagtgttccagcggtgggcccacctcttcctcccactacagcctcaacagtatgtaccatctcccactgtaaatagtcccagttagaacggaatgccgttgttttataactttgaacaaatgtatttactgcccttctcatttctcctggc

SEQ ID NO: 19458 - DNA, 455 bp, Homo sapiens
  SIMILAR (376)..(254): 421254mologous to Arabidopsis thaliana F14O23.14,accession number AC012654,Smith-Waterman Score=81.
gtgcttctcctaggaatttataattgagactcagctcttccagttggcttggaatgagattctatggacttggagcagagaatctgactgaacagtctttccagattctgctccatccatttcacttcctgaaggaacaggaagctcggaagcaggagctccgtgtctggggaactctgtttgagagaggatgatcccagctgtggcatgctgggactccctggaagggctcgctgcaggcctgcgccccacttgctttctgttttgtaggactcacccgcaaaaaggactgcttctctccacaagctttgcatgtccacttgacactcttttttacctggtgcgcctggaagaggcgacagctgcagcagcgtagcacccgagaacgctgaagcaacgccaaccctgcttgtgcagtcgccaggcagccaagcgacgaaatcgtcgacccgggg

SEQ ID NO: 19459 - DNA, 726 bp, Homo sapiens
  SIMILAR (601)..(726): 801254mologous to Homo sapiens Similar to truncated calcium binding protein,accession number BC002739,Smith-Waterman Score=183.
  misc_feature (1)...(726): n = a,t,c or g
ttagtacccctgcggtaccgctccggaatttccgggtcgacgatttcgtcgcttcagcgttctcgggtgctacgctgctgcagctgtcgcctcttccaggcgcaccaggtaaaaaagagtgtcaagtggacatgcaaagcttgtggagagaagcagtcctttttgcgggcttatggtgaaggctctggtgctgattgtagacgccatgtccaaaagttaaatctactaccgggacaacgtttcagagctgccactcaagtctccagaagaaactgtcagtgccagtgaagaataaaacgtgggacaccagcaggctgggaggtgtgaaacagcaagtaaatatcgcagccctcagagaggttgttggctaaagtatctagaaaaggactcccaagaactggagctggaaggaacaggagtgtgtttcagcaaacagccttcatccaaaatggaggagccaggcccccgcttcagtcaagacctgcctagaaaaaggaagtggagcaggagcaccgtccagcctccgtgcagccgtggcgtgcaggactcgggtggctctgaggtcgcctggggaccccagaagggacaggctggcctgacatggaaggtgaaacaaggcagcagcccctgccttcaggagaactctgcagaactgcagtgccgggagctgaggggtcctgggaagggagctatgagtcccatccagcangttacagccacatcctc

SEQ ID NO: 19460 - DNA, 1283 bp, Homo sapiens
  SIMILAR (353)..(859): 431254mologous to Homo sapiens truncated calcium binding protein,accession number AF153685,Smith-Waterman Score=250.
  misc_feature (1)...(1283): n = a,t,c or g
aattcccgggtcgaggcccttctgctaaaattcttttgtaggcaccggtaacctgattctaaggtccccaggagatggatcacctgatgacatgagaatgtcttgtttttggaaagcctggtcatgcaatttagcagaaggtttgcggtgaggtggaaggcatttatttgctttgtcttgctaaccctcaaaatcaaagcctgtcccagcctgacagcttccagcagaaagtgtcagaaccagaggcccagccaaggcccaggcaagggcaggcggtcctcctgggccctggcattgttcttacaaatggagggcatggccatcttctctttcagggacaggctggcctgacatggaaggtgaaacaacggcagcagcccctgcctccagggagaactctgcagactgcagttgccggggagctgaggggtcctggggaaggagctatgggagtcccatccaggcaggttacagccacatcctcttaaatggggcgcgattttgtcctggccacctaggaaaaagtttcacatgtggacagttgaggcagccaaggtctcttcagaggggaccccaggccatgctggtccagcacaggctaagcaagggacccccagagcacaggcctcaagagaaagcctacagcaggcccactgccgctgtcccaacttccctcgggccnacaacaccccgtccacatctgggtcctgaaaaggccttgcgggaaaaacctccatgggacgcaaaggactcccctgggccagagggtgggccccctggtccctggaggcacagaatccctcgacccacacgactatgtgacctctttataactggggaagacttcgatgatgatgtgtgatctgggactggcaggttattaatcgagatacacttgttaggagggcacagggttcccataaggcacttttaaagatactctgtaagaaccattaacaataaacttactgtcaatcatttctctctatgcaaacgtcattggttaaagtgctgatgccatttaattagattgtttgcaaatttaacaggatggctacaaagagatcttattttaaaagcagctgatggtttggaaatgagagagctacagtggtgaagagaccaggaggcagctctcagtgaaaccaacattgcggatgcccttcgtgagccttctcagtcccagcaggaagccctcaacactggcctccccagcctgcctgctgacaacacctaggcttgctttatctaaaatgaattcctccgcagtgtactgctattct

SEQ ID NO: 19461 - DNA, 837 bp, Homo sapiens
  SIMILAR (110)..(535): 431254mologous to Homo sapiens 60S ribosomal protein L15,accession number AF279903,Smith-Waterman Score=178.
  misc_feature (1)...(837): n = a,t,c or g
ggaattcggcggcagccatcaggtaggctgcgttgaggatctttgctcttccatccgcctttgatcgtcttcctcttcagccatccagcgtaagccaagatgggttctatacaagtacatccaggagctatggagaaagaagcagtctgatgtcatgcgctttcttctgagggtccgctgctggcaggtaccgccagctcgtctgctctccacagggctccccgccccacccgggcctgataaatgcgcgccgactgggctacaaggccaagcagggttacgttatatataggattcgtgttcgccgtggtggcccgaaaacggcccagtttcctaaagggtgcaantttacgggcaaagccctgtccattcatgggtgtttaaccagcttaaaagttttgcttcggaagcctttcagttccgtttgccagagggaggcgaagcttgggacggcacttgtggggggcttcttgaggagttcctgaatttttttaattgggtttgggttgaaagattcccacattaccaaatttttttgaaggttattcctcatttgattcctttcccttaaaagctattcagaagaaattcctggacacccagttgattcaccaaaaccaggtccacaagcacaggggagatgcgtggggctgacatctgcaaggcccgaaaagagccgtggccttggaaagggccacaagttccaccacactattggtgggctctccgccgggcaacttggagaaggcgcaatactctccaagctccaccgttaccgctaatataagtaaagtttgtaaaattcatacttaataaacaatttaggacagtcaaaaa

SEQ ID NO: 19462 - DNA, 506 bp, Homo sapiens
  SIMILAR (1)..(162): 701254mologous to Homo sapiens myosin regulatory light chain,accession number D50372,Smith-Waterman Score=174.
caggaagattacctaagagagctgctgacaaccatgggggatcgggtttacagatgaggaagtggatgagctgtacagagaagcacctattgaccaaaaagggggaatttcaattacatcgagttcacacgcatcctgaaacatggagccaaagacaaagatggactgaaagaactttagctaaaatcttccagttacattgtcttactctcttttacttctcagacacttcccccacccgtcatagaaccgtgttgcatgcaacttagtttcacagctttgccgtcttctttttgatgtatttattccagacctttctgccacttagcacttgtataatcagactggaaatggggatgagggtgtaaattgtattgaaaaagatcgcgaataaaaatcaacaaatgtgaaagcccagaaaaatatattcgtatttctggttttgctggatttttacatttttatataataaaaatgttattttgaaataaagattatgctgactc

SEQ ID NO: 19463 - DNA, 1076 bp, Homo sapiens
  SIMILAR (173)..(382): 501254mologous to Homo sapiens Similar to myosin regulatory light chain 2, smooth muscle isoform,accession number BC002648,Smith-Waterman Score=134.
  misc_feature (1)...(1076): n = a,t,c or g
acagtctgctggaattcgcggcagcgaggggctcggagaggtgctcggattctcgtagctgtgccggcccacaatgattctgagctaaaacacaaaataaaaaccagattcattgccaccagcgctcacctcgcctgacttaaaaaaaaggacttaaccaccaccatgtcgagcaaaacaacaccagaccaagaccaagaagcggccctcagcgtgcaacatccaattgtgtttgctatgtttgacccagtcacagattcaggagttcaaagaggccttcaacatgattgatccagaccaagatgggtttcatcgaccagggaagatttgcaatgatatgcttgcttcattgggggaagaatccaacttgatggagtatcttagatgccatgatgaatgagggctccaggccccccatccaatttcaccccatggttccctcaccatggttttggtgaggaagtttaaatggccaccagatcctgaaagatggtcatcagaaaatgccctttggcntgctttgaatgaaagaagccactgggcaccatacggggaagattacttgaagagagctgctgacaacccatggggggatcggttttacagatgaggaagtggatgagctgtacagagaagcacctatttgataaaaaaggggaatttcaattacatccgagttcacacgcatcctgaaaccatggagccaaagacaaagatgactgaaaatactttcaaattcccagccaaacgttccttggttggccacttttggggtattcctgagatttttctcttgcatggcccttaggctttagcagctttttgcatttcctgttggtatttattctcagccattttgggcatatgtatctttataatcagactggaaacgggactttctattaatatcattttcgagaataaaaaataggataatttaacctaccagcccttctcccccaataactggtgggtctatacagagtcaatatattttttcagagaaagttagttcggctcgatttttttctgaatcataattaaactttatgataaattaaaaaaaaaaaaaaaaa

SEQ ID NO: 19464 - DNA, 429 bp, Homo sapiens
  SIMILAR (71)..(424): 381254mologous to Araneus diadematus fibroin-3,accession number U47855,Smith-Waterman Score=176.
aggtggcctgcctgcgggagcacaagcagcgctgtgagcgcgccacgcggagcctgctgcgggagctgctccaggtgcgggcccgcgtgcagctgcagggctcagagctgaggcagttgcagcaggaggcgcggccggcagcccaggcccccgaaaaggaggcgccggagttctctggtctccagaaccagatgcaggccctggacaaaaggctggtggaggtccgggaagccttgacccggctcaggaggaggcaggtgcaacaggaggcggagagaaggggcgccgagcaagaggccggcctcagactggccaagctgaccgacttgctgcagcaggaggagcagggccgggaggtggcctgcggcgccctgcagaagaaccaagaggacagcagccggagggtggacctggaggtggccagaatgc

SEQ ID NO: 19465 - DNA, 2628 bp, Homo sapiens
  SIMILAR (249)..(2333): 971254mologous to Homo sapiens CLC-7 chloride channel protein,accession number Z67743,Smith-Waterman Score=3461.
cgcttcccggccggtgtcgctccgcggcgggccatggccaacgtctctaagaaggtgtcctggtccggccgggaccgggacgacgaggaggcggcgccgctgctgcggaggacggcgcggcccggcggggggacgccgctgctgaacggggctgggcctggggctgcgcgccagtcaccacgttctgcgcttttccgagtcggacatattgagcagcgtgaagctggatgatgaacttttggaaccggaatatggaccctccacatcccttccccaaggagatcccacacaacgagaagctcctgtccctcaagtatgagagcttggactatgacaacagtgagaaccagctgttcctggaggaggagcggcggatcaatcacacggccttccggacggtggagatcaagcgctgggtcatctgcgccctcattgggatcctcacgggcctcgtggcctgcttcattgacatcgtggtggaaaacctggctggcctcaagtacagggtcatcaagggcaatatcgacaagttcacagagaagggcggactgtccttctccctgttgctgtgggccacgctgaacgccgccttcgtgctcgtgggctctgtgattgtggctttcatagagccggtggctgctggcagcggaatcccccagatcaagtgcttcctcaacggggtgaagatcccccacgtggtgcggctcaagacgttggtgatcaaagtgtccggtgtgatcctgtccgtggtcgggggcctggccgtgggaaaggaagggccgatgatccactcaggttcagtgattgccgccgggatctctcagggaaggtcaagctcactgaaacgagatttcaagatcttcgagtacctccgcagagacacagagaagcgggacttcgtctccgcaggggctgcggccggagtgtcagcggcgtttggagcccccgtgggtggggtcctgttcagcttggaggagggtgcgtccttctggaaccagttcctgacctggaggatcttctttgcttccatgatctccacgttcaccctgaattttgttctgagcatttaccacgggaacatgtgggacctgtccagcccaggcctcatcaacttcggaaggtttgactcggagaaaatggcctacacgatccacgagatcccggtcttcatcgccatgggcgtggtgggcggtgtgcttggagcagtgttcaatgccttgaactactggctgaccatgtttcgaatcaggtacatccaccggccctgcctgcaggtgattgaggccgtgctggtggccgccgtcacggccacagttgccttcgtgctgatctactcgtcgcgggattgccagcccctgcaggggggctccatgtcctacccgctgcagctcttttgtgcagatggcgagtacaactccatggctgcggccttcttcaacaccccggagaagagcgtggtgagcctcttccacgacccgccaggctcctacaaccccctgaccctcggcctgttcacgctggtctacttcttcctggcctgctggacctacgggctcacggtgtctgccggggtcttcatcccgtccctgctcatcggggctgcctggggccggctctttgggatctccctgtcctacctcacgggggcggcgatctgggcggaccccggcaaatacgccctgatgggagctgctgcccagctgggcgggattgtgcggatgacactgagcctgaccgtcatcatgatggaggccaccagcaacgtgacctacggcttccccatcatgctggtgctcatgaccgccaagatcgtgggcgacgtcttcattgagggcctgtacgacatgcacattcagctgcagagtgtgcccttcctgcactgggaggccccggtcacctcacactcactcactgccagggaggtgatgagcacaccagtgacctgcctgaggcggcgtgagaaggtcggcgtcattgtggacgtgctgagcgacacggcgtccaatcacaacggcttccccgtggtggagcatgccgatgacacccagcctgcccggctccagggcctgatcctgcgctcccagctcatcgttctcctaaagcacaaggtgtttgtggagcggtccaacctgggcctggtacagcggcgcctgaggctgaaggacttccgagacgcctacccgcgcttcccacccatccagtccatccacgtgtcccaggacgagcgggagtgcaccatgggacctctccgagttcatgaacccctccccctacacggtgccccagggaggcgttcgctcccacgggtgttcaagctgttccggggccctgggcctgcggcacctggtggtggtggacaaccgcaatcaggttgtcgggttggtgaccaggaaggacctcgccaggtaccgcctgggaaagagaggcttggaggagctctcgctggcccagacgtgaggcccagccctgcccataatgggcactggcgctggcaccccggcccttctgcatttcctcccggagtcactggtttctcggcccaaaccatgctccccagcagtggcaatggcgagcaccctgcagctgggcgggcaagcggcaggcgcggaactgaccctctcgcgggac

SEQ ID NO: 19466 - DNA, 4413 bp, Homo sapiens
  SIMILAR (1711)..(2583): 841254mologous to Homo sapiens chloride channel protein 7,accession number AF224741,Smith-Waterman Score=1208.
ctgttgcccagttttcccgtctgcgaaaaagttaacgcatgcatagcgctgagcacggtgcctgtcacaaactacgccctgttctcaggccggtcttgctttgtgtggtgtagtggtgaattgaccaagccagtcactgctcatctggtggtgttgggacagggcgagggtgaggtcagcatctgcctcaggggacctgacggctccagggccctcttgcgagtggacctgcgggagctgtctttttctgactggcttatttcacggggcacagtgtcctccggcccgtcgtgctgcagcacgggtcggtggtcattcctctttatggctgaattattccattgcggggagaggctgcatttccttgactcactcatccatcggcacagcaggtgcttccgcattttggtcattgtgaacggtgctgctgtgaacatggcgtgcaagtgggactttcagacgctctgcttttagtcaccacgttctgcgcttttccgagtcggacatatgagcagcgtggagctggatgatgaacctctgccgcagtcgctcccgaggccggcgccgtgctcagatgccgtcctgtacagccagcagcgcctcttccggggctgcccttctgatacgtttgtgctgcctctggagccacaaggccttcggaagatctgtttcgtggccgtgggcgccttcggcactgcctttttggacttcaaagttctgccacaggatatggaccctccacatcccttccccaaggagatcccacacaacgagaagctcctgtcccccccctgccagcccactcccggtcccctgtgcccgcacccagagcgtgggttcggtgctgagtgctgcccttgctgtcccggcctgcagagcttggactatgacaacagtgagaaccagctgttcctggaggaggagcggcggagcgccctgcaggccttccggacggtggagatcaagcgctgggtcatctgcgccctcattgggatcctcacgggcctcgtggcctgcttcattgacatcgtggtggaaaacctggctggcctcaagtacagggtcatcaagggcagatgagccccagatatcgacaagttcacagagaagggcggactgtccttctccctgttgctgtgggccacgctgaacgccgccttcgtgctcgtgggctctgtgattgtgggctctcctcagctcctggggctcctggggctgaggggctgcatctgtctcagcctggccgtgacccactcagccgtgcttcccctctttcagccggtggctgctggcagcggaatcccccagatcaagtgcttcctcaacggggtgaagatcccccacgtggctgtgtttcagacgttggtgatcaaagtgtccggtgtgatcctgtccgtggtcgggggcctggccgtgggaaaggtaacaaagtgcacatggccactccagctggagcctgaggccgccgggcccgcgagggccctggtctccaggaagggccgcgtcacgcgtgtctctgagcaccggtccttctggtctccaggaagggccgatgatccactcaggttcagtgattgccgccgggatctctcagggaaggtcaacgtcactgaaacgtggtctgcagcacggtgctcttcaggaatcagagctgctgactcggttgtcctgaaagccccttcccctgcacagcccctgtcctggcagttgctctccctttctgagagccgtgccctcaaggaacctgccctgttgcagatcttcgagtacttccgcagagacacagagaagcgggacttcgtctccgcaggggctgcggccggagtgtcagcggcgtttggagcccccgtgggtgaggagggccgcaccgggtccaatgctttctgccttccaggtggggtcctgttcagcttggaggagggtgcgtccttctggaaccagttcctgactctgccgcagttctttgcttccatgatctccacgttcaccctgaattttgttctgagcatttaccacgggaacatgtgggacctgtccagcccaggcctcatcaacttcggaaggttctctgcacagaaaatggcctacacgatccacgagatcccggtcttcatcgccatcctgttcgcaggcggtgtgcttggagcagtgttcaatgccttgaactactggctgaccatgcttggttccaggtacatccaccggccctgcctgcaggtgattgaggccgtgctggtggccgccgtcacggccacagttgccttcgtgctgatctactcgtcgcgggattgccagcccctgcaggggggctccatgtcctcgaccccacagctcttttgtgcagatggcgagtacaactccatggctgcggccttcttcaacaccccggagaagagcgtggtgagcctcttccattctctcctaggctcctacaaccccctgaccctcggcctgttcacgctggtctacttcttcctggcctgctggacctacgggctcacggtgtctgccggggtcttcatcccgtccctgctcatcggggctgcctggggccggctctttgggatctccctgtcctacctcagggccctgcagctgagccaggtcttgcggcatcgcgggccggagcagaagtcccagggcaggacaaaagtgtcgcacctcacgtggttcacgggccgtgggcgttgtcctcgcgtggttcacgggccgtgggcgttgtcctgctgtggtggcagcgtgtactgtggcagcgcagcccatgtgtggagtctggacctcccacagatctgggcggaccccggcaaatacgccctgatgggagctgcggctcccgcaggcgggattgtgcggatgacactgagcctgaccgtcatcatgatggaggccaccagcaacgtgacctacggcttccccatcatgctggtgctcatgaccgccaagatcgtgggcgacgcccgcccgcagggcctgtacgacatgcacattcagctgcagagtgtgcccttcctgcactgggaggccccggtcacctcacactcatcctccggcagggaggtgatgagcacaccagtgacctgcctgaggcggcgtgagaaggtcggcgtcattgtggacgtgctgagcgacacggcgtccaatcacaacggcttccccgtggtggagcatgccgctgtcttgcagcctgcccggctccagggcctgatcctgcgctcccagctcatcgttctccgccgcccgcaggtgtttgtggagcggtccaacctgggcctggtacagcggcgcctgaggctgaaggacttccgagacgcctacccgcgcttcccacccatccagtccatccacgtgtcccaggacgagcgggagtgcaccatggacctctccgagttcatgaacccctccctgctgcaggaggcgtcgctcccacgggtgttcaagctgttccgggccctgggcctgcggcacctggtggtggtggacattgtcctgcaggttgtcgggttggtgaccaggaaggacctcgccaggtaccgcctgggaaagagaggcttggaggagctctcgggcaacctcagaggccccaaggcccaagctacagccgagggcagggtggccggtgcagcccagcccccttcccagctgagagccgtcaccctggaagacctggggctcctcctggcaggaggcctggccagccccgagcccttgagcctggaggagctctcggagaggtatgagtccagccatccgacatccacggcctctgtccccgagcaggacaccgccaagcactggaaccaggccccggccagggtggtggagctgcaggccgaggtggcctgcctgcgggagcacaagcagcgctgtgagcgcgccacgcggagcctgctgcgggagctgctccaggtgcgggcccgcgtgcagctgcagggctcagagctgaggcagttgcagcaggaggcgcggccggcagcccaggcccccgaaaaggcctcctcgcagttctctggtctccagaaccagatgcaggccttgtgtcccaggctggtggaggtccgggaagccttgacccggctcaggaggaggcaggtgcaacaggaggcggagagaaggggcgccgagcaagagcctccggccagctgggctggtgtgaccacagccgacttctctagactggccaagctgaccgacttgctgcagcaggaggagcagggccgggaggtggcctgcggcgccctgcagaagaaccaagaggacagcagccggagggtggacctggaggtggccagaatgcaggtaccaccaggcccaggcttcaggggggccgcccagagggccgaggaggagaccctaaccctctcggcctgtgccatccgatacagcggccgttcaccatgtatctgtgtccactga

SEQ ID NO: 19467 - DNA, 579 bp, Homo sapiens
  SIMILAR (74)..(241): 401254mologous to cercopithicine herpesvirus 15 EBNA2-like protein,accession number AF200187,Smith-Waterman Score=98.
ctattgagaggtgacagcgtgctggcagtcctcacagccctcgctcactctcagcgcctcctctgcctgggcttccactttggcggcacttgaggagcccttcagcccgccgctgcacagtgagagccccttcctgggctggccaaggccggagctgggtccctcagctgctccgtgcgcccctgtgccgccggagcctccccaacgagtgccaccccctgctccatagcgcccagtcccatcgaccacccaagggctgaggagtgtgggcgcatggtgcaggactggcaggcagctccacctgcaccccggtgtgggatccactgggtgaagccagctgggctcctgagtctgcttatgagcatggtcataagaattaatatgattgtcaaactcctggtgtttgtgatactgcttgtcacataattcacagtaaaagtttgcctttacatcttccagggcctttgctgtggacttcttttctgcaaaatccttcatggcagcccctctcatcacaggcccaaagacctttggcatcactgtgacctggatgtgagacatgaggtcaaaggagatcat

SEQ ID NO: 19468 - DNA, 1449 bp, Homo sapiens; identical to SEQ ID NO: 6227
  SIMILAR (816)..(4): 571254mologous to Homo sapiens ORF2 contains a reverse transcriptase domain.; ORF2,accession number M80341,Smith-Waterman Score=834.

SEQ ID NO: 19469 - DNA, 1524 bp, Homo sapiens; identical to SEQ ID NO: 11447
  SIMILAR (488)..(357): 701254mologous to Homo sapiens Human secreted protein, SEQ ID NO: 7678,accession number G03597,Smith-Waterman Score=156.

SEQ ID NO: 19470 - DNA, 903 bp, Homo sapiens
  SIMILAR (230)..(42): 571254mologous to Homo sapiens Human secreted protein, SEQ ID NO: 7083,accession number G03002,Smith-Waterman Score=153.
atggcaaagaagattcaactgacatataagtgtgtccagaattggtgggttcttggtctcactgacttcaagaacgaagccgcagaccctcgcagagtgaagctgcagaccttcgtggtgagtgttacagctcttaaggcggcacgtctggagttgttcattcctcctggtgggttcgtggtctcgctggcttcaggagtgaagctgcagacctttgcggtgagtgttacagctcataaaggcagtgtggacccaaagactagacataaaggttctccaagtccccaccagactcaggagcccagctggctgcacccagtggatcccgcaccggggctgcaggtggagctgcctgccagtcccgcgccgtgcgcccgcactcctcagcccttgggtggtcaatgggactgggtgccatggagcagggggcggtgctcgtcggggaggcttgggccacgcagcagcccacggtggggggcaggctcaggcatggcgggctgcaggtcccgagccctgccccacggggaggcagctaaggcccagcgaaaagtcacagcagctgctggcccaggtgctaagcacctcactgcctggggctggcagggccagctggccactccgagtgtggggcctgccgagcccacacacacccagaactcgcactggcccgcaagcgccgtgtgcagccccagttcccgcctgcgcctctccctccacacctacccgcaagctgagggagccggctccggccttggccagcccaggaaggggctcccacagtgcagcagcaggctgaagggctcctcaagtgctgccaaagtgggagcccaggcagaggaggtgccgagagcgagcgaggcctgcgagggctgccagcacgctgtcacctctcataagtattaa

SEQ ID NO: 19471 - DNA, 642 bp, Homo sapiens; identical to SEQ ID NO: 8573
  SIMILAR (490)..(555): 771254mologous to Homo sapiens Human secreted protein, SEQ ID NO: 7678,accession number G03597,Smith-Waterman Score=96.

SEQ ID NO: 19472 - DNA, 790 bp, Homo sapiens
  SIMILAR (313)..(402): 731254mologous to Homo sapiens Human secreted protein, SEQ ID NO: 7131,accession number G03050,Smith-Waterman Score=97.
tttcgtccagtcagccaaccgacacacttttccagtgttcattatgtataagggactgtcagagacaaagagaagaattatacatgagctggctcccgacctgcagcctgccatgcctgagcctccccctcgcctccgtgggctcctgtgcagcccggagcctccccgacacgccgccccctgctccactgcgcccagtcccatcgaccacccaagggctaaggagtgcaggcgcagggcgcgggattggcaggcagctccacctgcagccccggtgcgggatccactgggtaaagcccgctgggctcctgagtctgcttcactcctgagccagcgagaccacgaatccgccagactcggccagacagaagaaactctgaacacatccgaacgccagaaggaagaaactccgaacacatctgaacatcagaaggaacaaactctggacacgccacctttaagaactgtaacactcactgcgagggtccgcggcttcattcttgaagtggagacaggtacctgctatagtccctgttctcccctgaatgacactaaccagccatttttcatggccattctaagatctgctttgacaaatgctgaaaaggggaccaatgctgagctaacttgctctgcccagcaaggagaggcaggggaagtcccctccaaaaagacaattccacagcccattactattcagggagcagggctaatgtttttcctcactctttctgtccccaagcttcatgtgcatgcacatgagaaaaagacatccaacacaagagagtga

SEQ ID NO: 19473 - DNA, 705 bp, Homo sapiens
  SIMILAR (420)..(689): 411254mologous to Drosophila melanogaster la costa,accession number AF017777,Smith-Waterman Score=121.
atgctgcccgatcgcctcagaagccctgtagcccatcacagatgccgagcttcgggtaactatcacagtggaagacattccccagcaccagcctggagagtgacactcactggatggctggatcaaaggagtagcaggattcacaggagtctggccttcaaggactcctactccaagggtaaggaggagcgcacccacatcaagggaatgtgttcggagcttcttccttctggtgggctcgtgggctcgctggcttcaggagtgaagctgcagaccttcgtggtgagtgttacagctcataaaggcagtgtggacccaaagaactcaggagcccagctggcttcacccagtggatcccgcactggggctacaggtggagctgcctgtcagtcccgcgccctgcgcccgcactcctcagcccttgggtggtcgatgggactgggcgctgtggagcaggcggtggcgctcatcggggaggctccggccgctccggagcccacggagggggtgggaggctcaggcatggcgggctgcaggtcccgagccctgccccgcgggaaggcagctaaggcccgggccagctggctgctccgagtgcggggccgccaagcccacgcccacccggaagtccagctagccctcaagggccctgcgcagcctcagttcccgctcgcgcctctccctccacacctccatgcaagctga

SEQ ID NO: 19474 - DNA, 1200 bp, Homo sapiens; identical to SEQ ID NO: 14620
  SIMILAR (571)..(855): 601254mologous to Homo sapiens CGI-26 protein,accession number AF132960,Smith-Waterman Score=269.

SEQ ID NO: 19475 - DNA, 2679 bp, Homo sapiens
  SIMILAR (2598)..(1927): 541254mologous to Homo sapiens KIAA0544 protein,accession number AB011116,Smith-Waterman Score=520.
tcactgcattttgctctcagctctcctgtctgcaagctggtctacctgaaacaactgccttgcaatatcaaaagatatctgataaaacgggtaaatatagctccactggctggtgtccaccacacttgccacctcctttcgtggctttggagccccccaccctctgtctctgtactggggagcttcttccttctgttttctcccttccctcttgcctattaaaccctctgctcgtggcatgggagacttcctggggctcatgatggggagggcatcaatcatcaaatcagatgaaaattcctgaaggcattgacctttagtgaattctaggtctggtatcaatggctgcctcttcctcgagttgctggagtccagtggctgcaatccttgagctagatacagagtgccaattggtgtatttacaatccctgaactagacataaaggttctccaaggccccaccagagtagctagatacagagtgtccattggtgcattcacaaaccctgagctagacacagggtgctgattggtgtatttacaatccctgagctggacataaaggttctccacgtccccaccagactcaggagcccagctagcttcacccagtggatcccgcactggggctgcaggtggagctgcctgccagtcccgcgccgtgtgcccgcactcctcagcccttgggtggtcgatgggactgggggctgtggagcagggggcggcgctcatcggggaggctggggctgcacaggagcccacggagggggtgggaggctcaggcatggcgggctgcaggtcgcgagccctgccccgcgggaaggcagctaaggcccggcgagaaattgagcgcagagccggtgggctggcactgctgggggacccagtacaccctccgcagccgctggcccgggtgctaagcccctcattgccccgggccggcagggcaatgagccctgccattggtgcggagcccgccaagcccacgcccacccagaactccagctggccaccagtgcctcctggacccgagccttcagggagtgtgtgagtccagcctggcccagctgccttggcgctgcttgttttcattgtcttcttattggccctttcccattctccttctcctctcaacacctttctacttctcttggccaccttgtccttttgtcctggcatttgacgagcctcagtgtgtcctttcggatattgaccaggcttctcagagtcttcacgggttcttggggaggtggggcggcgtaaggaaatattgatgacagtggtgggctgtccagagcagccgctgccatcacaacggctgctgcaggggggtcgcagggagcagacagacagcccctccacagcttgccgccctggggctgccagccccacagcggcagctggcgtgtctgactgcacagtggccggaccccactctcgctcacacaccccttgctgctccatgcctgacttgcagtctcccttggaggcgtgggatataggctggtagtgtgagctgagtgcagcctctgcatcctgctctccagctgggaggccagcaaagttgctgtctggagactccgctggcagcccctctccttcttctgagggggccctgctggcaggctggggggaagagagagcctctccctcctcttcagtgccaggggcgatgtaggagccagacatggaggagacggtgtcagtgctgatctgggaggatgccatggacatgacagactgggccaagctgctgctggcagggccttctggggaggaaatagtggatgacagaggcgtccctgtgcaagacgactggtcaatagctccagatgacgacagggtgagattctcactttctggagtcacaccacattcctctccgagatgctgaaccgacggtctctgagagagctgtgtctccgactcgctgcaggaatgctcatcttcctcttcatgcagcacggaagagttttgggaagtggatttggagagactctttttgagtttgagtccctgactgctgctgtcagacaggcggtcaagaggcgagatcgtcctgacggggggcaggtggccatcactgccatatgaagggagcattcctgagaggtggccatctccaagcacgtgaagtggaggaactgctggggacggggtgaggggcccgttgagggcctccagaagagatactacttcatagcctggtggaatattctctgaggatggatgctcttcagagtcagatgtctgggatgagatgatggggttaaagctggttggggacaaggggcccaattttttcctcatggctcggatctgaagcagtgcccggaaggcagtccccctgccgctctggggcttacgcagtcggcagatggggcagttgttggcctggtagcgcagcgtgtctgcacaggtgttacagaggcagaggtggcgacagggcagaatcaaggtgtcccggacatccgagagacacaccacacactcggcactgttatcactcacttcgtcttcagccaccttagaatcttgtgtgttgtacttgttttcaattccatagatctcctgaaggaggtagctgaccccgtctacatttgatggagaccattcaagggcctgagctgctgtgaggtcatagcctctgccgtggcagcctggctgcagctctttcat

SEQ ID NO: 19476 - DNA, 1408 bp, Homo sapiens
  SIMILAR (89)..(508): 871254mologous to Homo sapiens putative p150,accession number U93568,Smith-Waterman Score=636.
  misc_feature (1)...(1408): n = a,t,c or g
aattctaacaacagccccttcgagaaaagccagcaagtggagaccacccagcgaaaaacgcaaacaggcgctggccatcacctacgagatacccatatgtagaaagctgaaactggatgccttccttacaccttatacaaaaatcaattcaagatggattaaagacttaaacgttagacctaaaaccataaaaactctagaagaaaacctaggcattaccattcaggacataggcataggcaaggacttcatgtctaaaacaccaaaagcaatggcaacaaaagacaaaattgacaaatgggatctaattaaactaaagagcttctgcacagcaaaagaaactaaaatcagagtgaacaggcaacctacaaaatgggagaaaattttcacaacctactcttctgacaaagggctaatatccagaatctacaatgaacgcaaagagatttacaagaaaaaaacaaacaaccccatcaaaaatgaattgtctcaggatggctgccagcactccaatcattacattcaaatttcaggaaaacaaaaatataagcataacctttatgcaagccaagaaaaaaaagcaaggcagaaaagagaagcgagcaactatgacaagcgaactctaatcaatgaaacaaaaacgcagaaacgaccactggatttggaaaacatttgtggctttgacaagngtgtgtctgacaaacagcacagcgacacttttatttccagcttgagaagcagtctcaggggtggtaactgtaatgtcaatatcactgccttctcaaaacacaagtttcttcaagaaatgcagttagagtcagctatccagcagacatatgaatgtctaaagcacaaggaagtttcagggctggatatagaaattcatttggaagtgagagatcctaccagagagaaccaacgagtgaagctgcagaccttggctgtgagtgttacagctcttaaggcggcgcgtctggagttgttcgttcctcccagtgggctcctcctctcgctggcttcaggagtgaagctgcagaccttcgctgtgagtgttagagctcataaaagcagtgtggacccaaagaaacagctggcttcacccagtggatcccgcaccgggactgcaggtgtagctgcctgccagtcccggtgccgtgcgcccgcactcctcagcccttgggtggtggatgggactgggcgccgtggagcagggggtggcactcgtcggggaggctccggcagcacaggagcccatggagtgagtgggagactcaggcatggcgggcttcaggtcccgagccatgggctggttgtctcttctaccccagatcctatatgtcatcttcttgcccactccacaccatccactctgacctctttgctgttcttcaaggacgcacaaagtcat

SEQ ID NO: 19477 - DNA, 3342 bp, Homo sapiens; identical to SEQ ID NO: 3545
  SIMILAR (1786)..(2649): 571254mologous to Homo sapiens unnamed protein product,accession number AK001559,Smith-Waterman Score=754.

SEQ ID NO: 19478 - DNA, 1043 bp, Homo sapiens
  SIMILAR (551)..(363): 551254mologous to Homo sapiens Human secreted protein, SEQ ID NO: 7083,accession number G03002,Smith-Waterman Score=148.
atgaacaatttgcgaatggggcagcacccagagtcacagcagattcacagagactccagcacaaccacgtggtggaagaagatttatagacaaaaaaagggaaatgacctacagaaaccggaagtgacgcacagaacagctggattgattgcagggaaggatatggacaacaatgatctggccgtggggaagattcaagggaataaaaatgaatcatcaccagccaccaggaagcaccaggagctctctaaatggaatggaggcctcccataccttgggtggtctaaaaggaatgacaactcagcagtaattaacacaataagcatccagattgtggtttttaaatcctattgtgtccagaattggtgggttcttggtctcactgacttcaagaatgaagccgcagacgctcgcggagtgaagctgcagaccttcgaggtgactgttacagctcttaagacagcgcgtctggagttgttcgctcctcccggtgggctcatggtctcgctggcttcaggaatgaagctgcagacctttgtggtgagtgttacagcttgtaaaagcagcgtggacccaaagaactcaggagcccagctggcttcacccagtggatcccgcaccagggctgcaggtggagctgcctgccagtcccggtgccctgcgcctgcactcctcagcccttgggtggtcgatgggactgggcgccctggagcagggggtggcgcttgtcagggaggctcgggcggcacaggagcccatggagggggtgggaggctcaggcatggcgggctgcaggtcccggagccctgtcctgcgggaaggcagctaagacaccgagaaatcacctaagatttcttggagctgcctccactcagctcctcaaactaaaaatgcttacatcggccaaaatctatttcttcatcccaattagttcagcaaagatagactatactattcaaggcttcagtctcaatgccaatacacaagggctctgcacagaccttgcagatacctcatctgtgcacgcagctttagaggtatga

SEQ ID NO: 19479 - DNA, 450 bp, Homo sapiens; identical to SEQ ID NO: 6434
  SIMILAR (164)..(102): 1001254mologous to Homo sapiens Human secreted protein, SEQ ID NO: 7678,accession number G03597,Smith-Waterman Score=108.

SEQ ID NO: 19480 - DNA, 650 bp, Homo sapiens
  SIMILAR (454)..(645): 961254mologous to Homo sapiens Similar to tumor protein D52- like 1,accession number BC002375,Smith-Waterman Score=324.
tttcgtgtggactggaaggggcggaggtaaccacaagcggctagtggcggctgcctgcgtccccaaccccctccgcgcagcgctcgcgacacgcgtgccaggagtgggagcgagcggcggggccagctgcgttctgagcctgggcgcagctgccatctgctctgggaagcaccagggtgtccccgccgccctcagctcgaagtcagccaccatggaggcgcaggcacaaggtttgttggagactgaaccgttgcaaggaacagacgaagatgcagtagccagtgctgacttctctagcatgctctctgaggaggaaaaggaagagttaaaagcagagttagttcagctagaagacgaaattacaacactacgacaagttttgtcagccgaaagaaaggcatctagttgagataaaacaaaaactcggcatgaacctgatgaatgaattaaaaccagaacttcagcaaaagctggcatgacatgcagactgacactgcctacaagaagacacatgatacgctgagtcacgcagggcaaaaggcaactgcagctttcagcaacgttggaacggccatcagcaagaagttcggagacatgagttactccattcgccattccataagtatgcctgctatgagacgaaagtaggc

SEQ ID NO: 19481 - DNA, 2025 bp, Homo sapiens
  SIMILAR (247)..(906): 351254mologous to Homo sapiens p40,accession number U93570,Smith-Waterman Score=311.
atgagagctgatgggactgctggaaaagatccctttgcgactgacaagcaactgcctgaacttttgattcagcattgctgggatggactcttggctgtctgcggagggagcacagtgggagtgagactgcccttcattttgcatgggagctgggtgaggcctgtggctgccagctttcccccacttcccgacaacctgcatgactcagcagagccagccataatcctgctagagcctacccaaatgagaaggaaccagaaaaccaacgctggtactatgacaaaacaaatctcttcaacactcccaaaaaatcatcatactagttcaccggcaatggatccaaacaaagaagaaatccatgatttacttgaaaaagaattcagtaggttagttattgagctaatcagggagggaccagagaaaggcaaagcccaatgcgaggaaatccaaaaaaaagatacaaaagtaaagggagaaatattcaaggaagtagatagcttaaagaaaaaacaattaaacattcaggaaaatttggaaacacttttagaagtgctaaatgctctggaaagtctcagcaatagaattgaacaagtagaagaaagaaattcagaacgcgaagacaaggtctttgaattaacccaatccaacaaagacaaagcacaaagaataagaaaatatgaaccaagtctccaagaagtctgggattatgttaaactaccaaaattaagaataatcagttttcctaacgaagaagagaattccaaaagcttggaaaacatatttaggggaagaatcaaggaacactttcacagcattgctagagatctagacatccaaatacaagaagaacaaacaacacctggaaaattaatcgtaaaaagatctttgcctaggcacattgtcatcatgcgagcgcccactcccatggaccacccaagggctgaggagtgcgggcgcagggcgcgggactggcaggcagctccacctgcagccccagtgcgggatccactgggtgaagccagctgggctcctgactctgaaggaagaaaatcggaacacatccaaacatcaaaggaacaaactccggacacgccacctttaagaactgtaacactcatcgcgagggtccgtggcttcattcttgaagtcagtgagaccgagaacccaccaattccagacacaatcaggttatccaaagttaagatggaggaaagaatcttaagagctgtgagacagaagcaccaggccctcgtctatacaaagcatggcactggcatctgcatggcttctgatgagggccccagggagcttttatttatggcagaagataaacggggagcagatgtctcagatgcgccgggagtgggtgccttccgccggctgtacagagcgccggcaggtggcgcccagcggcgagcttgttccagcttggtttgggccaggtggactggaaggggcggaggtaaccagaagcggctagtggcggctgcctgcgtccccaaccccctccgcgcagcgctcgcgacacgcgtgccaggagtgggagcgagcggcggggccagctgcgttctgagcctgggcgcagctgccatctgctctgggaagcaccagggtgtccccgccgccctcagctcgaagtcagccaccatggaggcgcaggcacaagcagatccacacgtgagtcccggtttccgcgatcggggagcgacctctgcctcccgtggcgcgcggggcccccggccgcccagctccctgctcccggggctgcctgctggaggagcctgcggtggcttcaggaagggcggcctcatatcttggggtcacacttggaacagggttggggaattccgatggaatcgttcaagaatgggggtaaacggaccgtggaaaggggcagaggggcagaacgccctgaatgagagtgggttggcgattgcgtgggcctggagtcgcccaacaggtttgctgccaggattacaattgtctgaacagcacgaaccttactcgtttgttccatcctcctaa

SEQ ID NO: 19482 - DNA, 1007 bp, Homo sapiens
  SIMILAR (872)..(630): 931254mologous to Cloning vector pCMVLacI lac repressor,accession number U64448,Smith-Waterman Score=347.
tcagagccctcgcttgctctcggcacctcccctgcctgggatcccactttggcggcatttgaggagcccctcagcccccactgcactgtgggagcccctttctgggctggccaaggccagagcccactccctcagcttgcagggaggtgtggagggagaggcgcgagtgggaaccggggctgcgtgcggtgcttgcgggccagctggagttccgggtgggcatggacttggtgggccccgcactcggagcagccagccagccctgctggccccgggcactggggaacttagcacccgggccagtggctgcggagggcgtactgggtaccccagcagtgctggcccaccggcgctgcgctcgatttctcgccgggccttagctgccttcccgcggggcagggctcgggacctgcagcctgccatgcctgagcctcccacccactccatgggctcctgtgcggccagagcctccccgacgagcaccaccccctgctccacggcgcccagtcccatcgaccacccaagggctgaggaatgcgagcgcacggcgcaggactggcaggcagctccacctgcagccccagtgcgggatccactaggtgaagccagctgggctcctgagtctggtggggacgtggagaacctttatgttgcccgctttccagtcgggaaacctgtcgtgccagctgcattaatgaatcggccaacgcgcggggagaggcggtttgcgtattgggcgccagggtggtttttcttttcaccagtgagacgggcaacagctgattgcccttcaccgcctggccctgagagagttgcagcaagcggtccacgctggtttgccccagcaggcgaaaatcctgtttgatgggtggttccgaaatcggcaaaatccctgttaatttacaaatcagcatactttgcaccgtagcatgacctagtagttcaatttcaaaacacaaaaaagtatctgactctaaatcttctgtgcgaagagcacaagagcacat

SEQ ID NO: 19483 - DNA, 2572 bp, Homo sapiens
  SIMILAR (1)..(1065): 961254mologous to Homo sapiens putative p150,accession number U93563,Smith-Waterman Score=1804.
atggtgttggaagttctggccagggcaattaggcaggagaaggaaataaaaggtattcaattaggaaaagaggaagtcaaattgtccctgtttgcagatgacatgattgtatatctagaaaaccccatcgtttcagcccaaaatctccttacactgataagcaacttcagcaaagtctcaggatacaaaatcagtgtacaaaaatcacaagcattcttatacaccaacaacagacaaacagagagccaagtcatgagtgaactcccattcacaattgcttcaaagggaataaaatacctaggaatccaacttacaagggatgtgaaggacctcttcaaggagaactacaaaccactgctcaaggaaataaaagaggatacaaacaaatggaagaacattccatgctcatgggtaggaagaatcaatatcgtgaaaatggccatactgcctaaggtaatttacagattcaatgccatccccatcaagctaccaatgactttcttcacagaattggaaaaaactactttaaagttcatatggaaccaaaaaagagcccgcatcgccaagtcaatcttaagccaaaagaacaaagctggaggcatcacactacctgacttcaaactatactacaaggctacagtaaccaaaacagcatggtactggtaccaaaacagagatatagatcaatggaacagaacagagccctcagaaataacgcagcatatgtacaactatctgatctttgacaaacctgagaaaaacaagcaatggggaaaggattccctatttaataaatggtgctgggaaaactggctagccatatgtagaaagctgaaactggatcccttccttacaccttatacaaaaatcaattcaagatggactaaagacttaaacgttagacctaaaaccataaaaaccctagaagaaaacctaggcattgccattcaggacataggcatgggcaaggacttcatgtctaaaacaccaaaagcaatggcaacaaaagacaaaattgacaaatgggatctaattaaactaaagagcttctgcacagcaaaagagcttctgcacagcaaaagaaactaccatcagagtgaacaggcaacttacaaaatgggagaaatattaaaccttcttaatttatctggcaattcagagatttctttttcaactgcaaccattgctgaggatctgggatttttgccctggtgtaccagaagaatcggatcacacctgggcttggagaatgagtgccaggttttactgagtggaagtagctctcagcagatgaaggagccagaagggagatggagtgggaaggtttcccctggagtcgggcctctcagcagctggactcttctccaactgccctggccaaactccgcattgttctgccggtggatggcctgcctgagtgctgggtcttcgggtttttatacgcacaggatcggggtatggtgggccaggggtgtcttggaaaatgcaacgtttgggcacaaaggcaagagtgcctgtcctcacctaagtccgtgggcctatgcccgagggacacaatatccttttttcaagcctgttctttggaagacgagttctcattatagttgcatggtaacaccaatccctggtaacaccagagtaaatggtcagtgccataaggctatgtctgggcagtttaactgcagtctcatgctgtaccaaacatcacgcactttgaccatcaatcaggtcctgcaactgattacctcaggcaatgaggggcttagtacacgggccagcggctgctcgggaaggtgtactcggtcccccagcagtgccagcccaccggcgctgcgctcgatttctcgccggggccttagccgccttcccgtggggcagggctcgggacctgcagcccgccgtgcctgagcctcccaccccctcggtgggctcctgtgcggcccgagcctccccgatgagcgccgccccctgctccatggcgcccagtcccatcgaccacccaagggctcctcagccgcactcctcagtgcgggcagatggcgcaggactggcaggcagctccacctgcctccccagtgcaggatccactggaagaagccagctgggctcctgagtctagtggggacttggagaacttttatgtctagctaagggattgtaaatacaccgatgggcactctgtatctagctcaaggtttgtaaacacaccaatcagcaccctgtgtctagctcagtgtttgtgaatgcaccaatccacactctgtatctggctactctggtggggacttggagaacctttgtgtccacactctgtatctagctaatctagtggggatgtggagaacctttgtgtctagctcagggatcgtaaacgcaccaatcagcaccctgtcaaaacagaccacttgactctctgtaaaatggaccaatcagcaggatgtgggtggggcgagacaagagaataaaagcaggctgcctgagccagcagtgacaacccccctcgggtcccctcccacgccgtggaagctttgttctttcgctctttgcaataaatcttgctactgcccaaaaa

SEQ ID NO: 19484 - DNA, 589 bp, Homo sapiens
cttaacggagaacaaatgttacttagtgctgcagaaggagaacaatgctaggttccacaaggtagtctgtccttttgctgtcttgtctacaccagagaacctttggttgacttgctttaatattggcttcagtcctgttcatcaggagttgctgagggggtcacttggagatccaggctcgccaagcagccactgtcttcagcaccagctaatgccctgctagtgggcaaagagggagctctctgaaacaagtgcaattccaaatcccttaacccaagctagagcatagaattcacaggaccgctgcctttgtcctcctccagctcagagactgatgtctatatcatgaatgcgctaagaaagggagaatcacgagtggaatccagtatcagtagctgggagcaaaagacacttgcggtaagggtcctcgggtttttcactgcaagacttttacctaatccttgaatgttaaaaggctaaaaactccactagtcggaagtgacgtgccagcttagccccgcaggtccgccacgtaattggccgccgccacagctagccaccctctccccagactggcccgaagacgaaa

SEQ ID NO: 19485 - DNA, 445 bp, Homo sapiens
  SIMILAR (96)..(185): 501254mologous to Hordeum bulbosum chitinase,accession number AJ400135,Smith-Waterman Score=62.
  misc_feature (1)...(445): n = a,t,c or g
gtgggatttttttttttgcttctctaggtgaaggtttaaattaacttcagcatgggtaaaactattctttccttcttttttctctcccagagttctcaccacctcctcccaggctaaatccttcatgttgcaggagacagagaatcccaggtgagacccggactttttctcctccctcccttccttttttcaccgtgttcaggataaattatcttggttttgtttctggagggaaaagggcagagaaggccctgacttgaatctcaatcacatttctgcacacacgtacctgagggagacaagaatagcaagagggggtcgggaacaatttaaacattggctttatcggggctttaggaattggnggaaaaaataattccccacttcttttttcttttacccaaatccaacttcagttttctctccaactctctaaaaccaccac

SEQ ID NO: 19486 - DNA, 1849 bp, Homo sapiens
  SIMILAR (1633)..(1797): 431254mologous to Pseudorabies virus glycoprotein gX,accession number U27488,Smith-Waterman Score=72.
aatacaggttccctaagcaacatgaactgttaggctcagagagggatttccctagtcactgacttactgagggattgactcaagattcccaggcactagacagaagcagtcgggaaaggaatcatttcctgattgcctgtgggggaaaaagaaacttttttggatagaacagtctggatggactctaacacagtaaaaagtgaaggcagtgcattcttcagaagggcggcagatggggcaccacgcatccccacagaggggctgtcctgcggtccttgcaggagttgccaggctcccaaaatctcctcctggtgctatcccccccctgccttaaaaaaggtgaggaggatgatggggaaggagtccaacaaacttgggataagaggaatgagtgcgctggtaaaacccattacttaggtaaacccttgggtaaaactttaggaaaggaggcccaaaatgggaaagtgtgggttttttattttgcttctctaggtgaaggtttaaattaacttcagcatgggtaaaactattctttcccttctttttttctctcccagagttctcaaccacctcctcccaggctaaaatccttcatgttgcaggagacagagaatcccaggtgagacccggactttttctcctccctcccttcctttttttcaccatgttcaggataaattatcttggttttgtttctggagggaaaagggcagagaggccctgacttgaatctcaatcacatttctgcacacagtaccttggacagaagtcatgatgatgggggccatgactggcaacctgctgggagaggtggcctgcagtgtgtctggagtacactgggggaccccgggagcatcttctgtgtctgtggcccctggcaggcctgcatcacttggtgctatgccactatcagatccaccacaggagccatgtgctattcattccacaaggagccctttcaacagggagacatcaggcccaactggattctagccaccttggtctccagtctcctactctcaggcccatgagtgacaattcagcacaggaaatttggttctgtgagcagcatctattggcaggatgaccagcaattcttgtgtgtggtttgcaaagatcttaacggagaacaaatgttacttagtgctgcagaaggagaacaatgctaggttccacaaggtagtctgtccttttgctgtcttgtctacaccagagaacctttggttgacttgctttaatattggcttcagtcctgttcatcaggagttgctgagggggtcacttggagatccaggctcgccaagcagccactgtcttcagcaccagctaatgccctgctagtgggcaaagagggagctctaatccttgaaatgttaaaaggctaaaaaactccactagtcggaagtgacgtgccaagcttagccccgcaggtccgccaacgtaaatttgccgccgccacagctagccaccctctccccaggctggcccgaagagaggaaaagtgttggaagtccaacaagcccgcccccgccccgccctcttcgtcgactttcagctgcaccggggaggcggcggcgcctggccagagccgggggcctggagcctggactagacagcctcgccggccggggcgccagtccagcgccctgcgggcaatgggcttcagcgctcgatgccagccatgcgcgggccttgtatctccagaggattcctcgggtcacctggacgccagcatctcagccacctgcccctctgggtcccttcttgcccttgattccccctgctgcttctcatcgccagccctcctcctccttcttccgcaggcaccgctagacccggccgcggccgc

SEQ ID NO: 19487 - DNA, 2097 bp, Homo sapiens
  SIMILAR (235)..(402): 501254mologous to Homo sapiens bA393J16.1 (zinc finger protein 33a (KOX 31)),accession number AL117337,Smith-Waterman Score=141.
atggaagagaagaccaatgtgcagctcccacctggacaaacagaacagcatgtggaaattcacatcatgaacttttgctccaagaaccaccataggatcacaccagaaaaaccaaaagaactcacagacccttttaaagaagcagcttgctgctgcaaactctatgagatagacaaaaaactatacagaatggcagaatggatcaaaatccacaaaccaagtatctgctgtcttcaagagactcacctgacacataaggattcacataagcttaaggtgtccatcaccttcaaggacttggccgtgcggttctcggaggaggagtggcggctcctggaggaggggcagagggagttctaccgagacgtgatgcgggagaactacgagacgctggtctctgtggagcctggaagagctgttgggggagggagccacgctgatgaggggcaggagcctgctggttgtggagatccccaggccctggtgcagctggtgaaggagatcccagagttcttgtttggagaagtcaagggcgctatggacagccccgagagcgagagccggggagccagcctggatggagagagagcgagtcccgaggcagctgcggcaagagagccctgccctctccgaggcctgctcagctgccttccagacggccctaccagccagccccacctggccaccacgcccaccgacagctcgtgttccagtggcccaactggtgacggggtccagggaagtcctctccccatcagaatttctcctgggaacagccccttgcaaggcctcatcaactgtctgaaggaaatccttgtgcctgggccccggcaccccgagacatccccaagcttcttgccacctctccctagcctgggcacgtccaggctaaccagagcagacctggggcctgggagcccgccctgggcagaagcgaccagagagcctgttctgcctctgggtctgcagagctgtgtgagagatggccccagcaggcccctggccccccgaggaacccccaccagcttctcctcatccagcagcaccgactgggacctggattttgggagtcctgtggggaaccaggggcagcatcctggaaaagggtctgcccccaagccctccccgctgcactgcctggagagcgccctgagggggatcttgcctgtaaggcccttgcgcttcgcctgcgtgggaggccccagccccagccccagccccggctccagctcgagcttcagcggctctgaaggagaagacccgaggccagagcctgagctctggaagccgctcccccaggagagggaccgccttcccagctgtaagcctcctgtccctctgtccccatgtcctggtgggacccctgctggcagcagtggcggcagccctggtgaagaccccaggagaacagagcccaggtactgcagcggcctcggtgcagggagtcctgcacattggccgtgctttagttccctgtaaggtacagctcaggatccctgcccggtttctcagctggagaaaaggcccagggttagtgaagcatccagaggcctggagcttggacatggaagacccagagttgcagccgccatgccactgtgggaagcccctgcagcaggagctgcacagcctcggtgctgcccttgcggagaagctggatcggctcgccacagcgctggcaggcctggctcaggaagtggccaccatgaggacccagggagcctctcctcctgcagccagtgcagatgcagacgtgccgacctcaggagtggcaccagacgggatcccagagcggcccaaggagccgagcagcctgctgggaggagtgcagagggccctccaggaagaactgtggggtgagggttcccagggaaggacaggattccagtccttccaccagcgtggaattgtggccgtgcgcccttcttcttgggggtcttgcatactccctctgactgtgaaatacaagacttgtctctggttaaaagacatttcaaggatcagaagaggagggacacagacatgcccagagtggaggagacccaggaagaaggtgatgggaggatggaggtagagattgaagtgctgtgtctataa

SEQ ID NO: 19488 - DNA, 293 bp, Homo sapiens
  SIMILAR (198)..(293): 871254mologous to Homo sapiens Human secreted protein, SEQ ID NO: 7102,accession number G03021,Smith-Waterman Score=154.
cgcatggcagcactgagaggtgacagcatgctggcatccctcgctcgctcgctctcggcgcctcctctgcctggacgcccactctggcggcacttgaggagcgcttcagcctgccgctgcactgtgggagccccttcctgggctggctgaggccagagccggctccctcagttttttggtccttgctacctttatgagctgtaacactcaccgtgaaggtctgcagcttcgctcctgagccagcgagaccacgaacccaccagaagaaagaaactccgaacacatctgaacat

SEQ ID NO: 19489 - DNA, 448 bp, Homo sapiens
  SIMILAR (315)..(169): 891254mologous to Homo sapiens Human secreted protein, SEQ ID NO: 7102,accession number G03021,Smith-Waterman Score=236.
ctagttagtggcacatctgggaatctcaactagacggcttggctccagattgtgtgctcttaatgcgtccggaattggtgggttcttagtctcactgacttcaacaatgaagccgtggaccctggcggtgagtgttacagttcttaaaggacacgtgactggagtttgttccttctgatgttcggatgtgttcggagtttcttccttctggtgggtttgtggtcttgctggctcaggagtgaagctgcagaccttcgcggtgagtgttacagctcttaaggcggtgcgtctggagttgttcgttcctcctggtgggttcgtggtctcactagcttcagaagtgaaactggcttcacccagtggatcccgcactggggctgcaggtggagctgtctgccagtcccgcgctgtgcacctgcactcctcagcccttgggtggtcaatggga

SEQ ID NO: 19490 - DNA, 439 bp, Homo sapiens
  SIMILAR (250)..(330): 741254mologous to Homo sapiens Human secreted protein, SEQ ID NO: 5263,accession number G01182,Smith-Waterman Score=99.
  misc_feature (1)...(439): n = a,t,c or g
gagcaaaacaacaaagccaccagggtaccgagaaggacccaaacggtttgccactgccggctcgntaccagctttttattcctttatttgaccccgcccacatcctgctgactggtccattttacagagtgctgattggtccattttacagagtgctgattggcccatttttacagagtgctgattggtacgtttacaaactttagctagacacagcactgattggtgcatttacaaatctttagctagacagaaaagttctccaagtccccactcgacccaggaagtccagctggcttcacctctcaccgggaggcaagaagattgcagtgagccgagatcggcaccattgcactccagcctgggtccgacagagcgagactccatttgtgtagcggcgtcttctgtccggtggacgaggccgggcgcacgattttcc

SEQ ID NO: 19491 - DNA, 732 bp, Homo sapiens
  SIMILAR (2)..(283): 791254mologous to Homo sapiens stac,accession number D86640,Smith-Waterman Score=365.
atccaagctccagaaactaaaacgatcactttctttcaagaccaagagtttacggagcaaaagtgctgacaacttcttccagcgaaccaacagcgaagacatgaaactgcaagcacacatggtggctgagatcagccccagctccagcccactccctgctccaggaagcctgacgtccacacccgccaggctggtctgcatccaggtggcaaggctcatgcctttcaggaatacatcttcaagaagcccacttttctgtgatgtctgcaaccacatgatagtggctttctcttcttgaggccggcaagaccacgagcccaccgggaggaaaggaacaactccagacgcgtcgccttaagagctgtaacactcaccacggaacgtctgcagcttcactcctgagccagcgagaccacgaacccaccagaaggaagaaaactccgaacacatccgaacatcagaaggaacaaactccggacacgccaccattaagaactgtaacactcaccgcgagggttccgaggcttcattcttgaagttcgtgagacccagaacccaccaattccagacacacatatatgctaatcttagaaagacatggatactatctcccctctccactccatccttaaacatctcatgactattaagaatgagaaagggaccaagtggcaagagaacatcttcatatgcatacaactttccagaaaataaaaatttgccaagttgtca

SEQ ID NO: 19492 - DNA, 1262 bp, Homo sapiens
  SIMILAR (281)..(186): 871254mologous to Homo sapiens Human secreted protein, SEQ ID NO: 7102,accession number G03021,Smith-Waterman Score=154.
atgcccctgtcctatgcctataaaaacgctgagaccctagcaggcagacacacaagcagctggatgtcgagaggagcatatcagcggaggaacacacgggcagctggacgtccagaggaatgcactgacagaaactggcatgctggcagaacacgtcgaatttggctggggcagttggaggagagatgttcagatgtgttcggagtttctttcttctggtgggttcgtggtctcgctggctcaggagcgaagctgcagaccttcacggtgagtgttacagctcatagaggtagcaaggaccaaaaaagtgagcagaagcaagacttattgcaaaaagcaaaagaacaaaccatccacaacgtgaaaggcgacccaagcgagttaccactgctggctccagcagcctgcttttattctcttatctgtccccgcccacccccccacatcctgctgattggtccattttacagagagctgattggtccattttacagagagctgattgggaggcagctaaggcccggcgagaagtcgagcacagcagccgctggcccaggtgctaagccgctcactgcccggagccggcggactgctccgagtgcggggcccgccgagcccacacccacctggaactcgcgctggccggcaagcgccacgcgccgtcccggttcccgccggcgtctctccctccacacttcccctcaagctgagggagccggctctggcctcagccagcccaggaaggggctcccacagtgcagcggcaggctgaagcgctcctcaagtgccgccagagtgggcgtccaggcagaggagacgccgagagcgagcgagcgagggatgccagcatgctgtcacctctcagtgctgccatgcggttttggattcctggaagcccatagttccagtcctgaacaaacggaccatgaacagaactgccccgcagatataaaggtgatgaggcttgcaggccagcccaccaatgctcgtggagctgctaacagagcccagccattgcacagtacttctgtgtctcatcttaaggctgtaatatttaaaatacagacaagacagcagaaaaactcccacttcccacccctgtttctggaaatgaccacaagcctggctacagggcgactgagaccatcatgggtggactacgcacgtccagctcttagtgtggtctccgtgtctcggttttctcttttgacttctcttttggagctcttggttgagacacttggtgagtgtggacttttaag

SEQ ID NO: 19493 - DNA, 898 bp, Homo sapiens
  SIMILAR (190)..(327): 691254mologous to Homo sapiens Human secreted protein, SEQ ID NO: 7102,accession number G03021,Smith-Waterman Score=164.
ccatttatttatttatttattggtggtcttgctgtggtgtccaggctggcctcaaactgctggactcaaaggatcctcctgcctcagcctcctgagtaactgtaattataggccaccactctaggctctacttcttggaacgcaaaaactaccgagagtctggaattttatcatggtccgaagaatacaggatggagtgaagccatctgtgtccatagcagagagagagatgaaatcgcgaaagtctgcagcttcactcctgagccagcgagaccacgaacccaccagaaggaagaaactccgaacacatccgaacatcagaaggaacaaactccagacgcgccaccttaagagctgtaacactcaccgcgaaggtctgcagcttcactcctgaagccagtgagaccaccagcccaccgggaggaaacaaacaactccagacacgctgccttaagagctgtaacacttgccgtgaaggtctgcagcttcactcctgagccagcgaggaccacgaacccaccagaaggaagaaactccgaacacatctgaacatcagaaggggacagactccagacggcaccacctttaaggagctgttaacattcaccgcgagttttccgcggctttcattttttggaagttcagttaaggacccaaggaacccaccaattccggacacagtagcatttgggaataataagaattgtagctgggcatggtggtacacgcctgtagacccctagcagctgccatcatcctcaccatccgcatattattgatatattaactctttgatggcaaccatggcttatcccccctatctccctatgccctacagcagggcagtggaatggttaagaggctttgaagtctaccagtgctggcttaaaaccctaaa

SEQ ID NO: 19494 - DNA, 927 bp, Homo sapiens
  SIMILAR (373)..(924): 851254mologous to Homo sapiens dJ127B20.1 (Rho GTPase activating protein 8),accession number Z83838,Smith-Waterman Score= 756.
gtacaagaagaacttgaaggccctctacgtggtgcaccccaccagcttcatcaaggtcctgtggaacatcttgaagcccctcatcagcacaagtttgggaagaaagtcatctatttcaactacctgagtgagctccacgaacaccttaaatacgaccagctggtcatccctcccgaagttttgcggacgatgagaagctccagagcctgcacgagggccggacgccgcctcccaccaagacaccaccgccgcggcccccgctgcccacacagcagtttggcgtcagtctgcaatagtgcctgcgcaccgagggcctgttccggagatccgccagcgtgcagaccgtccgcgagatccagaggctctacaaccaaggggaagcccgtgaactttgacgactacggggacattcacatccctgccgtgatcctgaagaccttcctgcgagagctgccccagccgcttctgaccttccaggcctacgagcagattctcgggatcacctgtggagagcagcctgcgtgtcactggctgccgccagatcttacggagcctcccagagcacaactacgtcgtcctccgctacctcatgggcttcctgcatgcgggtcccgggagagcatcttcaacaaaatgaacagctctaacctggcctgtgtcttcgggctgaatttgatctggccatcccagggggtctcctccctgagtgcccttgtgcccctgaacatgttcactgaactgctgatcgagtactatgaaaagatcttcagcaccccggaggcacctggggagcacggcctggcaccatgggaacaggggagcagggcagcccctttgcaggaggctgtgccacggacacaagccacgggcctcaccaagcctaccctacctccgagtcccctgatggcagccagaagacgtctctag

SEQ ID NO: 19495 - DNA, 689 bp, Homo sapiens
  SIMILAR (7)..(687): 991254mologous to Homo sapiens dJ127B20.1 (Rho GTPase activating protein 8),accession number Z83838,Smith-Waterman Score= 1179.
aggaagtacaagaagaacttgaaggccctgtacgtggtgcaccccaccagcttcatcaaggtcctgtggaacatcttgaagcccctcatcagtcacaagtttgggaagaaagtcatctatttcaactacctgagtgagctccacgaacaccttaaatacgaccagctggtcatccctcccgaagttttgcggtacgatgagaagctccagagcctgcacgagggccggacgccgcctcccaccaagacaccaccgccgcggaccccgctgcccacacagcagtttggcgtcagtctgcaatacctcaaagacaaaaatcaaggcgaactcatcccccctgtgctgaggttcacagtgacgtacctgagagagaaaggcctgcgcaccgagggcctgttccggagatccgccagcgtgcagaccgtccgcgagatccagaggctctacaaccaagggaagcccgtgaactttgacgactacggggacattcacatccctgccgtgatcctgaagaccttcctgcgagagctgccccagccgcttctgaccttccaggcctacgagcagattcttgggatcacctgtgtggagagcagcctgcgtgtcactcgctgccgccagatcttacggagcctcccagagcacaactacgtcgtcctccgctacctcatgggcttcctgcatgcggg

SEQ ID NO: 19496 - DNA, 2648 bp, Homo sapiens
  SIMILAR (2167)..(2409): 771254mologous to Homo sapiens dJ127B20.1 (Rho GTPase activating protein 8),accession number Z83838,Smith-Waterman Score= 293.
tcttgaagcccctcatcaggtatgcgtcactctgggagaggacctcgctggggttggaggtttcacccctcagggtccatgggacggaccagctggtcatccctcccgaagttttgcggtaagtgcctgttagaccccagaagccgcatcaatacatcttcgtgcttccaaagggcttggttcagttgccaactaatggtcatgtgcccccccatcctgtggccgggtccctgctgtatgcacagtgcccggcacatagtagggcttcaatacgtatttgcctgtgttaaggaaggactgttacctgagcacagagggtcttttctagcaagccctttccaggcactggggataaagtaattaacaaaagggacgaggttcctttagcattaccggccagctctcgtcttaaattcagacacttgcgagagctgagggtggtcacgcccaccttggggctgaccgcatggtaagcaggtgaggctgctctgctggccaggggcctcaggagagactggacatttgctggaggttggaggcccccgctgcccacacagcagtttggcgtcagtctgcaatagtaagtgagccggggatgtgcctgctcctatgccctggagccctgggagctgtggggcgcttctgggtctaagcacatctcccgaggggaggggtacaagcaagaattctatgctgagagtccccgatgccctccagtgggtggacgactgtcggaaagccaggtgggagtcactggccacagagaacgctgtgctgaccaacaaactgtgctctgtgctccagagtcctcgcagaactcggccaggcgagtttgcccatggggcgttggcagagggcacgtggtggtgtccagctggtggctggctaggatcatccaagacatgccttatgttcctgcacctctggcctcagtggggactgttggccagtgcacctgcccgcagtgtccccagcctgatgttcccacggtagctgtgcttcttccagggcagctcagggtttccagcaaaaaggttcccgagatcacaggtgggaagagtcaggctctttaggacaggagagaaggacctggcccagaaactgaacagttgcttctgtacgttgttgatgacctgtggactctaaggatcagggagaggaccctgcatccagaggtgggcagttggaatgtaaacccctcacgaggccagctgtggacaggcacggaagcctttctctctctagaaaggtgagacggggccggctccagctggatgacgtgagggctgctgggtgcacctctctgggtggtttgtcaagcacttcgggcagtgctggtctgtaggaagccctctcgaaatggggactcctctgatgggatcaactttgatttgcagataccattgccagtagggtgggtgcagtcaagaacttggagtggggtgagccttgtgggctctccacagctcctgaggctagaacatgctgacttccatcagggagaaggccctgccagaccggggtccctgttaggggggttgaccttgttggggggcttccctgagggaggggcagtggagctgagctctgaggacggggagaagctggccatgccgtgtgacagaaaggccccagagaggagagcaggtgaaggggctcgtggctgtgggagtgcgggagcgtgcggggcttcgaggaagttgggaggagaagggtacaaccaaggtgagggtgtcccgcagtcctgagccccgagctgcctggtcagcgagcacagcgctccggggcctcagcgagagctgccccagccgcttctgaccttccaggcctacgagcagattctcgggatcacctgtgcgtagctgccctggcgcaggggtggggggcttggtcctcagatgctgtcccccagctactggcccgtcgtcctccgctacctcatgggcttcctgcatgcggtgagtggggaaggggggagcttggggtgaagcccagtggccttccctcccatgctgggcccgcatggggtcaccaagttcgtaccgtctgtgctacagcccatccccaagattgcatctccccagaaggtgcagtggaagaggagatagtggggggttgaggctgtcacagaaggtcagagccagagggtcctccagatctggcctatcccagggggtctcctccctgagtgcccttgtgcccctgaacaatgtttcactgaactgctaatcgagtactatgaaaagatcttcagcacccccggaggcacctggggagcacggcctggcaccatgtgaacaggggagcagggcagcccctttgcaggaggctgtgccacggacacaagccacgggcctcaccaagcctaccctacctccgagtcccctgatggcggccagaagacgtctctagtgttgcgaacactctgtatatttcgagctacctcccacacctgtctgtgcacttgtatgttttataaacttggcatctgtaaaaataaccagccattagatgaattcagaaccttttaatgaaaactccatgcctctggtccttggacttttgtccatggttcctaaactgtggaccgggatagaataatgcaaaaaaaaaaaaaaaaaaaaaaaaaaaaaaaaaaaaaaaaaaaa

SEQ ID NO: 19497 - DNA, 2782 bp, Homo sapiens
  SIMILAR (771)..(1220): 281254mologous to Homo sapiens IgG Fc binding protein,accession number D84239,Smith-Waterman Score=106.
atgcctgatgcctgtgttctcatgggacgcctgtgttctcatgggacgcctgtgccctcatgggacgcctgtgttctcatgggacgcctgtgccctcatgggatgcctgtgccctcatgggatgcctgtgccctcatgggacgcctgtgttctcatgggacgcctgtgcccctcatgggacgcctgtgccctcatgggacgcctgtgccctcatgggacgcctgtgttctcatgggacgcctgtgcccctcatgggacgcctgtgccctcatgggacgcctgtgccctcatgggacgcctgtgttctcatgggacgcctgtgcccctcatgggacgcctgtgttctcatgggactcctgtgccctcatgggacgcctgtgttctcatgggacgcctgtgcccctcatgggacgcctgtgttctcatgggacgcctgtgccctcatgggacgcctgtgttctcatgggacgcctgtgcccctcatgggacacctgtgttctcatgggacgcctgtgccctcatgggacgcctgtgttctcatgggacgcctgtgcctctcatgggacacctgtgttctcatgggacgcctgtgccctcatgggacgcctgtgccctcatgggacacctgtgttctcatgggacgcctgcattctcatgggacgcctgtgccctcatgggacacctgtgttctcatgggacacctgtgttctcatgggatgcctgtgccctcatgggatgcctgtacccctcatgggacgcctgtgttctcatgggatgcctgtaccctcatgggacgcctgtacccctcatgggacatctgtgccctcatgggatgcctgtgcccctcatgggatgcctgtgccctcatgggacgcctgtgttctcatgggatgcctgtaccctcatgggacgcctgtgcccctcatgggatgcctgtgttctcatgggatgcccgtgccccgcatgggacgcctgaattctcatgggacacctgtgccctcatgggacacctgtgttctcatgggacgcctgtgcccctcatgggatgcctgtgccctcatgggacgcctgtgttctcatgggatgcctgtgcccctcatgggatgcctgtgttctcatgggacgcctgtgcccctcatgggatgcctgtgtgctcatgggatgcctgtgcccctcatgggatgcctgtgccctcatgggacacctgtgttctcatgggacacctgtgccctcatgggacgcctgtgttctcatgggacgcctgcattctcatgggacgcctgtgccctcatggtacgcctgttccctcatgggacgcctgtgttctcatgggacgcctgtgccctcatgggacgcctgtgccctcatgggatgcccgtgccccgcatgggacgcctgaattctcatgggacacctgtgcccctcatgggacgcctgtgttctcatgggacgcctgtgccctcatgggacgcctgtgttctcatgggacgcctgtgcccctcatgggacgcctgtgttctcatgggacgcctgtgcccctcatgggacacctgtgccctcatgggacgcctgtgccctcatgggacgcctgtgttctcatgggacgcctgtgcccctcatgggacgcctgtgccctcatgggacgcctgtgttctcatgggacgcctgtgcccctcatgggacacctgtgttctcatgggacgcctgtgccctcatgggacgcctgtgccctcatggggaacgcctgtgcccctcatgggacacctgtgttctcatgggacgcctgtgccctcatgggacgcctgtgccctcatgggacgcctgtgttctcatgggacgcctgtgccctcatgggacgcctgtgcccctcatgggacatctgtgcccctcatgggatgcctgtgcccctcatgggatgcctgtgcccctcatgggacgcctgtgcccctcatgggacgcctgtgcctctcatgggacgcctgtgcccctcatgggacacctgtgttctcatgggacgcctgtgcccctcatgggacacctgtgttctcatgggacgcctgcattctcatgggacgcctgtgccctcatgggacacctgtgttctcatgggacacctgtgttctcatgggatgcctgtgccctcatgggatgcctgtacccctcatgggacgcctgtgttctcatgggatgcctgtaccctcatgggacgcctgtacccctcatgggacatctgtgccctcatgggatgcctgtgcccctcatgggatgcctgtgccctcatgggacgcctgtgttctcatgggatgcctgtaccctcatgggacgcctgtgcccctcatgggatgcctgtgttctcatgggatgcccgtgccccgcatggaacgcctgaattctcatgggacacctgtgcccctcatgggacgcctgcattctcatgggacacctgtgccctcatgggatgcctgtacccttcatgggacgcctgtgttctcatgggacgcctgtgccctcatgggacgcctgtgttctcatgggatgcctgtgcccctcatgggatgcctgtgccctcatgggacgcctgcattctcatgggacacctgtgccctcatgggatgcctgtaccctcatgggacgcctgtgcccctcatgggatgcctgtgttctcatgggatgcctgtgcccctcatgggacgcctgcattctcatgggacacctgtgccctcatgggatgcctgtacccttcatgggacgcctgtgtgtggttgccatgattactacctga

SEQ ID NO: 19498 - DNA, 552 bp, Homo sapiens
  SIMILAR (139)..(393): 351254mologous to Plasmodium chabaudi merozoite surface antigen 1,accession number M61208,Smith-Waterman Score=103.
gtaccacaggacagcctggggcaggccctagcaggccaggccacaccagagatcccattggggctgcagctgcacactgtccttgtccaggagattcaggagctcattgaggcacagacacgtgctcctggtccatgtgcagaagtaagagcactgccagcaccagcggcggagccagagccagcatgggaagaggcccctccagagagagcactggagctggagggagctccagccaaggaccagaccaacgaggagctgcctgaaatcacggcacgtactgtagccactagccctaaccctggagctgaaagcgtggctggagagagaagtgggagggagggggtgaccagcacagccccagccagcagctcccatgctgcccctagtcctgggcacggtggcaaacatgcaggcagagagcagggcatttggcctggcctcctgtacctcgctgcagagaggcttctctcattcactagaaccacagtcctgctgctgcaggtccgtttattctcctgatcctggtttatctgtgtgcaggaggtgccg

SEQ ID NO: 19499 - DNA, 1209 bp, Homo sapiens
  SIMILAR (414)..(791): 351254mologous to Mytilus edulis precollagen P,accession number AF015539,Smith-Waterman Score=121.
atgacagaagagcccctgcaggctctggtgctgtcagcagttttactctatcaggaagcctatgtgagaaggtccctcacagctcttggcctggacacatttgccaactttgcacacttttctgaaatgcaaccactttcagatgctccctgtggcctcgtcacaggggtcaccaggcccctggtggcttacagtgtggaagttggaggcttcaccataatctgtggcctgagcttggcctcagggaatatttccgggtggtgtcagctgtatctcctccttactcagtgtcgtaggggagcagcgactctctgggacagtgggatgggtggaggacgtcagtcctccaggcagacgtcagtccccaggtggaccctggactcaaagtgtataccaggccccaagttgacaaccaggccccagatggacaccaaggccctaggtggacagcaggcccatgttgaacaccagactcatgaggacatcaggccgcaggtggacacccaggccccaggtggacacaaggccttaggtgaacaacaagacccagtaggccatcaggcctcagttggatacagtccccaggtaccacaggacagcctggggcaggccctagcaggccaggccacaccagagatcccattggggctgcagctgcacactgtccttgtccaggagattcaggagctcattgaggcacagacacgtgctcctggtccatgtgcagaagtaagagcactgccagcaccagccggtggagccagagccagcatgggaagaggcccctccagagagagcactggagctggagggagctccagccaaggaccagaccaacgaggagctgcctgaaatcacggaggtgccggagagcattaaaagaaggctgggaggaagagttccgagcagctacgcctgctcccagaggcaacctcctcctccaggcatggatgcgggtccacagctgggcatccaggctgtttgcccctaatgtgctgctcgggacaggcccttaacaggcgggcagtgggtgaggggaccaggaggtggctccaaagggtaaagcaaacaaagcttttaacgacagccgttgtgccccaggctctccatgccaccacctgccctaccatttattaatagtgttagaattacaagttgatgaaacgagattacaataaagtttgatttctgaaacttcaaaaaaaaaaa

SEQ ID NO: 19500 - DNA, 450 bp, Homo sapiens; identical to SEQ ID NO: 18580
  SIMILAR (331)..(450): 751254mologous to Homo sapiens immunoglobulin light chain variable region,accession number M74019,Smith-Waterman Score=163.
  misc_feature (1)...(450): n = a,t,c or g

SEQ ID NO: 19501 - DNA, 3250 bp, Homo sapiens
  SIMILAR (26)..(403): 841254mologous to Homo sapiens immunoglobulin light chain variable region,accession number M74019,Smith-Waterman Score=539.
cccacgcgtccggtcaggacacagcatggacatgagggtccccgctcagctcctggggctcctgctactctggctccgaggtgccaactgtgacatccaggtgactcagtctccagactccctgtctgcatctgtcggagacaaagtcaccatcacctgccgggcaagtcagggcattagcaatgggttatcctggtatcagcagaaaccagggcaagcccctacgctcctgatctatgctgcatccagtttgcagtcgggggtcccatctcggttcagtggcagtggatctgggacagatttcactctcaccatcagcagcctgcagcctgaagatgttgcaacttattactgtctacaggattatactaccccattcacagtgttacaagccataacaaaaaccccccagagaagcagatgtgtgagtctgcactgtcctagctactcctcctggtgttatcaactggctgtagggagtgaatctacagcctttaacgataaaccaacaagtcacgccaaagattctatgcagatgacttatttcgacaacttgcaattcacttgcagtgtgtcttatacatctcaaaagaataaggttacttcagatgacacaacatttgaaatctacaacctgaataaagatatgcgttctaagtttaaaactgtaggggctacagtaatgcttagagcaggttatacaaccggatttaaaagagatgcaaatggtgatttggtcattgaatatgacaacttaccacttatctacttaggcactattgaatatgcttacacgtataaacgtggtgtagatatgattacaaaagtaatctgctcaaatgacaaaatggagagaaccactatcaagacctccatttcatataaagctggtacatccagacagagtgttatcagagacttggtaagcagattaggtttcacactcattgatgaagacctttcaaatatccaaggttatacttacaagaacggttttagtgtctggggaagcaccgcagaagcacttacaaaggtttgtgaagagagtggactacgttggtacacctttaacaaacaaatccgtgtagtgccatttaacgctaaagctaaacagctttcttgggaggttttcccatataacgtgattgactctctgcaaggctattatagaagaactcgaaaggttcttaaaaagcagaataagacagagattaaagtcaaaactggtgtacgttgtaagattcacttagacggtcgtattaagatgggagacaacgttactatcagagaaagtgaagacttcgaaggtcagtaccgtgtgaaagaatgtctcgatgagtttaaaaaggaactgtacactggtcttccagcaattattgtttcttacgactcaaaaacacaatccgcaacggtaaggccattatattctattgatggtcttccaatgcctgaaattacaggtgttcccgttcaattccctagtggtggtggagcatctttaacattccctgtaaaaacaaatgacagatgctggttagcattctctatgctgccacttgatgacttcgttgtaaacgataaaaatgtacagatggaaacaaatctgagaagaactcatgatatgtccgactgtgtagcatttgttggtatcggtacaagaacccagaacttcaacccagaccctacagcagtgagattacactacggagattccgttttaagaatcactgatgatgggaatttttattttactggtgatgttcatatctccaagaacctttacgtaactgaagaagttcacggttcagattttatcagtgacacaacaggtagaacagctatctttgataactacatgaaagcttaccttgttgaaacaagagatgtaacaaacatctacaactactcttcaacaatggataacgcactgagaaaagtaactgttaatttcgatgcgacaacatctactgatatcgtaacagatattacacaagaggttgctggagcttggttgtggtgtaaatctccgcacaaacttttaaattacttgctcatgggttcggaaagtcaggttcagaatgaagcaatcaaccttgcttgtagaagggcttgtgaagagggtcttacaaagctgaatggtcgaaaaccagctattggtgctagattgcttttagcataccacgatgagaatagttgggagtgcccagaagagatgacacaggatgttaaagcagtaattgactggatgtatggtcaggcatcaagaaacttaggtcttaaggaggaaacgcttgtaactggtactggtaaagttgagttaattcaggagatgtccattgtagtcatgcctagcaagttcgtaaaaacctttaacaacgacgctttaaggtctacacacatccttatcgttgatgatgtccaaactctcaaacaacaacatcttatagctatggcaaaaatggtcaatcacatactacggttattgagtgaggttttcacgatggaagtcttagtaaactatatctattgttatgatgttgttcactccactacaaccgtagctcaacgtaatcccatcatcccacgagaaggtgagttggttcgcattgatggttggacttacactgtggaaagcatcattcataagtttgatgttgctggcgatgttcaagttatcgacgtagagattggtggtgacaaagttattacaacttatggtaaagaaaatggcaagatgatgtttgaagagtatacagcagaacctaaaaacatcggtaaaaagaatgagcgtaatgctgaacagcaagctatctttgaagttactgctaagtacaagaagcaagttgaccgcaaaggttatgcttacacaaaagagtctgcacagaatactgagaaggtaggtgtacagcttgctcatgatgctgcaaaggttagtcatgcaaagtatctgaagttccctgctgatgctcaaccaaaactggatggtgtacgttgtagaatctcaagagatgctgatttagttagcttcacggcttattctcgtgagaatactatttacaacgtcccagcagaactaatcccagatttgcttttgttgcttaaattgcatccacaagtcgaagactttgatggtgagatttatgctcatggctgggacttagaagatattgtgtctatgattaagaatgctgacaatccagaccgacatctactccagttctactgggttttctgcagagaaatccactga

SEQ ID NO: 19502 - DNA, 744 bp, Homo sapiens
  SIMILAR (537)..(656): 1001254mologous to Homo sapiens rpL32 (aa 1-135),accession number X03342,Smith-Waterman Score=202.
ccttccgctctcttcctcggcgctgcctacggagagtggcagccatcttcctttctcgggcatcatggcccgcccttcagacccccttgtgaagccccaaagatcgtcaaaaagagaacccaagaaagttcatccgggcacccagtcagaccggatatgtcaaaattaagcgttaactgggcggaaaaccccagaggccattgacaacaagggttcgttagaagattccaagggccaagatcttgatgccccaacattgggttatggaaggcaacaaaaaaacaaaggcacatgcatgccccagtggcttccgggaagttcctggggtccacaacgttcaagggagctgggaagttgcttgcttgatgttgcaacaaaatctttactgttgccgaggatcggttcacaatgttttccttccaaggaaccggcaaagcccatcgtggggaaaggagcttgcccaattgggcctttcaggagttcacccaaccccattggccagggctgcgcagttgaaagaaaattgagtaaggcagctcatgtgcaacaaatcttactgtgccgagatcgctcacaatgtttcctccaagaaccgcaaagccatcgtggaaagagctgcccaactggccatcagagtcaccaaccccaatgccagggcgcagtgaagaaaatgagtaggcagctcatttgcacgttttctgtttaaataaatgtaaaaactgcaaaaaaaaaaaaaaaaaaaaa

SEQ ID NO: 19503 - DNA, 1070 bp, Homo sapiens
  SIMILAR (49)..(525): 451254mologous to Homo sapiens ribosomal protein L27a,accession number U14968,Smith-Waterman Score=197.
  misc_feature (1)...(1070): n = a,t,c or g
cgtctgggctgccaacatgccatccagactgaggaagaccccggaaacttacttggccacggtgcagccacgggccacgggccgcataggccaagcacccggaaagcaccccccggcggcccgcggtaaatgcctggtggtcctgccatccacccacccggatccaacttccgacaaaatacccacccccaggcctactttgggaaaagttgggtaatgaaagcattaccccacttaaaagaggaacccagagcttcctgcccccaactgtcaaccttgaacaaattgtggactttggtccagtgaaacagacaccgggtgaaatgcctgcctaaaaacaagactggggctgctccccatcatttgatgttggtgcgatcgggctacttacaaagttctggggaaaggggaaagctccccaaagccagcctgttcttcgttgaagggccaaaattcttcagcagaaggagcttgagggaagaaggattaagaggtgtttggggggggcctgtgtccctggtggcttgaagccacaatggagggagtcttcattaaatgctcccctactttttccttgtggtgtgagtgtaggttcttcagtggcacctctacatcctgtgtgcattgggagcccaggttctagtacttagggtatgaagacatggggtcctctcctgacttcccccaaatatatggtaaacgtaagaccaacacagacgttggccagttaaacatttctgtttataaagtcagaataatcccctgtgatcactggaagggcctgcattgattggacctctgaattttacggggaatgataaatggacccctaaatggtcaacagggcttcacaggtaagaaatccatttttgaatggtcacaattctaaagaggggcaacgtcgaataggaacgaaaagggtccctttaggacttaagttctcagcccaaggtttttccacgtggccccctcatcnnnnnnnnnnnnnaaaacggagttttttttcccagcttgaagggcagggacacaatttgggttaattgaaccctccgcctccaaggtaaagcaat

SEQ ID NO: 19504 - DNA, 612 bp, Homo sapiens
  SIMILAR (35)..(460): 861254mologous to Homo sapiens testis-specific protein,accession number M94893,Smith-Waterman Score=595.
ggggcgcctggaagcctggcgcatgcgccctgagggctcgctgacctaccgggtgccagagaggctgcggcagggtttctgtggcgtgggtcgggcagcacaggccttggtgtgtgcgagtgccgaggagggcaccgccttcaggatggaggctgtacaggagggggcggccggggtggagagtgagcaggcggctttgggggaggaggcggtgctgctgttggatgacataatggcagaggtggaggtggtggcccaggaggaggccctcgtggaggggcaggaggaggcccagaagccacagcctggccctgggcccataaccccagagtccgccctggaggagctggtggccgttcaggtggagctggagccggttaatgcccaagccaggaaggccttttctcgccagagggaaaagatggaatggaggcacaagccccacctaggccgcagaggcgccgtcatccagagcgtccctggcttctgggccaatgttgtatccttctcagtgttttttctgcctttccagttgagaggtgctcttggggaagtagaaacccttggtgatgccgagcagcagacgtttggggcatcatttgaagagcagaa

SEQ ID NO: 19505 - DNA, 154 bp, Homo sapiens
  SIMILAR (35)..(154): 701254mologous to Macaca sinica testis-specific protein,accession number AF284233,Smith-Waterman Score=135.
agaaacccttggtgatgccgagcagcagacgtttggggcatcatttgaagagcagaacctctttgacctaaatcagattgcaaaccacccccagatgtcagccctgatcactgaccaagatgaagacatgctgagctacatggtcagcctggag

SEQ ID NO: 19506 - DNA, 241 bp, Homo sapiens
  SIMILAR (2)..(160): 861254mologous to Homo sapiens testis-specific protein,accession number M94893,Smith-Waterman Score=229.
tgtttcttcggcctttctagtggagaggtgctctcggggaagtgtaagtgaccgatgggcagctcggcgtcgatgtgactctttggggaacaaaggggagttgccacggaccaatgtggctgtggaaaggcggagaaggcgtggtctctttgacctaaatcagattgcaaaccacccccagatgtcagccctgatcactgacgaagatgaagacatgctgagctacatggtcagcctggag

SEQ ID NO: 19507 - DNA, 322 bp, Homo sapiens
  SIMILAR (227)..(60): 391254mologous to Homo sapiens ASY,accession number AB015639,Smith-Waterman Score=78.
ctgccctctatcctactgtgtgcatgtcaaagacactgtggtccagtacggtatccctatagcggcaatggggcaacagattggtcactgcctgagcttcttcagctggttgtctgactgtgagggcccaggttacggcacgattgctgaggtggggcagctatggggcatcatggcaaaggaccttcttcgacattccttggcatcggaggaattggctttgaaccagaacctgacctgtcacgaccaatttgcccagtccaccagatcatcagccagggcctgtggctctatattctgcagcactacccaagggagttag

SEQ ID NO: 19508 - DNA, 3430 bp, Homo sapiens
  SIMILAR (3202)..(3372): 471254mologous to Strongylocentrotus purpuratus alpha-1 collagen,accession number M92040,Smith-Waterman Score=99.
tttcgtcaggcagaggaggcgctcagtaactgtatgcaggctgacaagaccaaggcagccgacctgcgtgccgcctaccaggcgcaccaagacgaggtgcaccgcatcaagcgcgagtgcgagcgcgacatccgcaggctgatggatgagatcaaagggaaagaccgtgtgattctggccttggagaaggaacttggcgtgcaggctgggcagacccagaagctgcttctgcagaaagaggctttggatgagcagctggttcaggtcaaggaggccgagcggcaccacagtagtccaaagagagagctcccgcccgggatcggggacatggtggagctcatgggcgtccagggtcaacatatggacgagcgagatgtgaggcgatttcaactaaaaattgctgaactgaattcagtgatacggaagctggaagacagaaatacgctgttggcagatgagaggaatgaactggatgctctgggctgtgttcagggtgactcactgcccctgcccagggaggaggccctggacccctgcagaagccaagactggcggaactccctgcggtccaatgatgcacccagacaaagggccccagcaggccagtccccagaggggccctgcacctggagccgcatcaggcctggacgggcctcttctgttttggctccaggcccggagaccacaagcgagctccccagagacctggccggatccaaccgtgaacagcttactctggcagagcccagcttggatgaacagattcttctcctggtctgtggctgcccaccagaggagtgcttggacgagtcactcctccgcatggacctggcctggatttcagagaatctagcagctgacccagctgcagaagcctttctcctggtgcagacatccgcactccctctctgggggccggctggggactccgcttcttggcgaccactgctgctccaggaggttccctcagatggacaaaaaatccaagaagagttggccaccaggtccccgcctcctcccaaagccacaggacacccaggctgggattgtcaccagacaagaggccgcggtgcctccctcttccacgaggccccctacatttcaaatcacccatttctgaaaaaacaccccaaggatctgaaagacacttggaacaatggaggaggaagccttgcggggagaactgaagaggggaaggcaagggggactttgggcaggaaggggaaaaaccttggtgacaagtaccagctaagtcaggaaagccatcagaacctgagcttggagaatggggctggagctgcagaggacgtgcaggatcagaatggggcttcagagactaaggccgccacctgccgccctgggtcctggcaggagtttttgatgcctcttctacagggggaggcctcagtatcaaaggagggtcccgaatccctgagcaggagggaaagggtggaaggatacgtctggggtctccgaggaggactgtcatcagagaatgaggaagtggcacccccagccaccttctccagggctcatgagaccaaagagccatggccaacagacagtcagctcctcgcagggaaagtcagagccactgggaggacagctaggggcaaggaggaaaaccaagtgtggcttggaaatgctctgcttctgcaaggaggaagcctggaggacaaagggctagaggaagaggatgagatgccgcatcaagaagcatccggtctggggtgcaggggtgcccccgaggagcctgactcccaggaacatgagagcaaggaaatgcttttctttgcaggagagacaggtttgccactgtttcccagatttgccttatcagttgaaggggccgaacccactgatcatggtcatccacaggctgtgagcaaaggacacaacaggtgtgcactcacaatcgatgagcttgcacaggacgtggaggcttgtttccagcagctgtccaccctgcagccgggcagcaggggctggcagtgctcagcctctgcatgtaggggagagaactggagctttgctcagaagtggcacagtggctgggagagagctcactctcagcaggtttggggaaattggggtatttgttctaatgaagaagcgaagtctaaagagagtggtgaaggtgataagccgggaaagaccacggccctgggcaccagcgaagttcctggtaacccagggacactgcctcattgggatgaagccagcccaaaccctccacaggggcctgctgagccctggggtgccctcgagagagtgaggagcaggtttcatcagctcatttctggattgaagaaacagagaagccagattttacatgacaacaccaaacttcacggagaccaagagaggttccatgaaagagtgtgcgcccttgaaagagagagagagagagaggtgacaaaaatatccaggctcgagcgggataaccacaggctggtaggggacatctctcagttaaagaaagaactggatcaatatttacaggcaatctctgaccttgaagactgcaatgggaagaggttgctgcaaattttggaagcttaaagaggaaaatgaaaccctgaaagggaatctgggccaactccagaaagccacgtctgagagtgtcaggaaatccaaagacacgatggagcaagtcaccctggaaaactggaagctccagacactgatctcggagcttggcgtcagttataaagagctgataaaggatatcgtgctaggaatagaagacatgatccgggccttaagtggggagaacgagcaccttctacgcagggtccatgtcctggagagggaagtcaccttgcagaggagcacggatcaggggcgtttggtgaggggaagggagcacctccagggaaaagccaagatgcacgctctagacaaagaggtgcaggtgactccactcacaggacagctgctttcaagagcctgtgggccacccttggaggaggaaatgagtctggctgcagggcagacaggaccttccacaggcaccgggaattccagacgcggtgctgattctccccctccatcgctggtctggagaaacactggtgtagccaatgccctgcaaggaaatgtcagtggagcagaagtgaaagaagcacatttggagaaagaggagaagaggcccaggtgttctgtggctcaggggcaagctctgagctccctgagcaatggccccatgctccgggactcagaggccgaggttactgaggaggatcccaggctgcgggcccagcagctccatcaccgggtgctgaccctgcagtgccagctcagggaccagggcgctgcccaccaggcgtctctggacgaggccacccgcctccaggaggagctccaggccaagcttgaagaacttcagaaaaagcaacatgaagcaaagttggcagtgactcccctgaag

SEQ ID NO: 19509 - DNA, 10672 bp, Homo sapiens
  SIMILAR (5538)..(7001): 961254mologous to Homo sapiens putative p150,accession number U93567,Smith-Waterman Score=2472.
  misc_feature (1)...(10672): n = a,t,c or g
accctgggcctgcgcagcccagcccagcccagcccatgccccgcacccgtaggctctgggggcccgctccccagcagacccgctccctgcaagacccacgggcgtcgccctgctgagaaactggtcccacacctacgtggacccaggtttcctgaggagctcgtggacccgcagatcccgcactggccaaagggctccggtccccagcaggctcaactgcgcacaggagctcgggagccagagccccggccctgcttgcagagccccaccaacaggcaccaactgctcgggtgcgggagctctgggtcgtcaaggccagcaacagcggcgcagccgacaatcgaacctggcggctggcctctggtggcccagggcataggacaagaggccctttggaatgctccttggagtacagcatcctcagggaggaagcatgggggcgcctggaagcccggcgcatgcgccctgagggctcgctgacctaccgggtgccagagaggctgcggcagggtttctgtggcgtgggtcgggcagcacaggccttggtgtgtgcgagtgccaaggagggcaccgccttcaggatggaggctgtacaggagggggcggccggggtggagagtgagcaggcggctttgggggaggaggcggtgctgctgttggatgacataatggcagaggaggtggaggtggtggcggaggtggaggtggtggcggaggaggagggcctcgtggagcggcgggaggaggcccagcgggcacagcaggctgtgcctggccctgggcccatgaccccagagtctgcactggaggagctgctggccgttcaggtggagctggagccggttaatgcccaagccaggaaggccttttctcggcagcgggaaaagatggagcggaggcgcaagccccacctagaccgcagagggcgccgtcatccagagcgtccctggcttctgggccaatgttgtatccttctcagtgtttcttcggcctttctagtggagaggtgctctcggggaagtgtaagtgaccgatgggcagctcggcgtcgatgtgactctttggggaacaaaggggagttgccacggaccaatgtggctgtggaaagccggagcaggctgggtactattgtcctgcatgcggcagagaaacccttggtgatgccgagccgcagacgtttggggcatctttttgaagagcagaagcgagttcagagcggaagaggtttttcagtgaatgaagctatttttaagggagtgtgattgctgccccttgctagtccgatctgggactgggcgtcttcggctataagcagattctgccactcctcagacaccagcaagtctctgcaaatcgcgcctccccatgtcagtgcagtcagcctcagaatcatacaccctctgtgaacacaggaggccttagtttacggggacggggaggcgaaaggagatcatacatggaagcagatctgagaatccctacccagcctctggtgctcttaggccttcttccctgttgctcctcgctttcccttccatcgtgtgtaaagtctctttgacctaaatcagattgcaaaccacccccagatgtcagccctgatcactgacgaagatgaagacatgatgagctacatggtcagcctggaggtgaggccaggaagactggggctagagggtttagcgggggagggtaagggaaataattcattcctgtaagcaagagtgagcacctcacccgaaaacctatctaagctttctccaccttgtcctgacaggtggaagaagagaagcatcctgttcatctctgcaagatcatgttgttctttcggagtaacccctacttccagaataaagtgattaccaaggaatatctggtgaacatcacaggtgacaggtggctcccaggatgggtagtggaaggaagatgggtagtggaaggaagatggtgggtggatcattgccaacgggatccagcccccttcccacaaaaactcctgtctctgtagaatacagggcttctcattccactccaattgagtggtatccggattatgaagtggaggcctatcgccgcagacaccacaacagcagccttaacttcttcaactggttctctgaccacaacttcgcaggatctaacaagattgctgagtcccctgacagatcctatgtaaggacctgtggcgcaatcccctgcaatactacaagaggatgaagccacctgaagagggaacagagacgtcaggcgttaatgtggccaccgagcatgagacgagcctgatccgtggccgcctagtgccccgtccagtggccgatgctcgggactcggcggaacccattctgctgaagcgacaggagcacacggatgcacagaatccacatgccgtcggcatggcctggatgtccattgacaacgagtgcaatctgcactacgaggtgacgctcaacggtgtgcccgcccaggatctgcagctgtatctggaggagaagcccatcgaggcgattggagcgccatcacagactcacttcaggaccctgggctcaaggacgtccagcaacccctggcagcccctggaggagaggaagggaagagctgtgcagncggtcctggcagccatcatcattgtgaccctgaagggcatgctgaggcagctcagcgacatgcgctccctctggaaggccaatcgggcggatctgcttatctggctggtgaccttcacggccaccatcttgctgaacctggaccttggcttggtggttgcggtcatcttctccctgctgctcgtggtggtccggacacagatgtgaactttacagacgaggatgctggggctcggagagctttgactgcttcccgcaggaatggccctcgaggaggaaatggagaccacttctgtctgtggtgtctgcctcctccctccctctaggagacgttctcctccctggtttacagacggcacaaacggaagaagaagaagataaaaagcccaaagcttgcactgtggctcctgaatgtttgcctctttccttcatcatcagtagctctgaggcttcaggctccaatttgtccctggagatgttcagcatcttcctagaagggatatggccaggtgtctcgtgcctggtccgaggccaaactgaccccaggggtgaggactggacctggcgctgcaaacctcctgatcagccttcccagccccaccagtgcagcctcatcctaaaggaggtgctgggccacacgggaaaaggggactttgacaaagggcagaacatcggcccagtggcggaggacacgtcagccccccaacttaacgcggtgcgggaataactgcagtcaccagccctggggcttcaaggactgcagcttactagaatagcgactgcctgggcaacaagagcaaaactccatcgaaagaaagaaaagaaagaaagaaaagaaagaaaagaaagaaaagagaaagaaaagaaagaaaggaaagaaagaagaaagaaagaaggaaagaaaataccattttattcttctgcttggtatgcccacttcctagttcattacacatggccctatggcaccctcaatcacagggttgccatgacctcaaaagtcctgcacacttgggtaggagtctccgaaatcccacgtccatattcctgggaaagagaatctgactgtggccactgatttctgctgctgagtgcccgtaccctagctcaaggaatagggcacacccctcttgtagaagggaaggcaggcgcacccgaggtccccctcccaccccaccttctgccctcccgcacacttggaccagtgctgttgacccggaagcggacatttctgcagctattctaagcacacgtcggcggagggagcgggacgtggccagcggtcagcggcgaaggaggcaggccctgcgcggggatcacggaagccctgtgattcaccatgaagttccatacaaggaggtccatccctttgagtatcggaaaaaggaaggagaaaagatccggaagaaatatccggacagggtccccttgattgtagagaaggctccaaaagcaagggtgcctgatctggacaggaggaagtacctagtgccctccgaccttaccgatggccagttctaccttttaatccggaagagaatccacctgagacctgaggacgccttattcttctttgtcaacaacactatccctcccactagtgctaccatgggccaactatatgaggacagtcatgaggaagatgattttctggtctggtttggaggtgagcactcaacccaaactgagcctaccgcagaactgtgctatcttgcccaagatgatttgtcaagaagagcacagatgactcatgctgagcctatcagggacctctcctgggactttgtaagctggaaccaaaggaaaaggacctgttgctttccagaagtaaagatgggaagacgtgagtctgtaggccatggcagccatatttcctgccagctggaccgcattccgagagaatgaggtctgtgttaatgagatcaacagcagaactccaatgcgcctctcatacattgagaaaaagaaaggccgccagacgactcatatcgtattttccttccgcgatatcacttccatgacgacaggatagagatacaaaattaatgtacacaaatcagtagtggaatcatcatcgcatggcatcaaatggaatcatcacatggaatcgaacggaataatcatcgaatggaatcgaattgaatcatcaaatggaatcgaatgcaatcatcgaatggaatcgtcatcgaatggaatcgaatgcaatcatcatcaaatggaatcgaatggaatcgaatggagtcgaatggaatcatcatcaaatggaatcgagtggaatcatcgaatggattcgagtgtctgttcagacaggtctgggggatatctaaaggactcatgaaataccattcaggacataggcatgggcaaggaattcatgactaaaacaccaatagcaatggcaacaaaagccaaaattgacaaatgataatttaaagttcatatggaaccaaaaaagagaccgtattgccaagacaatcctaagccaaaagaacaaagctggaggcatcacactacccgacttcaaactatactacaaggctacagtaaccaaaacagcatggtactggtaccaaaacagacatatagaccaatggaacagaacagagccctcagaaacaataccacacatctacaaccatctgaattttgacaaacctgacaaaaacaagaaatggggaaaggattccctatttaataaatggtgctgggaaaactggctagccatatgtagaaagctgaaactggatcccttccttacaccttatacaaaaattaattcaaggtggattaaacacttaaatgttagacctaaaaccataaaaatcctagaagaaaacctaggcaataccattcaggacataggcatgggcaaggacttcatgactaaaacaccaaaagcaatagcaacaaaaccaaaattgacaaatgggatctaacatactgaatgggcaaaaactggaagcattccctttgaaaactggcacaagacagggatgccctctctcaccactcctattcaacatagtgttggaagttctggccagggcaattaggcaggagaaggaaataaagggtattcaattaggaaaagaggaagtcaaattgtccctgtttgcagacgacatgattgtatatctagaaaaccccattgtctcagcccaaaatctccttaagctgataagcaacttcagcaaagtctcaggatacaaaatcaatgtacaaaaatcacaagcattcttatacaccaacaacagacaaacagagagccaaatcatgagtgaactcccattcacaattgcttcaaagagaataaaatacctaggaatccaacttacaagggatgtgaaggacctcttcaaggagaactacaaaccactgctcaaggaaataaaagaggatacaaacaaatggaagaacatgccatgctcatgggtaggaagaatcaatatcgtgaaaatggccatactgcccaaggtaatttacagattcaatgccatccccatcaagctaccaatggctttcttcacagaattggaaaaaactactttaaagttcatatggaaccaaaaaagagcccgcatcgccaagtcaatcctaagtcaaaagaacaaagctggaggcatcacactacctaacttcgaactatactacaaggctacagtaaccaaaacagcatggtactggtaccaaaacagatatatagaccaatggaacagaacagagccctcagaaataacaccgcatatctacaactatctgatctttgacaaacctgggaaaaacaagcaatggggaaaggattccctatttaataaatggtgctgggaaaactggctagccatatgtagaaagctgcaactggatcccttccttacaccttatacaaaaatcaattcaagatggattaaagacttaaacgttagacctaaaaccataaaaaccctagaagaagacctaggcattaccattcaggacataggcatgggcaaggacttcatgtctaaaacaccaaaagcaatggcaacaaaagacaaaattgacaaatgggatctaattaaactcaagagcttctgcacagcaaaagaaaccaccatcagagtgaacaggcaacctacaaaatgggagaaaattttcgcaacctactcatttgacaaagggctaatatccagaatctacaatgaactccaacaaatttacaagaaaaaaacaaacaaccccatcaaaaagtgggcgaaggacatgaacagacacttctcaaaagaagacatttatgcagccaaaaaacacatgaaaaaatactcatcatcactggccattagagaaatgcaaatcaaaaccacaatgagataccatctcacacccgttagaatggcaaccattaaaaactcaggaaacaacagacaataagagaggaaataggacaggtgaaggctccgaggagggacaatatccccaaacccagtgctgcccatgcagcccagctcgtcatgtggcatgaagtcagactgacacgggccctctgccccttctgggggtggctggattcttggcatcatttctgtgttgagctacatcccacacatccgttgatcactcagaaaccaaagggaaaggaactcactgacgttgtacatagaagtcaattttctggggcacagagcagagtggagagtatttggatacagaggagtatgacgaagacgccaggtgcaaaacttcaaaagcaagcataccagggagtgtcaaaccctcaccaccatcatcacacaggacagcagctaaaggctgtgccacacccactcatggaagcacctgatgctatagatgggtacagaaaaattcttgtcaattttacaaaaatctacagtgcatttgcagtgactaacagtgattatgaatggcaaccaacacttgtggccataggctacaggtgtggggacccacagggaaccgaacggaggacccagaaaccacctacagaggtggtcactacacagctccagccccagccgtggctgctgagaggccatgttggccttgtgctgctagatcatcctatttttaaagaaaagccataaggaagtaaagcactcctcagcaaatgtaaaagaacagaaattataacaaactgtctctcagaccacagtgcaatcaaactagaactcaggaataagaaactcactcaaaaccgctcaactacatggaaactgaacaacctgctcctgaatgactactgggtacataacgaaatgaaggcagaaataaagatgttctttgaaaccaatgagaacaaagacaaaacataccagaatctctgggacacattcaaagcagtgtgtacagggaaatttatagcactaaatgcccacaagagaaagcaggaaagatccaaaattgacaccctaacatcacaattaaaagaactagaaaagcaagagcaaacacattcaaaagctagcagaaggcaagaaataactaaaatcagagcagaactgaaggaaatcgagacacaaaaaacacttcaaaaaattaatgaatccaggagctggttttttgaaaagatcaacaaaattgatagaccgctagcaagactaataaagaagaaaagagagaagaatcaaatagatgcaataaaaaatgataaagaggataccaccactgatcccacagaaatacaaactaccatcagagaaaactacaaacacctctacgcaaataaactagaaaatctagaagaaatggataaattcctcgacacctacaccctcctaagactaaaccaggaagaagttgagtctctgaatagaccaataacgggctctgaaattgaggcaataatcaatagcttaccaaccaaaaaaagtccaggaccagatggattcacagccgaattgtacgagagctacaaggaggagctggtaccattccttctgaaactattccaatcaatagaaaaagagggaatcctccctaactcattttatgaggccagcatcatcctgataccaaagcctggcagagacacaacaaaaaaagagaattttagaccaatatccttgatgaacattaatgcaaaaatcctcaataaaatactggcaaaccgaatccagcagcacatcaaaaagcttatccaccatgatcaagtgggcttcatccctgggatgcaaggctggttcaacatatgcaaatcaataaatgtaatctagcaggtccctagaagagaagcctcatcagtgttctcttaacaaaaggacccaaagaagagaaaggtatttattgtgctctgaggctgacttcattgagtggctcaagtcacacgcagttcctctgccctcttcaggcatgtggcatagtctggccagccccgtggatagcattgttaatgggacagctcagttgcttccatccttcccccagatgccctttcactctcccttggcttcatgccacttggctttgggctccttctttgtggccacgtggtcttgtgtaactccagacccagatccagccaggagttcagaaatttccagggaagacccagtagagatgagggtggaaaatctggcacgatgtgacagcggacatgggcccaagcagaacatgattcacacacaagaaaatgctaaacatgggccccagcctctgaaatacggaaaagcctatgagaaaatggttaaagtgatgctgaatgccaaatccatcagtgccaatccatcatatcccttaaaaagagtgaggtgcttgtgtaacacagcaacacatgagcatcttttgggggcagttggaaacatcagtcctgagctaaagtgcataaaggagctgatggagctgaaagccaaggctcgagaactacgtgaagaatgcagaagcctcaggagccaatgcgatcaactggaagaaagggtatcagtgatggaagatgaaatgaatgaaaggaagtgacaaggctggttcaatatatgcaaatcaataaatgtaatccagcatataaacagaaccaaagacaaaaaccacatgattatctcaatagatgcagaaaaggcctttgacaaaattcaacaacccttcatgctaaaaactctcaataaattagcaccacatcacacttattctaaaattgactacataattggaagtaaagcacttgtcagcaaatttaaaagaatgcaaatcataacaaacagtctctcagactacagtgcaatcaaattagaactcaggtttaagaaaatcactcaaaaccgcacaactacatggaaactgaacaacctgctcctgaatgacttctgggtaaataacaaacttaaggcagaaataaataagttctttgaaaccaatgagaacaaagacacaatgtatcagaatctcagggacacagctaaagcagtgtttagagggaaatttatagcactaaacacccacagcagaaagtgggaaagatctaaaatcgacaccctaaaatcacaattagaagaactagagaaggaagagcaaacaaattcaaaaactggcagaagaaaataaaagagcctctgtcactcagtttaaccccacaaatgacctcacaaacaactcatctcattattcttctctaatgagaagtacactgatgatgatgatcatcatcatcattttgatgtcagtctagcaacaataccagaccaagacgaaagaaaagagagaaggaaatattagccatgtacttaatgaaacactaccttcagcacaatcctgacactttcaaggctctgttcatccttgctacagggtgctcaagcgctttagcgggcactagagaaaaatcatctattactccaaatagcttatataaactgattggtaccgagctcgaattcgtaatcatgacacaccaaccgcccatccgagaagagaaggaggaaaagaagaagaaaaaagggggagaattgaaaaataatatcaatgatcgggttgtcatatcagatcgatatgcttatccagtatcaaactgcagtaaaaatttcaaggatctaagtaatcatgaggcaaaggaaaacaggaaggtgcaagaccaccaatgcagcccctag

SEQ ID NO: 19510 - DNA, 1083 bp, Homo sapiens
  SIMILAR (577)..(344): 391254mologous to Hylobates muelleri dopamine receptor D4,accession number AB032917,Smith-Waterman Score=95.
ggtagctcagagaaaagaaaattcaagacaggaaaccagaagctgtccatggaggtggaaaagaatcaacaaatgaggtcactttctttataccagcagagagttgaaggcagcaaatgtgctgtgaggcgaaagggaggctcccccaaaccaaaagcatttttggcagctgctgagaagttcctgaatgttcctgtcatgagatctgctagccatgagcagctggtgctcacaggtgaccccaacaaaaccttgcccggtagcaaaagccggctgtcaggcacagattcacccagagcatgcagcactttccctatatgggccaccaaaattgtaaccgaaatgcaggttcagctatttgctgcttgcagagtccagttaataaaacatcctcggcccagcgcggcccgcaccgccatggaggtgctggagagcggggagcagggcgtgctgcagtgggaccgcaagctgagcgagctgtcagagcccggggacggcgaggccctcatgtaccacacggcctgtcagggacatgaggaacaggtgtgggaggaggaagcccttcagctgggcctgaggtcgggcatattgctcaaccactggaaaaggcagttggtaggaggagcagggattttgcggtcagcacaacttcatagcccttatcaccactggcaaatgatttctttagtatccccgagccctgctgtcatggcagtcatggaaaatgatgatatctgcatggtgctttgtgtcaaagtaatggatgagcctaatcatatccttgatgccatcagtgaacatcagattccttctttggaagaccagtggttctcagagtgtgctttatggaccagcaaagcatacgagaacttggtagaaagacatattcttgggccccactgcagacctactgaattagaaactctaggcatatctgaggatgacatagaccataacccttatctagactttccaggcgttgcaggcttgggatccagaaggaacgtgaaggagcggggctggttgagtgagatgaagaaggagggagacatcttcatgaagatccaagggccccaaagctga

SEQ ID NO: 19511 - DNA, 1710 bp, Homo sapiens
  SIMILAR (376)..(969): 701254mologous to Drosophila melanogaster Partner of Paired,accession number AF187980,Smith-Waterman Score=722.
atgaatggaacagcggaaggacagcacccctgggtccacagcaccttcaacggcgagccccagagcctgtcttcatcagtcagggttaaaaatcaggggccacgggaccaggccgaactcggtttccagggcaacggctccacagttccggcagcgcaggcccgtaccattgcgcgggcgcgggggagcgggagcggcggaggggacgcgctgcagggcggcggagccggggccggcccgggcgctaccaaacgcacggcccgcctgctcgcccggggtctgcgccgagccgcgctccggccggacggccgcggcgtccttggtgcgggggccggcagctcccaacgccgcggaggggggaggaggaagatggagacccacatctcatgcctgttcccggagctgctggccatgatcttcggctacctggacgtccgggacaaggggcgcgcggcgcaggtgtgcaccgcctggcgggacgccgcctaccacaagtcggtgtggcggggggtggaggccaagctgcacctgcgccgggccaacccgtcgctgttccccagcctgcaggcccggggcatccgccgggtgcagatcctgagcctccgccgcagcctcagctacgtgatccagggcatggccaacatcgagagcctcaacctcagcggctgctacaacctcaccgacaacgggctgggccacgcgtttgtgcaggagatcggctccctgcgcgctctcaacctgagcctctgcaagcagatcactgacagcagcctgggccgcatagcccagtacctcaagggcctggaggtgctggagctgggaggttgcagcaacatcaccaacactggccttctgctcatcgcctggggtctgcagcgcctcaagagccttaacctccgcagctgccgccacctttcggatgtgggcatcgggcacctggccggcatgacgcgcagcgcggcggaggggctgcctgggcctggagcagctcacgctacaggactgccagaagctcacagatctttctctaaagcacatctcccgagggctgacgggcctgaggctcctcaacctcagcttctgtgggggaatctcggacgctggcctcctgcacctgtcgcacatgggcagcctgcgcacgctcaaccgtgcgctccgtgtgacaacatcagtgacacgggcatcatgcatctggccatgggcagcctgcgcctctcggggctggatgtttcgttctgtgacaaggtgggagaccagagtctggcttacatagcccaggggctggatggcctcaagtctctctccctctgctcctgccacatcagtgatgatggcatcaaccgcatggtgcggcagatgcacgggctgcgcacgctcaacattggacagtgtgtgcgcatcacggacaagggcctggagctgatcgctgagcacctgagccaactcaccggcatagacctgtacggctgcacccgaatcaccaagcgcggcctggagcgcatcacgcagctgccgtgcctcaaggtactcaacctgggactctggcagatgacggacagtgagaaggtcagatgcacagaatttagccagttttcaggaatctgtaaaagcaggatggttaagttctgtggccccctgaacttcatccagctgacagctgacggttgtacgaagcagaaaaggtcttcaagtttccagagcctggagtag

SEQ ID NO: 19512 - DNA, 2325 bp, Homo sapiens
  SIMILAR (738)..(1517): 1001254mologous to Homo sapiens dJ462O23.2 (novel protein),accession number AL031431,Smith-Waterman Score=1324.
tggcacgaggtgataggtgggccttagaggagacgccgccgagcaccgcaagaactggaaaacacacccctctctgtctgcctgggagagccacggaaattggcacttctctgagtgaagctgaggagaaggctgtaaatctgccaaaacagccttgaagtattcttttgtcatgaggaagtgacggctgctggagggaggtgaacaccacaaggagagatggcatctggcctgggccccgcctagcagcagctccacctcctaggccaggccctgtgggatgcgccactagaccaccatggacggatcccacagcgcagccctgaagctgcagcagctgcctcccacaagtagctccagcgccgtaagcgaggcctccttctcctacaaggaaaacctgattggcgccctcttggcgatcttcgggcacctcgtggtcagcattgcacttaacctccagaagtactgccacatccgcctggcaggctccaaggatccccgggcctatttcaagaccaagacatggtggctgggcctgttcctgatgcttctgggcgagctgggtgtgttcgcctcctacgccttcgcgccgctgtcactcatcgtgcccctcagcgcagtttctgtgatagctagtgccatcataggaatcatattcatcaaggaaaagtggaaaccaaaagactttctgaggcgctacgtcttgtcctttgttggctgcggtttggctgtgcgagggtacctacctgctggtgacattcgcacccaacagtcacgagaagatgacaggcgagaatgtcaccaggcacctcgtgagctggcctttccttttgtacatgctggtggagatcattctgttctgcttgctgctctacttctacaaggagaagaacgccaacaacattgtcgtgattcttctcttggtggcgttacttggctccatgacagtggtgacagtcaaggccgtggctgggatgcttgtcttgtccattcaagggaacctgcagcttgactaccccatcttctacgtgatgttcgtgtgcatggtggcaaccgccgtctatcaggctgcgtttttgagtcaagcttcacagatgtacgactcctctttgattgccagtgtgggctacattctgtccacaaccattgctatcacagcaggtgcaatattttacctggacttcatcggggaggacgtgctgcacatctgcatgtttgcactggggtgcctcattgcattcttgggcgtcttcttaatcacgcgtaacaggaagaagcccattccatttgagccctatatttccatggatgccatgccaggtatgcagaacatgcacgataaagggatgactgtccagcctgaacttaaagcttctttttcctatggggctctggaaaacaatgacaacatttctgagatctacgctcctgccaccctgccagtcatgcaagaagagcacggctccagaagtgcctctggggtcccctaccgagtcctagagcacaccaagaaggaatgagactcgcctccctctatttataactgtcccctccaggctgacagtggttcaaccctgaatcctaaaacttgcctttcaagtctcattttgtttctaactgagaactctatggatgatgatctcaaaaagcctttgtctctgggaaaggatgcgttatcttggtcttggaaatttcaaatgatgagggttgggggatggaagcattattccaggtggacgggatagaatccagcctctgcctggattagcccagggggatttggaaagcctttctaccatccttgaggatggtaactgagcttcctctgacagtgaccaaaggatgctgtatccttcagagctaaggcaagacagagagtctgctgttaattctcaaatccagcgaaaggctggacatctctaaatctcgtcttcctccacctcatgtgcatgcctgatctcaccctgacactcctgatgccgcatctgtgatagcactcgtgttgccttcacatggcaggctgggccaaccctgggtggaaggttctgacatttgtgttttcagaaatgtacatctgccttccagtcatctgtgcccttctagggaagatgtgcttgatatgttcaaattggatctactctgaaaacgaaacttggttttggtcctgtgaggactacttgtttgtccacctcctccaccaaaggaattaggaagttaagagaaggggaagaatatggaggataggagagggtgatgatgctttagcccattaaggaagaaaagttccccttactcttacaaaaggtgattgcaccacttaaaaaa

SEQ ID NO: 19513 - DNA, 2041 bp, Homo sapiens
  SIMILAR (924)..(2030): 901254mologous to Homo sapiens dJ462O23.2 (novel protein),accession number AL031431,Smith-Waterman Score=1708.
ttttgcgcactcgcggagcttgagccagaagggtcggacgcccacgcccctggcaggagctcggtggagcaggcaagccccagttgtccccacttttcgggtggaaacaccgaggacacgccccgacgcaggggcaactcccatggtggcttcttcccgccctcggggctccacctagctcagccctggaattccgcaagcacccggaggccggggggtctccgcgggcgtcccatgcggaggacatggtgcgccgtgtactcttccccacgacctcagggaccggtccccccgccggaacagcttccaacctggtccggtcccggcagctgaatttggccagcccaacctcccggtcgctatttcgcgagtccaccttccgccgtccgcgaggtaactccggagggcaggaaaggagagatatgtttggtcccaagtctcgcgagggctctggggagcgctgggtcttcaaggacgttttggatttgaatacttggtgagagcacctgggtcccgttgccttggaatgttctttccagttttgcatcgaggccaagaggagcgggggcatgggctaccttactaaaggtgatgccatggagttaactttgccagaatttctcctcttcgtgccgagcggctcgggcttcctggcggcagcagatggtggagttagcaggtgggatgaggggaggcgttcttggtctaagcccgcttctggaacagaggtgctgtctcctcgagttgtaagtttcttcttcgcctacaagtttgggatgtatgaggcaaaaagaatacagaatacccaagaagctcaccaatatgccattcctggggtcccaaccgagccttttagctctgagatcctgtcatcccacaggaaggacgtgttctgcctgcaggtggctttattctgtcttgctgctcatcgggtgagtcagattggcgccctcttggcgatcttcgggcacctcgtggtcagcattgcacttaacctccaggtaagtttccacatccgcctggcaggctccaaggatccccgggcctatttcaagaccaagacatggtggctgggcctgttcctgatgcttctgggcgagctgggtgtgttcgcctcctacgccttcgcgccgctgtcactcatcgtgcccctcagcgcagtttctgtgataggtaagaccatcataggaatcatattcatcaaggaaaagtggaaaccgaaagactttctgagtaagttcgtcttgtcctttgttggctgcggtttggctgtcgtgggtacctacctgctggtgacattcgcacccaacagtcacgagaagatgacaggcgagaatgtcaccaggcacctcgtgagctggatcattctgttctgcttgctgctctacttctacaaggagaagaacgccaacaacattgtcgtgattcttctcttggtggcgttacttggtaagttgacagtggtgacagtcaaggccgtggctgggatgcttgtcttgtccattcaagggaacctgcagcttgactaccccatcttctacgtgatgttcgtgtgcatggtggcaaccgccgtctatcaggctgcgtgagttagtcaagcctcacagatgtacgactcctctttgattgccagtgtgggctacattctgtccacaaccattgctatcacagcaggtaagggtttttacctggacttcatcggggaggacgtgctgcacatctgcatgtttgcactggggtgagttcttgcattcttgggcgtcttcttaatcacgcgtaacaggaagaagcccattccatttgagccctatatttccatggatgccatgccaggtaaggttaacatgcacgataaagggatgactgtccagcctgaacttaaagcttctttttcctatggggctctggaaaacaatgacaacatttctgagatctacgctcctgccaccctgccagtcatgcaagaagagcacggctccagaagtgcctctggggtcccctaccgagtcctagagcacaccaagaaggaatgagactcgcc

SEQ ID NO: 19514 - DNA, 1240 bp, Homo sapiens
  SIMILAR (163)..(711): 431254mologous to Homo sapiens phenylalkylamine binding protein,accession number Z37986,Smith-Waterman Score=238.
  misc_feature (1)...(1240): n = a,t,c or g
cccgaactagggatgtgacagagcgcgagacccagcctaaagagagcccggagccagcgtgggaggccgctgccgtcgcgcgccttggtttttctgttccttttttttttttttttttttaacttcctgcctatacacacgcagccatcagcccacaaagacatgactaccaacgcgggccccttgcacccatactggcctcagcacctaaagactggacaactttgtacctaatggaccgccccacctgggcatatactgggctgggcctcttctctgtcacagggggtcttaggtcgtggaccacatgggctgttgttcagggtcgtgctnccgggttgtcccattggggactttgggcgggcgactgttccctgttgctgggttttgcagtggtgtgggttcattcacctggtgatcgaggggctggttccgttctctaactacgaaagaccttgctttggagaccaaagccttctttattctcaactctgggaaagagtatggccaaggggagacagcccgatacatcctgggggtgacaaatttcacagtgttgcatgggaaaccatcacaagctttgcctgtgggggaaccattcagcctgtgggtggtgatcgtctcttctcctacagcatccccttccgcttcattcttacagcttgtggtctctgtggggccagatctatgggggatgtgctctacttcctttaaagggccaccccgacggatttccagcacggaaaacctgggcccacccctctcctacttcctggattttcctttgtcttccatgaaatgcccctgtggctggtgcctgcccctggaagtcccttgtgccttgatgcctgtgaaagcaccctcaactcatgccccagagcaacgcctggaatgccaagggcccacaaaagcccaagagcaagaagaactgaggagtggtggacccaggctcgaacactgagcgaggaaggagctctctgcactgcccagaaagagtctagtcctgctcccacagtttggagggacaaagtctaattgatctgtcacactcaggctcgatgggcaggcacaagaaggggaataaaggggctgtgtgaaggcactgctgggagccattagaacacagatacaagagaancccagggggtctatgatggtgacgatttttaaaatcaggaaataaaagatcttgactccgaaaaaaaaaaaaaaaaaaaaaaaaaaaaagtcgtatcgatgt

SEQ ID NO: 19515 - DNA, 257 bp, Homo sapiens; identical to SEQ ID NO: 18663
  SIMILAR (256)..(206): 761254mologous to Homo sapiens PRO0657,accession number AF090942,Smith-Waterman Score=85.
  misc_feature (1)...(257): n = a,t,c or g

SEQ ID NO: 19516 - DNA, 398 bp, Homo sapiens; identical to SEQ ID NO: 18664
  SIMILAR (197)..(316): 421254mologous to Mus musculus metallothionein-III,accession number M93310,Smith-Waterman Score=61.

SEQ ID NO: 19517 - DNA, 432 bp, Homo sapiens; identical to SEQ ID NO: 18665
  SIMILAR (3)..(431): 931254mologous to Homo sapiens neutral calponin,accession number D83735,Smith-Waterman Score=717.

SEQ ID NO: 19518 - DNA, 422 bp, Homo sapiens; identical to SEQ ID NO: 18666
  SIMILAR (178)..(71): 451254mologous to porcine adenovirus 3 putative 13.1 kDa E3 protein,accession number AF083132,Smith-Waterman Score=77.

SEQ ID NO: 19519 - DNA, 4413 bp, Homo sapiens
  SIMILAR (1186)..(4410): 981254mologous to Homo sapiens ABC transporter member 7,accession number AF328787,Smith-Waterman Score=5381.
atggccaggccattggctctgcccctcactgggatgtctgcgcccggctcctccctgaccaccattccccacacaccgtcccacccacgctccccgtctacaccagacaccgtgtcccacccacgctccccgtctacaccagacaccgtgtcccacccacgctcccggtatacaccagacaccgtcccacccacgctcccggtctacaccagacaccgtgtcccacccacgctcccggtctacaccagacaccgtcccacccacgctcccggtatacaccagacaatgtgtcccacccacgctcccggtctacaccagacaccgtgtcccacccacgctgccggtctacaccagacaccgtcccacccacgctccccgtctacaccagacaccgtgtcccacccacgctcccggtctacaccagacaccgtcccacccacgctcccggtctacaccagacaccgtgtcccacccacgcttaccgtctacaccagacaccgtgtcccacccacgctcccggtctacaccagacactgtcccacccacgctcccggtctacaccagacaatgtgtcccaccccacgctcccggtctttaccagacaccgtcccacccacgctcccggtctacaccagacaccgtgtcccacccacgctcccggtctacaccagagaccgtgtcccacccacgctcccggtctacaccagacaccgtcccacccacgctccccgtctacaccagacaccgtcccacccacgctcccggtctacaccagacaccgtgtcccacccacgctcccggtctacaccagacactgtcccacccacgctcccggtctacaccactgtcccacccacgctcccgaggtttctgtttcccccgccccatgttgtgccctccagactcatgaacaagctacagccgggctccgtccccaagatcaaccgctccatgcagaactggcaccagctagaaaacctgtccaacttcatcaaggccatggtcagctacggcatgaaccctgtggacctgttcgaggccaacgacctgtttgagagtgggaacatgacgcaggtgcaggtgtctcttctcgccctggcggggaaggtcaccaatgcctcttccccagggagactggggtggggcgtgagccggggctccctgaagcacccctttgtccacacaggcactcctcagctgctggccctggtacagcactgggtgcccggggcacggctggtggaggagctgccacacgagctggtgctggtgctgccctacacgggtgcccatgacggcagcttcgccacactcttccgagagctagacacgcggctggcggagctgaggctcactggctacgggatctccgacaccagcctcgaggagatcttcctgaaggtggtggaggagtgtgctgcggacacagatatggaggatggcagctgcgggcagcacctatgcacaggcattgctggcctagacgtaaccctacggctcaagatgccgccacaggagacagcgctggagaacggggaaccagctgggtcagccccagagactgaccagggctctgggccagacgccgtgggccgggtacagggctgggcactgacccgccagcagctccaggccctgcttctcaagcgctttctgcttgcccgccgcagccgccgcggcctgttcgcccagatcgtgctgcctgccctctttgtgggcctggccctcgtgttcagcctcatcgtgcctcctttcgggcactacccggctctgcggctcagtcccaccatgtacggtgctcaggtgtccttcttcagtgaggacgccccaggggaccctggacgtgcccggctgctcgaggcgctgctgcaggaggcaggactggaggagcccccagtgcagcatagctcccacagcgcccttgagtgtgcacagcccattgtctgcaggttctcggcaccagaagttcctgctgaagtggccaaggtcttggccagtggcaactggaccccagagtctccatccccagcctgccagtgtagccggcccggtgcccggcgcctgctgcccgactgcccggctgcagctggtggtccccctccgccccaggcagtgaccggctctggggaagtggttcagaacctgacaggccggaacctgtctgacttcctggtcaagacctacccgcgcctggtgcgccagggcctgaagactaagaagtgggtgaatgaggtcagatacggaggcttctcgctggggggccgagacccaggcctgccctcgggccaagagttgggccgctcagtggaggagttgtgggcgctgctgagtcccctgcctggcggggccctcgaccgtgtcctgaaaaacctcacagcctgggctcacagcctggatgctcaggacagtctcaagatctggttcaacaacaaaggctggcactccatggtggcctttgtcaaccgagccagcaacgcaatcctccgtgctcacctgcccccaggcccggcccgccacgcccacagcatcaccacactcaaccaccccttgaacctcaccaaggagcagctgtctgagggtgcactgatggcctcctcggtggacgtcctcgtctccatctgtgtggtctttgccatgtcctttgtcccggccagcttcactcttgtcctcattgaggagcgagtcacccgagccaagcacctgcagctcatggggggcctgtcccccaccctctactggcttggcaactttctctgggacatgtgtaactacttggtgccagcatgcatcgtggtgctcatctttctggccttccagcagagggcatatgtggcccctgccaacctgcctgctctcctgctgttgctactactgtatggctggtcgatcacaccgctcatgtacccagcctccttcttcttctccgtgcccagcacagcctatgtggtgctcacctgcataaacctctttattggcatcaatggaagcatggccacctttgtgcttgagctcttctctgatcagaagctgcaggaggtgagccggatcttgaaacaggtcttccttatcttcccccacttctgcttgggccgggggctcattgacatggtgcggaaccaggccatggctgatgcctttgagcgcttgggtgagaacttcctgtcaggagacaggcagttccagtcacccctgcgctgggaggtggtcggcaagaacctcttggccatggtgatacaggggcccctcttccttctcttcacactactgctgcagcaccgaagccaactcctgccacagcccagggtgaggtctctgccactcctgggagaggaggacgaggatgtagcccgtgaacgggagcgggtggtccaaggagccacccagggggatgtgttggtgctgaggaacttgaccaaggtataccgtgggcagaggatgccagctgttgaccgcttgtgcctggggattccccctggtgagtgttttgggctgctgggtgtgaatggagcagggaagacgtccacgtttcgcatggtgacgggggacacattggccagcaggggcgaggctgtgctggcaggccacagcgtggcccgggaacccagtgctgcgcacctcagcatgggatactgccctcaatccgatgccatctttgagctgctgacgggccgcgagcacctggagctgcttgcgcgcctgcgcggtgtcccggaggcccaggttgcccagaccgctggctcgggcctggcgcgtctgggactctcatggtacgcagaccggcctgcaggcacctacagcggagggaacaaacgcaagctggcgacggccctggcgctggttggggacccagccgtggtgtttctggacgagccgaccacaggcatggaccccagcgcgcggcgcttcctttggaacagccttttggccgtggtgcgggagggccgttcagtgatgctcacctcccatagcatggaggagtgtgaagcgctctgctcgcgcctggccatcatggtgaatgggcggttccgctgcctgggcagcccgcaacatctcaagggcaggtcccagccggcagcggccttcgtggcggccgagttccctggggcggagctgcgcgaggcacatggaggccgcctgcgcttccagctgccgccgggagggcgctgcgccctggcgcgcgtctttggagagctggcggtgcacggcgcagagcacggcgtggaggacttttccgtgagccagacgatgctggaggaggtattcttgtacttctccaaggaccaggggaaggacgaggacaccgaagagcagaaggaggcaggagtgggagtggaccccgcgccaggcctgcagcaccccaaacgcgtcagccagttcctcgatgaccctagcactgccgagactgtgctctga

SEQ ID NO: 19520 - DNA, 447 bp, Homo sapiens
  SIMILAR (58)..(279): 891254mologous to Homo sapiens neutral calponin,accession number D83735,Smith-Waterman Score=329.
atggcttggctcatgcctgtaatcccagcacttttggaggccgagggtggtggcggggggcggtggatctcgagactcatgaacaagctacagccgggctccgtccccaagatcaaccgctccatgcagaactggcaccagctagaaaacctgtccaatttcataaaggccatggtcaggtacggcatgaatcttgtggacctgttggaggccaacgacctgtttgagagtgggaacatgacgcaggtgcaggtgtctcttctcgccctggcggggaagtggagactgggtttcaccatgctggccaggctggtgtctggtgtagaccgggagcgtggactcatgaacaagctacagccgggctccgtccccaagatcaaccgctccatgcagaactggcaccagcgagaaaaagtgactatcttcattaaggccatggttagctaa

SEQ ID NO: 19521 - DNA, 2225 bp, Homo sapiens
  SIMILAR (70)..(999): 431254mologous to Homo sapiens neutral calponin,accession number D83735,Smith-Waterman Score=510.
tgtcgtcccgtcctgtgcggccccgtcccgccgcccgcttgtcagccatgagctccacgcagttcaacaagggcccctcgtacgggctgttcggcccagggtcaagaaccggctcctggtccaaatatgacccccagaaggagggcagagctccgcacctgggatcgagggactcaccggcctctccatcggccccgacttccagaaggggcctgaaggatgggaactatcttatggcacactcatgaacaagctacagccggggctccgtccccaagatcaaccgctccatgcagaacttggcaccagctagaaaacctgtccaacttcatcaaaggccatggtcagctacggcatgaacccttgtggacctgttcgaggccaacgacctgttttgagagtgggaacatgaccgcaggtgcaggtgtctcttctcgccctgggggggaaaaggccaaagactaaaggggctgcagaaggggggttggacattggcgtcaagtactcggagaagcaggagcggaatttcgacgatgccaccatgaaggctggccagtgcgtcatcggggctgcagatgggcacccaacaaatgcgccagccagtcgggcatgactgcctacggcacgagaaggcatctctatgaccccaagaaccatatcctgccccccatggaccactcgaccatcagcctccagatgggcacgaaacaagtgtgccagccaggtgggcattgacggcttcccgggacccggcggcacatctatgaataccaagctgggaacccgacaagttgtgacaacttctccatgttccttgcagattgggctacacgcagggcgcccaaacccagagcggccaggtctttcggccctgggcggccagatatatgaaccccaagtacttgcccgcaaggcacaattggccgatggggctccctcgggcaccggaagatttgcccggacccgggggaggtccctgaatatcccccttactaccaaggaggaggccggctactgaggctcccaacacgctcttctccccacatcgtctccccatctgggtttttgggtttttctgtgttttcatcttttttttttatttttcttaacccgttcagtgctgccagtcaaccaaaagggtctgtgagtgtcagcgtgggatcaaggcaagcagagcttttttccccctttgccttgatcccttcgcaaggctgagccactgggctgtgggggaaggggtcaaggccatatcccaatacgtgtagggcgaggggtccctgctggcacattcatgctgtgctggtaagaagagacctgggcttggaaggaacccggtccccgacggtttcctggttagcctcgcctctttccccttttgtcagatgagcagtttgcggttcctatgcccgcaagtttcaggaacgaattccaggagaaaaatacattttttcccccaggggtgggggcaaggacagtggagagagtgctaggaaatgagtcccctgggaaaggggaccggggccgtgatgttaaatatctccggcttcccaagtgactggatttgcctaaggaccttcagatcagacagacttcataccctcagacctgccccggggccaggtggagaaagtgagggccgtacaaggaagtgaaattctgagttgttggggctaagcctgaccccctctccatgctccccgccccaacccactctggcctcagtagatttttttttcagttgtggttgttgcccaggctggagtgcagtggcgccatcttggcttcactgcaccttccacctttccgggcttcaaagcgattctccaagccttcagcctccctgagtagcttaggacttgcaggtgctccaaccacgcccgggcttaatttttgtatttttagtagagatggggtttcccccatgttgggccaggctggtctcgaactcctggcctcaggtgtgatccgcccgcctccgcctccccaagcgctggagattacaggtgtgagccagggtgcccaggccctcagtaggttttaaggagtccccagccctcctcccttctgggcccgaccagcttatactgctccatcttccaccggccacatgccccggcaaagtactgcacagggaccccccaccccaggggacctgctccgtgagataaatgtggaaatacgactgtggaccaaacgcaattaaaacctctgttttgtacggagaa

SEQ ID NO: 19522 - DNA, 516 bp, Homo sapiens
  misc_feature (1)...(516): n = a,t,c or g
atgcaaggtcttcgggtttctcattcaacattttatactttgatccctgaggtaacggaaaatcctcatcgcctagactttcattggttcctatcagctcagctggaaagggtggcaagtgggacaatcctgaagaaaaaagagtcacccccacgtcctaaagtacttggaagtgctcgctgggatctgcctgtactccaggttggtgcaactccaccgccctccagtgaagtcccagaagcgatcaagtttaaagtgaaagggggatggaagcattttttctccctatgccttcggagtctgtggcttcagtttgctgcaggttctctccgtggacttctcagaaacctcaactttccacttcgagggacagaaagctacaaggaaaacgctgatggttttngactggtgtctgggctagctaggatcacagctgagagcgaaggtgctctcagtgtccgaagaccacgtgctggtgaacccacaatgagaagcgaaagggtttcaggactctag

SEQ ID NO: 19523 - DNA, 501 bp, Homo sapiens
  SIMILAR (221)..(162): 401254mologous to Equus caballus ciliary neurotrophic factor receptor,accession number AF134058,Smith-Waterman Score=41.
ctttgttccagaggagcgcagctccgagactgcacttcagcggtgcagcctccctccaggtcggcgagcggcgccagatccgggacttcagggtctccgcgggagcttaggaggctcaggatctgagttggagagccggaaggccaaactccgagccgctgagggactgcgcaggaagaccacagaaataaaccaaagggacaccgcggacagatgtaccagaggacaccactgaagtccaggagaatctccaccaaaaccatcagcgttttccttgtagctttctgtccctcgaagtggaaagttgaggtttctgagaagtccacggagagaacctgcagcaaactgaagccacagactccgaaggcatagggagaaaaaatgcttccatccccctttcactttaaacttgatcgcttctgggacttcactggagggcggtggagttgcaccaacctggagtacaggcagatcccagcgagcacttccaagtactttagg

SEQ ID NO: 19524 - DNA, 1917 bp, Homo sapiens
  SIMILAR (741)..(499): 401254mologous to Homo sapiens Human neurofilament-M mutant protein fragment 7,accession number Y20725,Smith-Waterman Score=97.
aggtttttaatcctgataaatcatgcagtatttgaatatcaagacatttttgtagccagctttccttccatattcttcaatattcattgtcgcggggagggagagagagagaaaggttttgcaggcaaagacaggacaccaccgccctccacgctcctctgtggctctgggcatctccctcctctcgcatccaggcggccgcctcggccacgatgcgcttgctgtctgccagggggtccgctgagctcttccgccctggaagcaggttaatattggcgctttcccaagctttctgggtaaaagcgatcccacacaccctgggtcccacagccccagcagccgctcccaaatcccagcccaggaaaatgggtctgggcgtcctcagaagctctgcaagaacccgggcatgaaggggcatcgccgagttaacacatttgcttcgcctccctgcgcgccgcggaacacagcgccccgcccgctggccaccgcgctggggcgagtccgcagttcaggcgcgaggcaagcagccgaggtccggggctgcggccgcggccggggcggacccgggagctgggcttcccaaagcgtcgcgtgtgggcaacggcggcctcctggccgcgtggaactgagccctgcgctgcagcatgaaggcggcggcggcggcggcggcgggcgcgcggccgtgagctcagcccgcgcagcacgtggtcttcggacactgagagcaccttcgctctcagctgtgatcctagctagcccagacaccagtctgtacccaaaggaagagtaggaagttgcaaagggaagctggctaacaagggcttcttctgccctacttggcaaaggcccatacgggtggcctccgtggatatggagctccttcattttgttccaaaaagagctctgccaggctttaccattgccatctcctttctttcctctgctccccctctctgcccctggtactccggatccaatccttggcttaggaatccactcaagccacgtctggctgctttgttccagaggagcgcagctccgagactgcacttcagcggtgcagcctccctccaggtcggcgagcggcgccagatccgggacttcagggtctccgcgggagcttaggaggctcaggatcagaggacaccactgaagtccaggagaatctccaccaaaaccatcagcgttttccttgtagctttctgtccctcgaagtggaaagttgaggtttctgagaagtccacggagagaacctgcagcaaactgaagccacagactccgaaggcatagggagaaaaaatgcttccatccccctttcactttaaacttgatcgcttctgggacttcactggagggcggtggagttgcaccaacctggagtacaggcagatcccagcgagcacttccaagtactttaggacgtgggggtgactcttttttcttcaggattgtcccacttgccaccctttccagctgagctgataggaaccaatgaaagtctaggcgatgaggattttccgttacctcagggatcaaagtataaaatgttgaatgagaaacccgaagaccttgcatcgctgggctgaataacttgttttcttttttatggtgtccagaacaaagcctgtttggtggtctcttcacagggacgtgcatgaaagccttgtcatagccagtgccctgcaccaggcagtgctttagtgggcatgcgcgttcactggggctgcgggaagaagacaggtgaacccggaaatgctgagtcagggtatccgaggtggctgtcgggatggcgggaataaatggcgggaacaggcgaaaatgccaagtcagggtagccaagatggccgctgggatggcgggaaccggcgaatccgggaatgctgagtcagggtagccaagatggttgccggtcgccat

SEQ ID NO: 19525 - DNA, 618 bp, Homo sapiens
  SIMILAR (403)..(594): 521254mologous to Gallus gallus avenaIII,accession number AB035523,Smith-Waterman Score=160.
tcataaaacataaggaaatgagaacgtgaagtctggaagaaaaacctcactttcaccttttgtactatctgattttactgcaagttcagcactgttggcctccgactccagcaggtggatgtcattgcagtccgccagtgagtgctccaggcagagctgcaggaagcgggcctgggtacgggtgacccgtttcagaagtgacaggagggccactgtctgctcacactcattccagcctttgaaccagccagcgaggatgcccacctggtctcggaacatcatggtgccgggcctttcccctgagggccagggcttaaggacgtttctgggcgtggtggcaacggttgttgggggaggaggaagcctgctcacatggggggaggtcttggtccagccacgcctctccagtttccgcctcggccttcgccgccaccgccgccgctcgggcctcctcaggccaccgccgccgccgtcgccccctctcgggcccgcaagctcccctccctcctcccgcaccgaccaccgccgccgccgccgccgccgccgtcgcgctgcgtcaccgcgccgtgcgtcaccgcccctggccccgccccgacgggggccgccgcgcgccggcat

SEQ ID NO: 19526 - DNA, 343 bp, Homo sapiens
  SIMILAR (57)..(296): 961254mologous to Homo sapiens Thy-1 glycoprotein,accession number AF261093,Smith-Waterman Score=384.
  misc_feature (1)...(343): n = a,t,c or g
ggaagaccccagtccagatccaggactgagatcccagaaccatgaacctggccatcagcaaatacaacatgaaggtcctctacttatccgccttcactagcaaggacgagggcacctacacgtntgcactccaccactctggccattccccacccatctcctcccagaacgtcacattgctcagagacaaactggtcaagtgtgagggcatcagcctgctggctcagaacacctcgtggctgctgctgctcctgctctccctctccctcctccaggccacggatttnatgtccctgtgactggtggggcccatggaggagacaggaagcctcaagttccagtg

SEQ ID NO: 19527 - DNA, 153 bp, Homo sapiens
  SIMILAR (37)..(153): 1001254mologous to Homo sapiens Human secreted protein, SEQ ID NO: 4247,accession number G00166,Smith-Waterman Score=203.
atgaacctggccatcagcatcgctctcctgctaacagtggaccagagccttcgtctggactgccgccatgagaataccagcagttcacccatccagtacgagttcagcctgacccgtgagacaaagaagcacgtgctctttggcactgtgggg

SEQ ID NO: 19528 - DNA, 1191 bp, Homo sapiens
  SIMILAR (570)..(1007): 421254mologous to Homo sapiens Thy-1 co-transcribed protein,accession number AF261093,Smith-Waterman Score=179.
  misc_feature (1)...(1191): n = a,t,c or g
ccgatagaaaactgcgggctccgagctgggtgcatnaaccggagcggcggcgcgtctggaggaggctgcagagcggaagaccccagtccagatccaggactgagatcccagaaccatgaacctggccatcagcatcgctctcctgctaacagtcttgcaggtctcccgagggcagaaggtgaccagcctaacggcctgcctagaggaccagaaacctgggagagacttggatgaggagtggttgggctgtgcatgggccatagcacggacatggtctgtcctgacagcactcctcggcaggcatggctggttgcctgaagacccccaggatgtgagggcaccaccaagaatttagtggcctaccttgttgagggagagaactgagcatctccagcattctcagccacaaccaaaaaaaaaataaaaaggggcagccctcctttaccactgtggaagtccctcagaggccttggggcattgacccagtgaagatgcaccgtttgaccaaggaaaagcagcgctaagtggaagggttggagaaggaggtaaaggatgaagggttcatcatccctccctgcctaaggaaggctaaaagcattggccctgctggcccctccctgccttccacccaacagtggagacgggctacataaggaggacaagaccctcttcagggctgtccccaagctcccagagatgcttccagaagctctgacccaacagcctcccaagtccaggtgggggtgggagttcccagaagcttgcacaggggttttggccccaagtttttttaaggggagggcatttccttccccttggcccttcagttgccagccccttgcttggcttggtgcctggagccccttcagaacagcccccctgccccgcaggccttgcctttcttcagggatttcttgcggggccctgaggcaaagccatgggagtgagaccccaggagccggacacttctcaggaaatggcttttcccaaccccctagcccccacccggtggttcttcctgttctgtgactgtgtatagtgccacctcttcctcttccctgacttctccccaaccacttagtaagcaacgctaccccaggggctaatgactgcacactgggcttcttttcagaatgaccctaacgagacacatttgcccaaataaacgaacatcccatgtctgctgaaaaa

SEQ ID NO: 19529 - DNA, 1947 bp, Homo sapiens
  SIMILAR (471)..(953): 421254mologous to Homo sapiens Thy-1 glycoprotein,accession number AF261093,Smith-Waterman Score=189.
  misc_feature (1)...(1947): n = a,t,c or g
cggcgatgagaccgttggacactgataacctcccttggcccgaggagaacaggtcagaagaaagggttaaagccttaaaaggggaacttccattgcggggctcagggaggaggataatggtctttgggctgccggaccctgatccccggggtcccgaacccttccgtccctggccagggctgccaaccacagggggagggcccccttccgccgcaacctggcactctcacaccaatgcgggaccgccttctcttttttcctcacccagcaccccaccctggcgtgctttctcccccaatctccgactttgattggctgagcccccggctccccgctcccccttttctccattcccggtgaaaactgcgggctccgagctgggtgcagcaaccggaggcggcggcgcgtctggaggaggctgcatcagcggatagaccccagtccagatccaggactgagatcccagaaccatgaacctggccatcagcatcgctcgtcctgctaacagtcttgcaggtctcccgagggcagaaggtgaccagcgctaacggccgtgcctagtggaccagagccttcgtctggactgccgccatgagaataccagcagtttcaccatccaagtacgagttcagcctgacccgtgagacaaaagaagcacngtgctctttggcactgtgggggtgcctgagcacacattaccgctcccgaaccaactttcaccagcaaatacaacatggaaggtcctcttacttattccgcctttcactaggcaaggacgaggggcaccttacaagtgttgcaattccaccaatttggggccntttccccacccatctttctttccaggaacgttcacagtggttcagaggacaaattgggtcaagtgttgagggcatcaggcttgctggctcagaacacctcgtggctggctgcggctcctgctctcccctctccctcctccagggccacggatttcatgtccctgtgactggtgggggcccatggaggagacaggaagcctcaagttccagtgcagagatcctacttttttgagtcagctgacccccctccccgcaatggcctcaaaccttgagggagaagtggggaccccaccccttcatcaggaagttccaagtgctgcatgcgattatctaccccacgtccaacgcggcccgcctcaccctctcccgcacacctcttggctgttctttttgtacttttttgttccagagctggcttctgtctggtttatttaggttttaatccttccttttctttgagagttcgtgaagaggggaagcccaggattggggaccttgatggagagtgagaggatgtggaggggtaagtgggatgttggggtaccagccactggaggggtcatccttggcccattcgggaccagaaacctggggagagatttgggatgaggagtggttggggctgtgcctgggcctagcacgaacatggtgctgtcctgacagcactcttcggcaggcatggctggtgcctgaagtccccatatgtgagggctccgccaagaatttgtggcctgccttgttagggatagcactgagcatctccagcattctcagccacaaccaaaaaaaaataaaaagggcagccctccttaccactgtgggaagtccctcagaggcctttgggcatgacccagtgaagatgcaggtttgaccaggaaagcagcgctagtggagggttggagaaggaggtaaaggatgagggttcatcatccctccctgcccccgcttcgctggggtctccacgggtgaggctggggaacgccacctcttcctcttccctgacttctccccaaccacttagtagcaacgctaccccaggggctaatgactgcacactgggcttcttttcagaatgaccctaacgagacacatttgcccaaataaacgaacatcccatgtcaaaaaa

SEQ ID NO: 19530 - DNA, 992 bp, Homo sapiens
  SIMILAR (100)..(636): 881254mologous to Homo sapiens glioma-expressed antigen 2,accession number AF258787,Smith-Waterman Score=814.
atggcagaaaggaggcttcgggcttcccactggagtggctgctgcatggtattctccaagaggacccttggaccacctgcctgtgactgccagcaggtgggtacttacactgtgaaattttatgatggagtagttcagactgtcaaacatattcatgtcaaagctttttccaaagatcagaatattgtgggtaatgctaggcctaaagaaacagatcacaaaagtctttcatcatctcctgataaacgagagaagtttaaagaacagagaaaagcaacagtgaatgtgaagaaagacaaagaagataaacccttaaagacagaaaagcgacccaagcagcctgataaagaaggaaagttaatctgttctgaaaaggggaaagtgtcagagaaaagtcttcccaagaacgagaaggaagacaaggaaaacatttccgaaaatgacagagagtattctggagatgcccaagtggataagaaacctgaaaatgacattgtgaagagtccacaagaaaacttgagggaacccaaaagaaaacgaggcagacccccttccatagctcctactgcccaggaaaagtcaaaaaactactcggaaaacactgacaaagacttatcgaggagacgttcctccaggctgtccactaatgggacccatgagatcctagatcctgacttggttgtatcagatttggttgatacggatcctttgcaagacacgttgtctagtaccaaggaatctgaagaaggtcagttgaagtctgctttggaagctggccaggtctcatctgcactgacttgccactcctttggggatggatccggggctgcaggcttggagttgaactgcccatcaatgggagaaaacacgatgaaaacagaaccgacttctccccttgtggaattacaagagatttcgactgtggaaggttcatatttagagttaaattaatcctctttttatatacacttttgcttatgctttgtgaacta

SEQ ID NO: 19531 - DNA, 1828 bp, Homo sapiens
  SIMILAR (1513)..(8): 521254mologous to Homo sapiens glioma-expressed antigen 2,accession number AF258787,Smith-Waterman Score=1001.
tttttttcttctttggcttcactctcacaaactccttgaatttcttctctttattcttttccttgtcttttgtagccggggaactggcagagaccccgcctttcctgggtcaggggtcttcctggctgggcttgtctgaagctgaagggcccctggtttggacatgcctctccccccgggctctcttctggctccagtgacttctccattccatggaaatacttcatgtgatagtgcaacagtttggctttgcggaaaaattttaaacagtccacaactttgcatctaaacttatggtctagggtcgacagctgggtgcattaggatgacccaaaatcatctgttttcttaaaagtatttgttacttccacagtcggaaatctcttgtaattccacaagggggagaagtcgggttctgttttcatcgtgttttctcccattgatggggcagttcaactccaagcctgcagccccggatccatccccaaaggagtggcaagtcagtgcagatgagacctggccagcttccaaagacgacttcaactgaccttcttcagattccttggtactaagacaacgtgtcttgcaaaggatccgtatcaaccaaatctgatacaaccaagtcagatctagatctcatgggtcccattagtggacagcctggaaggaacgtctcctcgataagtctttgtcagtgttttccgagtagttttttgacttttcctgggatgaatttttgtcaagccgaggacgttttaaatgggacttcacatccttttgatattttccttcttctcagttccaatgttattggttgcaaagttcgagagtttgaatccacagcagtaggagctatggaagggggtctgcctcgttttcttttgggttccctcaagttttcttgtggactcttcacaatgtcattttcaaggttcttatccacttgggcatctccagaatactctctgtcattttcggaaatggttttccttgtcttccttctcggttcttgggaagacttttctctgacactttccccttttcagaacagattaactttccttctttatcaggctgcttgggtcgcttttctgtctttaagggtttatcattctttgtctttcttcacattcactgttgcttttctctgcttctttaaacttctctcgtttatcaggtgatgatgaaagacttttgtgatctgttctttaggcctagcattacccacaatattctgatctttggaaaaagctttgacatgaatatgtttgacagtctgaactactccatcataaaatttcacagtgtaagtaccatccttgttaacagcagtgactttggccgggtaaaaaacgacaatcagaccagcaagcaaggacctgctcatttatttgaaattcaagaagatccatcctccttcaatgcaagccctcctttccctcaagctgtattttcctcctaaagggcgtaaataaggactgtcccagcagaaccactcatcataacgatggttcccaacgccttgaaatggatgagtacttttccttcctcgtagtcaatgtcttctatgtgagctggataccagttttttaaacggtcccgggcttccaactgggctcccacttcaaagctgattcctcgtctgttaggtggatgctttgtcattttcagtcatcaacggggctgcctttattctcctcacggccccactccggttgcgccgctccaggaccaaccgacagaaggactctgcgtgctctgcaccacgtgacctcgtgccgaattcctgcaggcgggactacctaggggcgatcaaggtttttcttct

SEQ ID NO: 19532 - DNA, 639 bp, Homo sapiens
  SIMILAR (300)..(638): 921254mologous to Homo sapiens Fragment of human secreted protein encoded by gene 65,accession number Y02860,Smith-Waterman Score=531.
atgtacccataccccaaacccctggctccacaaggagacgaacagaagagcagaagaatggcagcatggcatgacagaagagaaggagcgtctgaatgccgagaaggtgctatcgtagtacaccgttattcccgcgatgatagcgggctggtgtttggaatgctttaatcctgcatattattcatacaaagctgtgaaaacaaaaaacgtgaaggaatatgttcgatggatgatgtactggattgtttttgctctctatactgtgattgaaacagtagccgatcaaacagttgcttggtttcccctgtactatgagctgaagattgctatttgtcatatggctgctttctccctataccaaaggagcaagtttaatatatagaaaattccttcatccacttctttcttcaaaggaaagggagattgatgattatattgtacaagcaaaggaacgaggctatgaaaccatggtaaactttggacggcaaggtttaaaccttgcagctactgctgctgttactgcagcagtaaagagccaaggagcaataactgaacgtttaagaagcttcagtatgcatgatttaacaactatccaaggtgatgagcctgtgggacaaagaccattccaacctctaccag

SEQ ID NO: 19533 - DNA, 1542 bp, Homo sapiens
  SIMILAR (419)..(673): 311254mologous to Homo sapiens Amino acid sequence of salivary protein CON-1,accession number W50192,Smith-Waterman Score =95.
atgaacgaaactggtaaatttacttcagtaatagggggccgaattcggggatctgggcgagcagccggtgtcacctttctcggtaagctgcaaatcttgggaaaactaggacccttcccagggatcctgggctgggagcggtctccggtttttagacaaatctctcctcctaccacacgtgaccgaatggcaatcagccgccaagagagacaccgcaacgcatcagccgcgggatacaaaggctcggcactgccgtcgcatcctcgggaggatcgcggagcctcccgcgctcggcgtctgcggagcctgcgcagggagcagctgcgaggcgcgccgctcccgggcccgcagggcggtgccgcgctgcgcggggagcaggagcggggagcgcgcgccgcctgccctgagcgcctgcccacccagcgccgccggagcaggggcgccgcgccgcaccgcacgcagccgagcagcgccacagccgccgccgccgtcgcagccgcagtcgccgcagctaggccctcggccgtcgcagggagctccgcagcgacgtggaccaagctcccctgggcctcgcgccggctgcagggcgcagtgagaggcacttacaccacggctctggagatcatccaggacaccatcttcacgggggcttgggccccacgtccggggcggaattttttccccaaagatacccacatgactccatcacttctttctggcactgggaataaagttgtgaaaggaagtggatcaaattgctgcccttatggaaatcagtttatggaaggagagacaaaagataagaagataaatgagtatgatgaatggctggtgtttggaatgctttatcctgcatattattcatacaaagctgtgaaaacaaaaaacgtgaaggaatatgttctataccaggggtccccatcccccggaccatggaccagtaccagtccatggcttgttaggaactgggctgcaaagcaggagttaacatttactgagcacctaccatgcacgaagcacgctaatgagcaatctatagatagctcatttaatccagtcttcggacaaacaagagaggaaaaaaaaaagagaaccggagaaaaaaagcgacacgaacaagagtcagacagcgaaaggcgagcgcggccccaaccaaaccgcacacacgaggacagagggagcgatccccagaaggaagagggcgagcacaacatggccaacatgggaacccccttgcctactaaaatacaaaaattagccaggccactgaaaaatgagagttctgataggtacagaatggggagcaaagtgttaagggaaaaacgaaatctgggcaaaagcactgagcatgaaaatacaggctggcgctgcctgcggcacgaccaaggcctcatcaggccaccgcagatctttcgttatctgcggaatcctgtcgtctatcggctaataactctgtgcatcacaccactgaatatgtactcaatgcgatgcactaccgtctatgatcaggcacgcactaacacgagctacagcgtcacataa

SEQ ID NO: 19534 - DNA, 398 bp, Homo sapiens
  SIMILAR (149)..(328): 751254mologous to Homo sapiens Human secreted protein, SEQ ID NO: 6799,accession number G02718,Smith-Waterman Score=224.
ccgggtcgacgatttcgtcgtgtctccgcggagacgttaccgtggtccagctggagaccaaaaggtgaaaatgctcaagttcaaggccttttgcctggattactggcagttcctgtgcctacagcccctgcatggagcctacaaaagcgtcgagggcgaggcccccagcagtgagactggcacatccctggacagcccctcagcctacccccagggccccttggtgcccggttccagcctgagcccggatcactacgagcacacgtcagtgggagcctatgggctgtactcggggccgccggggcaacagcagcgcacgcggaggcccaagctgcagcactcgacctccatcctgcgcaagcaggctgaggaggaggccatcaagcgctcacgctcac

SEQ ID NO: 19535 - DNA, 813 bp, Homo sapiens
  SIMILAR (3)..(71): 691254mologous to Homo sapiens Human secreted protein, SEQ ID NO: 7339,accession number G03258,Smith-Waterman Score=93.
atggggtttcgccatgttggccaggctggtctcgaactcctgactttgggtccaacccaaaatgtccccccattagagcctctcctggggcagaattacaagctctttcctccactgtcacgacaccatactggggaatacttgtcacagcagtgtttccccactgaggcctcagaccgagacaatgtcgccaagaccatcctgctgggcggcagggccctgggcctggagaagtgcctgaaattcttggacaatccggatgcacagaccgaacttggtcaaaggcaggaggcaggacccaggctcctgggcccagatccagagctggacgccgagtctctgggcaggaaatcagggctccagggcccctgggctgccggcatggaggctgggagctccctggacaccggaagcagcctctccactgaccgctacagagcccagctgcccccaccccaagcaccatgtggctacatgcccctctccgtgtctccgcggagacgttaccgtggtccagctggagaccaaaaggtgaaaatgctcaagttcaaggccttttgcctggattactggcagttcctgtgcctacagcccctgcatggagcctacaaaagggattcggatttgatgacatggatttggggactgctccctgaggtgacaggggctgcaggcaccacaagcccgaatgttcatacctccggcaggttcttccgagcgtgtgtgttctgtccagtgcacaccttggtcaagaaagaaccacatccgggccagcaggagatcatcatggagccgtcgccatggtcaccttga

SEQ ID NO: 19536 - DNA, 1729 bp, Homo sapiens
  SIMILAR (929)..(1318): 671254mologous to Homo sapiens flap endonuclease-1,accession number X76771,Smith-Waterman Score=461.
tttcgtgagggagcaggggcctgcggggacctggtgtgggtggagtggggacaagcggtggagaagggtacgccagggtcgctgagagactctgttctccctggagggactggttgccatgagagcagccgtctgaggggacgcagcctgcactacgcgccccaagaggctgtgcgtggcgagcaggtcacgtgacgggagcgcgggctttggaaggcggctgaacgtcaggacatccgcgccgctaatgctgatgaagggagattttatctttggaccgcctgcccggggcaaccccgaaccaagctttatccgccgaggccgcgtgtcccaaaggccagacatccctcctctgtggtgccatgggaattcaaggcctggccaaactaattgctgatgtggcccccagtgccatccgggagaatgacatcaagagctacatttggccgtaaggtggccattgatgcctctatgagcatttatcacttcctgattgctgttcgccagggtggggatgtgctgcagaatgaggagggtgagaccaccagccacctgatgggcatgttctaccgcaccattcgcatgaagggaaaacggcatcaagcccatcacaagtcaggcgagctggccaaatgcagtgaactgcggggctgaggcagagaagcagctacagcaggctcaggctgctggggccgagcaggtggtggaaaaattcactaagtggctggtgaaggtcactaagcagcacaacgataagtgcaaacatctgctgagcctcatgggcatcccttaccttgatgcacccatcgaggcagaggccagctgtgctgccctggtgaaggctggcaaagtctatcctgtggctaccgaggacatggactgcttcaccttcggcagccctgtgctaatgcaacacctgactgccagcagtgactactgtaagagtatctggagtattgggcccaagcgggctgtggatctaatccagaagcacaagagcatcgaggagatcgtgcagcgacttgaccccaacaagtaccctttgccagaaaatcggctccacaaggaggcttaccagctcttcttggaacctgaggtgctgggcccagagtctgtggagctgaagtggagcgagccaaatgaagaagagctggtcaagttcgtgtgtggtgaaaagcagttctctgaggagcgaatccacagtggggtcaagaggctgagaactgagaaaggaggaggagaaccaagagggccaactggacacagccaggaagagcatctcccaccaaaagaccagaccatcaggaagaccagcacactcgaagcagatcttcagaaggaagtcattgagggtggttggagggaagacacagaccctagaaagcaagaaccctggcaactcaaaataccagagtgttttcttacttccaaacaaccacacagctccccagcaatggttcttaaccaggctgaaatggctgaaatgtcagacctagaattcagaatctggatggcaatgaagatcatcaagattcatcagaaagttgaagtccaatccaagaaatctaaggaacccagtaaaatgattaacagatcattcatcctgagaaaagtcagctgccatgctatgaggaaagatccacctggcaaaagactgaggcctgccaacaactgtgagaaactgaggcctctaacttatagctctgtgagtgagacaatttacaagtga

SEQ ID NO: 19537 - DNA, 2325 bp, Homo sapiens
  SIMILAR (1357)..(1941): 751254mologous to Homo sapiens Keratin 8,accession number X74929,Smith-Waterman Score=702.
acctacgagctggtagaaagcggtaatccagaaaaagggtggggtgacagcgaacaaccaggatccacagtcataccaagggtggtcgaccaccacggcagtatctctacaattgtgcaagagccacagcattactgggcttggggtgcccctgccaatgcagatacagctacaatgaccaaagatttagatgacaacaactcaatgttctttgaatacttggaaaactttcccaagaaggacagtgtactagtgaccaatcctgaagtgacagagatatgtgacctttcagagagagaattcaaaatagctgttttgaggaagctcagcgaaattcaagataacacagagaaggaattcagaatcctatcaggtaaacttaacaaagaggttaaaataacttttaaaaatcaagcagaaattccagagttgaaaaattcaattgatatagtgaagaacgcatcagagtcaacaggagtattgatcaagcagaagaaagaatcaagagaggcgagaggcggaaatacaaagaaaagaacggatgagagaggaaacggtcgacggtggccgatagtggtcctactgtcgtgggactgctctgcgcgctcccggactgggggagtcagaggtctggcagcgctgtctgcgcacacctaccggacgctacctcccaaccccccgtcttcctcctgcctcctcctcctcccgtcacctcctgacccgccggagctccgagcaactgccggcctccgcccccagccgcagccggtcactggcggcgccttccgcgccaagcttgggggccttttcggggtcccacatggcacggcttccgacccccggcccgggacggggctcgcaggccccacaggggcaggctggagaaggaggagaaaagctatgcaggaatccaatggcaaagtagactataaggatgcagacataaatggattaccaacaaaagggccaacagacatctctgataaaaagactaaagtgattttcctagaggatttcatcattttaaaaatggacctgattgccggcatgcccacctgcctccactcctgcatcaaccatgtccatcatggtgacccagaagtcctacaaggtgtccaccagaggtggtcctctggcccccaggccttcggcaactgctcctatgcgcgtgggcccggtgcctgcatcagctccttgagcttctcccgagtgggcagcagcatctttcggggtgtcctgggtggaagttatggtggggccagtggcatgggaagcatcactgctgtcacagtcaaccagagcctgctgagcccccttaacctggaggtggaacccaacatccaggccgtgtgcacccaggagaaggaccctcaacaacaaatttgcctcctccatagacaaggtacaattcctggagcagcagaacaagatgctggagaccaaagctacatcaacagccttaagcagcagctggagactctgggcttggaaaggctgaagctggaggcagagcttggcaacatgccagggctggtggaagacttcaagaacaaatatgaggatgagatcaacaaacgtacagagatggagaatgaatttgtcctcatcaggcagtatgtggatgaagcttatatgaacaaggtagagctagagtcttgcctggaagggctgactgaagagatcaacctcctcgggcagctgtatgaagaggagatccagaagctgcagtcccagatcttggacacatctgtggtgctgtgcatgaacaacagccactccctggacatggacagcatcatcgctgaggtcaaggcgcagtatgaggagatggccaaccacagccaggctgaggctgagagcatgtaccagatcaagtatgaggaactgcagacgctggctgggaagcacggggatgacctgcggcatgcaaagactgagatctgggatgaaccagaacggtgccaagcaggacatggcgtacagctgcatgagtaccaggaactgacgaacatcaggctggccctggacatcaagatcaccatctacaggaagctgctggagggcgaggagagccagttggagtctgggatgcagaacatgaatatccatatgaagaccaccagtggctatgcaggtggtctgagctcggcctatgagggtctcacaagccccagcctcagctatggcctcggctccagctttggctctggcatgggctccatctccttcagccacaccagcttcaccagggccatagttgtgaagaagattgagatccacgatgggaagctggtgtccgagtcctctgatgtcctgcccaagtga

SEQ ID NO: 19538 - DNA, 2325 bp, Homo sapiens; identical to SEQ ID NO: 19537
  SIMILAR (1357)..(1941): 751254mologous to Homo sapiens Keratin 8,accession number X74929,Smith-Waterman Score=702.

SEQ ID NO: 19539 - DNA, 410 bp, Homo sapiens
  SIMILAR (404)..(270): 801254mologous to Mus musculus protein kinase related to Raf protein kinases; Method: conceptual translation supplied by author,accession number U43585,Smith-Waterman Score=170.
tggaactttaataaattgactggacattatgcatttctctgttgtatctggaatgcgaaggttacaaaacgtcagcagttgtagattttaaataagcaatgacttttgagttgaaccatgatggggtatattgaaaagaatggtggtataatgtcttaaccaagggtgcgggcctccaggtctgactcccaactcagttcttctttaataaccacactttgttaattctccttaacaggggttcctggcaagtcagttctccctcaggccttcagtttcctcacctccagggtccgtatctcctgctgggtgaggtcattggacacagcgcacttggtgcacagcccgcacaggctgccaataaagatgacaatgagcttctggagctgcccgcactgctgcagacgaaa

SEQ ID NO: 19540 - DNA, 419 bp, Homo sapiens; identical to SEQ ID NO: 7188
  SIMILAR (26)..(214): 771254mologous to Homo sapiens Human Ksr-1 (kinase suppressor of Ras),accession number W19919,Smith-Waterman Score=227.
  misc_feature (1)...(419): n = a,t,c or g

SEQ ID NO: 19541 - DNA, 2319 bp, Homo sapiens
  SIMILAR (1864)..(2187): 961254mologous to Homo sapiens Protein regulating gene expression PRGE-1,accession number Y58608,Smith-Waterman Score=559.
atggctggaggatcatgggaacaatatccctggggggtgtccactttctgcgatatatgtagtcatatcaccccctacgcctttgaatattacgaaggaccatctcacacgggggtgtacacttcctgcgatattgggagtaatatcaacctctcggcctctgaatatgaggaagaaaatcacaggggctatggcgtgtgctcggtggggctggagcggctggcttacgtcttcggtgcttacagcctggggcctcagccgcctcactcctgggcctgctgggcctgtggctgccacgcccagtgcccctcgtggctgcagcaggggtattctgtgagcgcctccaggaatgagaatacagcattattcaaaatagcaaagacgtggaaccaacccaaatgcccatcaatgataggactggaaaaagagtatgtggtacatatacgccatggaatgctatgcagccatcaaaaggaacaagagaatatcctctgcagggacatggatgaagctgaaagccattatcctcagcaaactaatgcagaaacagaaaaccaaacaccacatgttctcacttacaagtggaagccgaacaatgagaacacacggacacagagaggggaacaacacacactggggcctactggagggcagcggtttggagtgatccactcggtgttcaccaacctgcttctgtgggccaatggcgtcctcaatgagtcaaagcaccaactcaatgagcacaaggaacggctcatcactctgggttttgggaacataacaacagttttagatgaccacacaccgcagtgtaactgcacgcccccaactctgtgcactgccatctcccacgggatctactacctctaccccttcaacatagagtatcagatcctggcctccacaatgctctacgtcctgtggaagaacatcgggcgcaaagttgacagccatcagcaccagaagatgcagttcaagtctgatggggtcatgaccaagagcgagtcggcactcatcatgttctacctgtatgccatcaccctgctgatgcttatgggggctgcggggctggctggaatccggatttacaggatagacgagaagtcactggatgagtccaaaaatccggcccgcaaactggactcggacctcttggtgggcactgcctcgggctcctggcttatctcctggggctcaatcttggccatcctctgtgctgagggccacccccgctacacctggtacaacctgccctactccatcctggcgatcgtggagaagtacatccagaacctcttcatctttgaatccattcaccgagagcctgaaaaactctctgaggacatccaaacccttcgggtggtcacagtctgcaatggcaacaccatgccccttgcttcttcctgccccaagagtggaggtgtggccagagatgtggctccccagggcaaggacatgccaccagcagccaatggaaatgtgtgcatgagagaaagccatgacaaggaggaggagaagcaggaggagagcagctggggagggagcccaagcccagtccgccttccccgtttcttacagggcaacgccaagagaaaagtcctgaggaatattgcagccttcttgttcctctgcaatatttcgctttggatacctcccgcctttggctgtcgacctgagtatgacaatggattggaggagattgtctttggctttgaaccctggataattgtggtcaacctggccatgcctttttctattttctatcgaatgcacgcagctgcctccctctttgagcctcagaaggtccaggcgagaagctggcttctggctgcatctgccccagtgtcctctgaggcattcggatggggcgatgactataaaaaccacgtgaaatgcataagtgaagatcagaagtatggtggcaaaggctatgaaggtaaaacccacaaaggcgacatcaaacagcaggcgtggattcagaaaattagtgaattaataaagagacccaatgtcagccccaaagtgagagaacttttagagcaaattagtgcttttgacaacgttcccaggaaaaaggcaaaatttcagaattggatgaagaacagtttaaaagttcataatgaatccattctggaccaggtgtggaatatcttttctgaagcttccaacagcgtgaatgatgaaaggactgtgatgcacgcacagcacgggatactcctcaccaataagatgaatattggtcagttcagcaacctgggtgaatctccagagaaaaacgctgagcgaagagtcagtctcaaaaggttacatactgtatga

SEQ ID NO: 19542 - DNA, 1341 bp, Homo sapiens
  SIMILAR (283)..(864): 261254mologous to Drosophila melanogaster CG17758 gene product,accession number AE003435,Smith-Waterman Score=132.
atggccgcacgtgccaagggaacaggattcccgtccttctcattcactgcatctcctccaatcccagcaaagcaccagagacgagagattgtagaaataaagacacaagacaaagaggtagaagaaaagacagctgggcccgagggccactaccacctagacgtggagaccagtagtggccccgaatgcctggctgcacagttatttattggatacaagacaagggggcaggttttagatgaccacacaccgcagtgtaactgcacgcccccaactctgtgcactgccatctcccacgggatctactacctctaccccttcaacatagagtatcagatcctggcctccacaatgctctacgtcctgtggaagaacatcgggcgcaaagttgacagccatcagcaccagaagatgcagttcaagtctgatggggtcatggtgggcgcagtcctgggcctgaccgtgctggccgccaccattgctgtggtggtggtatacctgattcatattgggcgctccaagaccaagagcgagtcggcactcatcatgttctacctgtatgccatcaccctgctgatgcttatgggggctgcggggctggctggaatccggatttacaggatagacgagaagtcactggatgagtccaaaaatccggcccgcaaactggactcggacctcttggtgggcactgcctcgggctcctggcttatctcctggggctcaatcttggccatcctctgtgctgagggccacccccgctacacctggtacaacctgccctactccatcctggcgatcgtggagaagtacatccagaacctcttcatctttgaatccattcaccgagagcctgaaaaactctctgaggacatccaaacccttcgggtggtcacagtctgcaatggcaacaccatgccccttgcttcttcctgccccaagagtggaggtgtggccagagatgtggctccccagggcaaggacatgccaccagcagccaatggaaatgtgtgcatgagagaaagccatgacaaggaggaggagaagcaggaggagagcagctggggagggagcccaagcccagtccgccttccccgtttcttacagggcaacgccaagagaaaagtcctgaggaatattgcagccttcttgttcctctgcaatatttcgctttggatacctcccgcctttggctgtcgacctgagtatgacaatggattggaggagattgtctttggctttgaaccctggataattgtggtcaacctggccatgcctttttctattttctatcgaatgcacgcagctgcctccctctttgaggtctattgtaagatatag

SEQ ID NO: 19543 - DNA, 1659 bp, Homo sapiens; identical to SEQ ID NO: 13073
  SIMILAR (176)..(916): 271254mologous to Homo sapiens Human N-methyl-D-aspartate receptor subunit encoded by clone NMDA22,accession number W87503,Smith-Waterman Score=121.

SEQ ID NO: 19544 - DNA, 3561 bp, Homo sapiens
  SIMILAR (1156)..(2175): 401254mologous to Cyprinus carpio ZP2,accession number Z72492,Smith-Waterman Score=502.
atgcctggcccccaccccgcctcggcttcttgcccgccgcggctttttaccccccgccgccgcgctttttgcccgctgcggatttgtgcccccctcgccgccgcggctttttgcccgccgcgctttctgccacacacccgccgccgcgcgtttttgctcctctgccgccgcggctttttgcccccaccttgcctcgggggggggctcgccgcggctttcttcccccacccgccgctgccctttttgcgcccccaccgccgtggctttttgccccaccgccgccgcggctttttgctcccaccccgcctcggcttcttgcccgccgcggctttttaccccccgccgccgcgcgtttttgcccgccgcggctttgtgcccccctcgccgccgcggctttttgcccgccgcgctttctgccacacaccccccgccgcggctttttccccctctgccgccgcggctttttgccccaccgccgacacagctttttgcacactcgccgccttggctttttgccgccgcggctttctgccccctcgctgccgcggctttttgcccctccgccaccgccgctcctttttgccccaccgccgccgtggctttttgcccaccgcggctttttgccatcgcggctttttactcgccacggccttttacccgccgcggctttttgcgccccgctgtcacggctttttgcccccctgtcgcagcgactttttcgccgccgcggcattttgcccccgccgccgtggctttttgccgctgtcgccgccgctttttgcccccgccgcagtggctttttgtccccgccaccgcggctttttgctgccgcgactttttgccccggtcaccgccgctttttgtcaccgcgactttttgcccccgccgccgaggatttttgtccccgccgccacggctctgagggcgggagcggcagactcggctgccagctctactggcgtcctggcaagggcagcgctgaggggcccctgtggcctgcatagagtggcgctgcctgtggaggcgatgggagagaagaaggagggcggtggtgggggtgatgcggcggccacggagggtggcacaggggctgcggccagccgggcgctgcagcagtgcgggcagctccagaagctcatcgtcatcttcattggcagcctgtgcgggctgtgcaccaagtgcgctgtgtccaacgacctcacccagcaggagatacagaccccggagccagccaagccagccaagccagccagccagaccagacagccaagccagccaagccacccagccagccaagccagccaaaccagtcagccagccaagcagccagccagccaagcctcccagccagccaagccagccaagccacccagccagccaagccagccaagccacagagccagccaggccagccaagccacccagccagaaaggcccgccagccagccagcaagcgagccaagccagccaagcctgccagccagccaagccagccaagacagacagccagccaagccagccaagcctgatagccatccaaggcagccaagccagccaaccagccaagccagccagccagccaagccagccaagccagccagcctgccaagccatccaggcaacccagccagccaagacagccaagccagctggccagccaagctagccaatccactcagccactcaagccagccaagtcacctgtccagcaaagccagccaagccagccagccagcccagacagccaagccagccaagccagccaagccacccagccagccaagccagccaagccgcccagccaagccgcccagccagccaagccagccaagccgcccagccagccagcctgccagccacccagccagcgagccaagccagccaagccagccaggcagccaagccagccaagccagtcaagcccgccagccagccagccaagccaggcatgccagccaagccagccaggcagccaagccagccaagccagccaggcagccaagccaggcatgccagccaagccagccaggcagccaagccagccaagccagccagccagccaagccaggcatgccagccaagccatccagccagctaagccagccggctagccaagccagacaagccacccggccatccaagccagccagccaagccagccaagccagccaaccagccaagccacgaccagcgctgagaggcgccactgcgcgcgtcgcagaggcgaccagcgcgcagagccgccagccgcgtcgccgcgcagagccgtacagcgccgcagagtcgcacagcggctgcgagtgcgcagcgacatgcacgcgcggagagcccgtgcgactgctctggcgcggagaggcgcaggctcagctccactccccagctgtgaaaggagtcatcttctctatcctctttggcaactcaccaaataaatgtgatttagttttagatgaccacacaccgcaatgtaactgcacgcccccaactctctgcaccaccatctcccacgggatctactatatctactacctctaccccttcaacatagagtatcagatcctggcctccacagtgctctacgtcctatggaagaacatcgggcgcaaagttgacagccatcagcaccagaagatgcagttcaagcctgatggggtcacagtgggcacagtcctgggcctgaccgcgctggccgccaccattgccgtggtgaccaagagcaagtcagcactcatcacgttctacctgtatgtcatcaccctgatgaagcttatgggggctgcggggctggctggaatccggatttacaggacagatgagaagtcactggatgagtccaaaaatccgccccgcaaactggactcggacctcttggaccacccccactacacctggtacaacctgccctactccatcgtggtgatcgtggagaagtacatccagaacctcttcatctttgaatccattcaccgagagcctaaaaaactctctgaggacatccaaacccttcggatggtcacagtctgcaatggcaacaccatgccccttgcttcctcctgcctcaagagtggaggtgtggccggagacgtggctccctggggcagggacatgccaccagcagccaatggaaatgtgtgcctgagagaaagctgtgacaaggaggagaagcacgaggagagcagctggggagggaacccaagcccagtccaccttcctcgtttcttacagggcaacgccaagagaaaagtcctgaggaatattgcagccttcttgttcctctgcaatactttggttcaaggggtacgcatgcagatttgttacatgggtaaattgcgtgtcgctgaggtttggtgcacaaatgatcccgtcacccagagtgctgggattacagtgcctggccctgtaaggttcatcacagcacgacttacaataggaaagtcatggaatcaacctagttgcccatcagtggggtaccggataaagcaaaagtggttcttctacagcatcgaatactacacagccatgaaaaagaataaaatcatgtcctttgcagccacatggatgtag

SEQ ID NO: 19545 - DNA, 2289 bp, Homo sapiens
  SIMILAR (1942)..(2286): 1001254mologous to Escherichia coli D protein (AA 1- 804),accession number X04967,Smith-Waterman Score=584.
atgcttcaaagcaaccgaaccgccgccagccattcaccatccatccagccagccatccagccagccatccagccagccaaccaactatccatccacaatttgtggacacaattccggcattcaaccaaaattccagttgaatgggtgaatggtgaatggctgaatggacgaatgccaggggatcctcatgaatggcaatgcaactatcagccagccatccagccagccatccagccagccaaccaactatccatccacaatttgtggacacaattccggcattcaaccaaaattccagttgaatgggtgaatggtgaatggctgaatggacgaatgccagggaaacatcatgaatggcaatgcaactatcagccagccatccagccagccatccagccagccaaccaactatccatccacaatttgtggacacaattccggcattcaaccaaaattccagttgaatgggtgaatggtgaatggctgaatggacgaatgccagaagatcatcatgaatggcaatgcaactatcagccagccatccagccagccatccagccagccagccaactatccatccacaatatgtggacacaattccggcattcaggccaaattcctgttgaatgggtgaatggctcccggctgcatggacgccagcaagggatcttcatgcatggcaatgcaacttcgagccattcaccatccatccagccagccatccagccagccatccagccagccaaccaactatccatccacaatttgtggacacaattccggcattcaaccaaaattccagttgaatgggtgaatggtgaatggctgaatggacgaatgcagagaaacatcatgaatggcaatgcaactatcagccattcaccatccatccagccagccatccagccagccatccagccagtcaaccatctatccatccacaatttgtggacacaattccggcattcaaccaaaattccagttgaatgggtgaatggtgaatggctgaatggacgaatgccagggaaaaatcatgaatggcaatgcaactatcagccagccatccagccagccatccagccagccaaccaactatccatccacaatttgtggacacaattccggcattcaaccaaaattccagttgaatgggtgaatggtgaatggctgaatggacgaatgccaggggatcatcatgaatggcaatgcaactatcagatagcgccaatgcttcaaagcaaccgaacagccgccagccattcaccatccatccagccagccatccaggcagccatccagtcagccacccatctatccatccccaatttgtggacgcaagtccggcattcaaccaaaattccagttgaatgggtgaatggtgaatggctgaatggacgaatgccagggagagacatgaatggccatgcaactatcaggtacggcccaaagccggagaaaaacaaccgggcgccgaggcaaaccgagaaacaaggccagaagggggcacaccagcggagagaggggaaggcaagggccggcaacgaggagacagaaaagtactccagaagcagggccatccgacctagaaaaacagatagcgcgtcaagaagctcccgcgggcacagacgaaatcgaaaggcagcaagcgcggccacactaggccccatagaagataccaatcaaaataaactgcatgtcagagacacagggctagaagttaaagctatttcaattcaaggcccaggaactctcatggaagaggtgggcatgtgggatttgatcttatttcattatggtgaaagttggaacctcttacgtgccgatcaacgtctcattttcgccaaaagttggcccagggcttcccggtatcaacagggacaccaggatttatttattctgcgaagtgatcttccgtcacaggtatttattcgcgataagctcatggagcggcgtaaccgtcgcacaggaaggacagagaaagcgcggatctgggaagtgacggacagaacggtcaggacctggattggggaggcggttgccgccgctgctgctgacggtgtgacgttctctgttccggtcacaccacatacgttccgccattcctatgcgatgcacatgctgtatgccggtataccgctgaaagttctgcaaagcctgatgggacataagtccatcagttcaacggaagtctacacgaaggtttttgcgctggatgtggctgcccggcaccgggtgcagtttgcgatgccggagtctgatgcggttgcgatgctgaaacaattatcctga

SEQ ID NO: 19546 - DNA, 2382 bp, Homo sapiens
  SIMILAR (613)..(2061): 281254mologous to Mus musculus glycosyl-phosphatidyl-inositol -anchored protein homolog,accession number U27838,Smith-Waterman Score=380.
atgaaaggaattaaggtgaggcagctagagaaaactaaggagcatccccaaaccaaggacagaacaggccccatgcacgccagcgcgcaccccctcaagtctccgggggagcctgagcgaagagcacctctcccgagcggccacggagagccctgcaggcaccgacccccacccttcccacagccgccccgggtacgcagaagccgcttctgcaaggccccgggggaggctgacctgcggaaaacgcaccgaccgcggccctcgggagccccgccccgccccggggatgccaagccgcccctccacctcgcagcggcgccggccgcccagacctgcccaccctcgccgggccgcgccccgccccggcccgctccgccctcggccgccccgccaccgcctccttccggtgctccttcccggctgcagctggccgccagcgcttgtcgggtgttagttccgggcccagcttgggctggtggtaggtcgggagagggcgcggtctcccagcctttgcgcagattgcggggcaccaggtggggccgaggcgacgccgaacgccggcaggccggaaaccgcgcagccccgctggacctcgctgattgccggcggcaccggtggtttcgcgaccttgaacagctactaaaagcgcaaaagaaggcccagagaagggagcacatgctaaaacttgaggctgagaagaaaaagcttcgaactatacttcaagttcagtatgtattgcagaacttgacacaggagcacgtacaaaaagacttcaaagggggtttgaatggtgcagtgtatttgccttcaaaagaacttgactacctcattaagttttcaaaactgacctgccctgaaagaaatgaaagtctgagtgttgaagaccagatggagcagtcatccttgtacttttgggaccttttggaaggtagtgagaaagcagtggtaggaacgacatacaaacacttgaaggatctactgtctaaattgctgaactcaggctattttgaaagtatcccagttcccaaaaatgccaaggaaaaggaagtaccactggaggaagaaatgctaatacaatcagagaaaaaaacacaattatcgaagactgaatctgtcaaagagtcagagtctctaatggaatttgcccagccagagatacaaccacaagagtttcttaacagacgctatatgacagaagtagattattcaaacaaacaaggcgaagagcaaccttgggaagcagattatgctagaaaaccaaatctcccaaaacgttgggatatgcttactgaaccagatggtcaagagaagaaacaggagtcctttaagtcctgggaggcttctggtaagcaccaggaggtatccaagcctgcagtttccttagaacagaggaaacaagacacctcaaaactcaggtctactctgccggaagagcagaagaagcaggagatctccaaatccaagccatctcctagccagtggaagcaagatacacctaaatccaaagcagggtatgttcaagaggaacaaaagaaacaggagacaccaaagctgtggccagttcagctgcagaaagaacaagatccaaagaagcaaactccaaagtcttggacaccttccatgcagagcgaacagaacaccaccaagtcatggaccactcccatgtgtgaagaacaggattcaaaacagccagagactccaaaatcctgggaaaacaatgttgagagtcaaaaacactctttaacatcacagtcacagatttctccaaagtcctggggagtagctacagcaagcctcataccaaatgaccagctgctgcccaggaagttgaacacagaacccaaagatgtgcctaagcctgtgcatcagcctgtaggttcttcctctacccttccgaaggatccagtattgaggaaagaaaaactgcaggatctgatgactcagattcaaggaacttgtaactttatgcaagagtctgttcttgactttgacaaaccttcaagtgcaattccaacgtcacaaccgccttcagctactccaggtagccccgtagcatctaaagaacaaaatctgtccagtcaaagtgattttcttcaagagccgttacaggctacttcttctccagttacttgtagctcaaatgcttgcttggttactaccgatcaggcttcttctggatctgaaacagagtttatgacctcagagactcctgaggcagcaattcccccaggcaagcaaccgtcttcactagcttctccaaatcctcccatggcaaagggctctgaacagggcttccagtcacctccagcaagtagtagttcagtaaccattaacacagcaccctttcaagccatgcagacagtgagtatgaaacatgaatga

SEQ ID NO: 19547 - DNA, 1536 bp, Homo sapiens
  SIMILAR (85)..(414): 391254mologous to Chlamydomonas reinhardtii vegetative cell wall protein gp1,accession number AF309494,Smith-Waterman Score= 174.
atgaaaggaattaaggtgaggcagctagagaaaactaaggagcatccccaaaccaaggacagaacaggccccatgcacgccagcgcgcaccccctcaagtctccgggggagcctgagcgaagagcacctctcccgagcggccacggagagccctgcaggcaccgacccccacccttcccacagccgccccgggtacgcagaagccgcttctgcaaggccccgggggaggctgacctgcggaaaacgcaccgaccgcggccctcgggagccccgccccgccccggggatgccaagccgcccctccacctcgcagcggcgccggccgcccagacctgcccaccctcgccgggccgcgccccgccccggcccgctccgccctcggccgccccgccaccgcctccttccggtgctccttcccggctgcagctggccgccagcgcttgtcgggtgttagttccgggcccagcttgggctggtggtaggtcgggagagggcgcggtctcccagcctttgcgcagattgcggggcaccaggtggggccgaggcgacgccgaacgccggcaggccggaaaccgcgcagccccgctggacctcgctgattgccggcggcaccggtggtttcgcgaccttgaacagatctcagcaatcaccacagtatctgttgcttggaaggtactcagtgggaagataggagaaggtgcagagggcaactgtaaatgtgtcataagtgaaggggcctgggctgtttgccctacccagccctgtggcaaggctaaaccaggccccatagaagataccaatcaaaataaactgcatgtcagagacacagggctagaagttaaagctatttcaattcaaggcccaggaactctcatggaagagagattcctctggatgacagtcatgggaaatggcaagaaagacaggcctcgcggatcccccacttgtctcgacgcaggggacgcccacttgtctgacgcaggggacgtggctgaagtcagtcgggccgcccgcttgctgcacggcagccgtgggactggcacaggctcctcggcagcattatgggcagctggtagagcggccacttctgagagccggatgggccttccgaggtcgggccgtgccccgctgggcagcgcagagggggtgtgtagggcacgcgacttggagccaggtccagacccatcctggctcctctcagggctccttcccctgcccccattccaccccagccctgctggctgtcccgcaggacccagcgccgcggtagccttctctgaactgcggctcaggcggagaagcgccctcgagaagtgtctaaaggagacagttgatagccaaacaacagttttggattcactgactgattatgaaagaagcagtagactggtatcaagaatcagtcaggtaggaaatggagcacttggtggtgtctttggctatgggaaaaaggaaatgcccactgatcccattcctggaaaatgggagaggagacagaatacccttcacaatgaggaaaatgggattaggaattag

SEQ ID NO: 19548 - DNA, 476 bp, Homo sapiens
  SIMILAR (1)..(261): 971254mologous to Homo sapiens CTF-1 factor (AA 1 - 499),accession number X12492,Smith-Waterman Score=459.
tacttcccccacacggccatccgctacccacctcatctcaaccgccaggacccgctcaaagatcttgtctcgctggcctgcgacccagccagccagcaacctggaccgttaaatggaagtggtcagctcaaaatgcccagccactgcctttctgctcagatgctggcacctccgcccccggggctgccacggctggcgctcccccctgccaccaaagccgccaccacctccgagggaggagccacgtcgccgacctcgcctttcctggtatctgggatagcaaaggtcttcttccctcgccccttctccatcgtcccaggaatcccagggggcagcacagccggcccccggcccacgttttcggtggaaaattagagtgaacaagaacacccctgccgactcccagcccggccaaaaagacaaaacacatagacgcacacactcaggaggaaaagaaaaaacaaaggcagaagaag

SEQ ID NO: 19549 - DNA, 285 bp, Homo sapiens
  SIMILAR (3)..(86): 1001254mologous to Homo sapiens NFI1_HUMAN,accession number AC005551,Smith-Waterman Score=152.
cctactctccgcccgacacgtcccctgcaaaccgttcctttgtgggattaggaccaagggatcctgcgggcatttatcaggcacaggaatcccagggggcagcacagccggcccccggcccacgttttcggtggaaaattagagtgaacaagaacacccctgccgactcccagcccggccaaaaagacaaaacacatagacgcacacactcaggaggaaaagaaaaaacaaaggcagaagaagaagaagaagaaataaaaacccacccaagcaagaagacaaaag

SEQ ID NO: 19550 - DNA, 1556 bp, Homo sapiens
  SIMILAR (77)..(1360): 1001254mologous to Homo sapiens NFI /CAAT-binding transcription factor 5 (CTF5),accession number X92857,Smith- Waterman Score=2264.
ccggctggaattcccgggtcgacgatttcgtagcgcgcccgctccggccggccctgcgcctcccgccgcgcccgggatgtattcgtccccgctctgcctcacccaggatgagttccacccgttcatcgaggccctgctgcctcacgtccgcgccttcgcctacacctggttcaacctgcaggcgcggaagcgcaagtacttcaagaagcacgagaagcggatgtcgaaggacgaggagcgtgcggtcaaggacgagctgctgggcgagaagcccgaggtcaagcagaagtgggcgtcgcggctgctggccaagctgcgcaaggacatccggcccgagtgccgcgaggacttcgtgctgagcatcaccggcaagaaggcgccgggctgcgtgctctccaaccccgaccagaagggcaagatgcggcgcatcgactgtctccggcaggcggacaaggtgtggcggctggacctggtcatggtcatcctgttcaagggcatcccgctggagagcaccgacggcgagcgcctggtcaaggctgcgcagtgcggtcacccggtcctgtgcgtgcagccgcaccacattggcgtggccgtcaaggagctggacctctacctggcctacttcgtgcgtgagcgagatgcagagcaaagcggcagtccccggacagggatgggctctgaccaggaggacagcaagcccatcacgctggtcacgaccgacttccaggagagctttgtcacctccggcgtgttcagcgtcactgagctcatccaagtgtcccggacacccgtggtgactggaacaggacccaacttctccctgggggagctgcaggggcacctggcatacgacctgaacccagccagcactggcctcagaagaacgctgcccagcacctcctccagtgggagcaagcggcacaaatcgggctcgatggaggaagacgtggacacgagccctggcggcgattactacacttcgcccagctcgcccacgagtagcagccgcaactggacggaggacatggaaggaggcatctcgtccccggtgaagaagacagagatggacaagtcaccattcaacagcccgtccccccaggactctccccgcctctccagcttcacccagcaccaccggcccgtcatcgccgtgcacagcgggatcgcccggagcccacacccgtcctccgctctgcatttccctacgacgtccatcctaccccagacggcctccacctacttcccccacacggccatccgctacccacctcatctcaacccccaggacccgctcaaagatcttgtctcgctggcctgcgacccagccagccagcaacctggaccgtcctggtatctgggatagcaaaggtcttcttccctcgccccttctccatcgtcccaggaatcccagggggcagcacagccggcccccggcccacgttttcggtggaaaattagagtgaacaagaacacccctgccgactcccagcccggccaaaaagacaaaacacatagacgcacacactcaggaggaaaagaaaaaacaaaggcagaag

SEQ ID NO: 19551 - DNA, 477 bp, Homo sapiens
  SIMILAR (55)..(477): 1001254mologous to Homo sapiens nuclear factor I,accession number U18759,Smith-Waterman Score=747.
ttgagtccagaatctcagaatcgggcgttgggctttgccgggtgcttcagatcaatggatgagttccacccgttcatcgaggcactgctgcctcacgtccgcgctttctcctacacctggttcaacctgcaggcgcggaagcgcaagtacttcaagaagcatgaaaagcggatgtcgaaggacgaggagcgggcggtgaaggacgagctgctgggcgagaagcccgagatcaagcagaagtgggcatcccggctgctggccaagctgcgcaaggacatccggcctgagttccgcgaggacttcgtgctgaccatcacgggcaagaagcccccctgctgcgtgctctccaaccccgaccagaagggcaagatccggcggattgactgcctgcgccaggctgacaaggtgtggcggctggacctggtcatggtgattttgtttaaggggatccccctggaaagtactgatggggagcgg

SEQ ID NO: 19552 - DNA, 734 bp, Homo sapiens
  SIMILAR (35)..(385): 621254mologous to Mus musculus splice variant,accession number Y07692,Smith-Waterman Score=315.
tggacgcaggacatggaggaggcatctcgtcgcggtgaagaagacagagatggcgaagtcaccattcaacagcccgtccccccaggactctccccgcctctccagcttcacccagcaccaccggcccgtcatcgccgtgcacagcgggatcgcccggagcccacacccgtcctccgctctgcatttccctacgacgtccatcttacccccagacggcctccacctacttcccccacacggccatccgcttacccacctcatctcaacccccaggacccgctcaaaagatcttgtctcggctggcctgcgacccaatccagccagcaacctggaccgcctactctccgcccgacacgtcccctgcaaaccgtttcctttgtgggattaggaccaagggatcctgcgggcatttatcaggcacagtcctggtatctgggatagcaaaggtcttctttccctcgccccttctccatcgtcccaggaatcccagggggcagcacagccgggcccccggcccacgttttcggtggaaacattagagtgaacgaagagacactccctgaccgactccgcagcccggccaaaaagacaaaacacatagacgcacacactcaggaggaaaagaaaaaacaaaggcagaagaagaagaagaagaaataaaaacccacccaagcaagaagacaaaaggtaaagacgcaacgtttccaactctcgggacgccaaggccgcagact

SEQ ID NO: 19553 - DNA, 2152 bp, Homo sapiens
  SIMILAR (455)..(1285): 791254mologous to Homo sapiens CTF-1 factor (AA 1 - 499),accession number X12492,Smith-Waterman Score=1045.
atgccccaccggcttcgagcatgggtccccgtgtgcccggcggacacccacgggccgtgtgtccgtcacacgctgtaggcgccgcgcgtggggatctctgcgcgtgtccgtgtgcgggccgagagcccagctccaggcagagctggtgcaggaggagcagggaggtggcgtgctgtgtgtcattgtgatgcctctcacccctggccgcactcccagactgccccggggccgagccttgtgcaatggccgagggggtgtgtggggagggggcggctccccccggggactccttccagcccaggctcccggggaccccgaggtctgcaagttccgttttctagaccgctgctttcctccttacgcaggcccctccgacctcagccttcggggccgggcagtgggtccgccctctgcgtccctggcgctcctgacctctcgcctctccggcctgcaggatgagttccacccgttcatcgaggccctgctgcctcacgtccgcgccttcgcctacacctggttcaacctgcaggcgcggaagcgcaagtacttcaagaagcacgagaagcggatgtcgaaggacgaggagcgtgcggtcaaggacgagctgctgggcgagaagcccgaggtcaagcagaagtgggcgtcgcggctgctggccaagctgcgcaaggacatccggcccgagtgccgcgaggacttcgtgctgagcatcaccggcaagaaggcgccgggctgcgtgctctccaaccccgaccagaagggcaagatgcggcgcatcgacctgtttccggcaggcggacaaggtgtggcggctggacctggtcatggtcatcctgttcaagggcatcccgctggagagcaccgacggcgagcgcctggtcaaggctgcgcagtgcggtcacccggtcctgttgcgttgaagccgcaacacatttggcgttgccgtcaaaggaacttggacctctacctggcctacttcgtgcgtgagcgagatgcatagcaaagcggcagtccccggacagggatgggctctgaccaggaggacagcaagcccatcacgctggacacgaccgacttccaggagagctttgtcacctccggcgtgttcagcgtcactgagctcatccaagtgtcccggacacccgtggtgactggaacaggacccaacttctccctgggggagctgcacgcgcacctggcatacgacctgaaaccagccagcgctggcctcacaagaacgctgtccagcaccttctccagtggtaacaagcgctacaatagcgggctcgatggaggaatacgtagactctaccccttggggcgatgactagacttagcccagctcgcccacgagtagcagccgcaactggacggaggacatggaaggaggcatctcgtccccggtgaagaagacagagatggacaagtcaccattcaacagcccgtccccccaggactctccccgcctctccagcttcacccagcaccaccggcccgtcatcgccgtgcacagcgggatcgcccggagcccacacccgtcctccgctctgcatttccctacggacgtccatccttaccccagacgggccttcacctactttcccccacacggccatccgctacccacctcatctcaacccccaggacccgctcaaagatcttgtctcgctggcctgcgacccagcccagccagcaaccatggacccttaaatggaagtggtcagctcaaaatgcccagccactgcctttctgctcagatgctggcacctccgccccccggggctgccacggctggcgctcccccctgccaccaaacccgccaccacctccgagggaggagccacgtcgccgacctcgccttcctactctccgcccgacacgtcccctgcaaaccgttcctttgtgggattaggaccaagggatcctgcgggcatttatcaggcacagtcctggtatctgggatagcaaaggtcttcttccctcgccccttctccatcgtcccaggaatcccagggggcagcacagccggcccccggcccacgttttcggtggaaaattagagtgaacaagaacacccctgccgactcccagcccggccaaaaagacaaaacacatagacgcacacactcaggaggaaaagaaaaaacaaagg

SEQ ID NO: 19554 - DNA, 1824 bp, Homo sapiens
  SIMILAR (393)..(512): 501254mologous to Canis familiaris brain-specific synapse associated protein, Bassoon,accession number AJ012166,Smith- Waterman Score=75.
taggcgcccagggccaggcagcggttgcttccccggcccggctcgcccgcgcttctctccctgtgggcggcggcccggcgcctggaaggtcaagatggaagaaatcctgaggaagctgcacaaggaggcgtccgggagcaagtacaaagccatcaaggagagctgcacctgggccctgggtaagcgtccggcacctgctcgccgcggcgggagggccgcgcggccggggctgaacccgcgcctccgcgcgtggggctttcgcggagcgtcggtcatgggtgccgttctggcgattgcgagagtcgcctcgggaaattgatgtgggatttgagagtcttggctcgggcgtggacatcagccgcctcccctccggtctctttcactctccgaaaccttcctcgggaaccgctgtcctccctgcctggcggcccccttctcctggtcccggcgctggggacgatgcttccccatcgccgagttaggcaggacccggagccggtgcgaatcctggggcctgacagcgaagcgcctctggggaaaagggaagttaaaccaacaaccccgatgtcgaatccttggcgagtggaaccaggaaggaaaggcttgtttaatttgattttcctgatagagcttgctcttagccttatagagctgggcactgttacccagccttggttgactatatatccctctgtcctgcgggaaaaccatgctgatctggttgttcactgtcactgcctttccttggggagcagcatcggctcatcctgggtgccagtccctgctgtgctaactgaaactctaggtggtctggataccattgtcaagatccctccacatgtactgagctgggagaaaaaccttcaaaaacaaaaggggttttgtaagcttatttcagaggctgttggtaggacagaagccaggaaactgggtccagctgtgcttgggggttgggagaaggagagatcccgtgactgggaagggcagagggagagggctgaacacagaggacacccaggactgagcagagcttgtcatttgctgaagggaaagcaaatagatcatcataatacagatgcaagtcctggttctcctacatatgccttttgggacctcgagctggtcattttgcctgtcagtttccgtaaatggagatggaaacgggaaggtagggaggtgcctctgtttccccagtgtgacaggtctgaagagatcccattgcaggccacagaagtggcctcaacctcccctcctggagcagtgaggctccttgctcagacaccctgggctttcagggagaaatgcctgctgcctctccagttggctttggaatccaagaatgtgaagctggcccaacatgctttggcagggatgcagaagcttctgtcggaagagaggtttgtatccatggaaacagattctgatgagaagcagctgctcaatcagatactgaatgccgtgaaagtgacgccttcgctcaacgaggacctgcaggtggaagtgatgaaggttttactatgcatcacctacacgccaacatttgatctgaatgggagtgccgtgctgaagatcgcggaggttcacttttcaaaagacagtgttgtttctgaaaatagcaagaagcaggattggtgtgtaagaggcttgttagccctttgccatgtgaaggaagagaggggaggtgtcaagccactgcccctgctgatggaactggggggaaggggagacaaggagcagagggtcttcaggaggagagggctgccagggattgaggctgttagtatcaacaacaaccaggttttgaatgagagtcagaatgattga

SEQ ID NO: 19555 - DNA, 2631 bp, Homo sapiens
  SIMILAR (2532)..(820): 981254mologous to Homo sapiens SP4 transcription factor,accession number AC004595,Smith-Waterman Score=2740.
ttaagatttcatcaaatcaccaccatgaccaccaccaccaccaccaccaccaccaccaccaccatcatcatcatcatcatcatcaactgtatgggttcttctatgtctctggagctcatcactccgtgtgaatcttttgccacaaaacatccagttgcatataaaaggtctttctccagtatgccagcgaagatgtgctcgtaaatgagatgttttgccataaactttaccacatccttcaatatgacagatatgctgcttcttttttcctggttcattactgcctcttccttctccttccctacaattaggacaggaacaggcaactcttcgaagcctcttgccaggttgtacctcttgatcagaagtctgctggccttgctgcaaatgcacttgtgtgagttggtcaggactaacagcacctatcgtggcattagcaattcctccaactgctacagttacaggagctatagtagcttgctggacttttactccatcttgtccttgctgctgacctgagccatcactgttgcttggtaacctttcattcatcctatgctggcaatgtacatagcccttcattggctgttccaatttttttccctctgtcctcaaatcctcattcccctttccttgcaccttacaattgtggaagctttgttcttttgctcttcgcaataaatcttgctgctgctcactctttgggtccacactgcctttatgagctgtaacactcaccgcgaaggtctgcagcttcactctatactgaaatacaccacctgtttgctgctgttgttgttgttgttgttgttgttgttgttgttgttttgagacagggtcccgttctgttgcccagactgcaacactagtgattgtaacgggaactccctgcacttgaacacctgcagcacccaggttggcaacgctcactgtctgaaggttaggcactgatgcaagctgggcagtattcaaagttattggggcaccagcaacagccacaggagcaatctgagcaagagttgtgccaccacttgaagacactggggtgatggttaattgttgggataacccagcattctgaacttgcaaatttgaaagactctgaatattctgaacctgtacagtttgccaactgatttgccctgaaggtgttaaagttggagccctgataagcacctgagtcggatttactgcttgaagttgaacattctgtaaaggctgctgctggatggtctgaatcgtctgccctgactggagttgaaacgactgtggtggaatagcctgaatgatctgttgctgaggctgttggatctggatctgctgtaagataggttggcctacaatttgcacctgctgaagagaatttgattgatcctgtgcattctgcattccattaggctgaagctgactggagctctgggcttcagactcagtagcagcaggtgtttgagattcttcaatggtgcgttcagaactactggctgatgtgcttgcatactggccagtatctgctgagctcactaatgtgtcactgcttgtcaaagacgttgaagcagtggttgtgcaggtagtggaggaggagggagattctggcatagtactggcagaagtagtggtgttggtgggtgtggaaactaattgattcccattggaagtcccactatcagcagtagcagcaggctggccaacctgcccagtccctcctccggcagccacgttgtttatcactggcaaagctagagtcactcctccaatgttaattggtagggttgttacaacttgagcctgagtaccaggaagagtctgtaactgcagtggtattgaaacaccaggtctaatttggaccggaactgtctgatttgccaggttttgagcaagaatattcccagaagctgtcctgttagcagctgtgagtatagcttgattattacctgcagaaatgagctgaatttgaccctgcaaatcctgtagagatgaactactagttggattgatttgaatttgttgaccttccactgtctgaagttgtggaattacttggtactgtacactaccacttggattttgtacttgtatgacttgaaattgaccaggggtggaagaattacctgatttagtttttgtaggagatgcactcccgttattactgctggaagaactagacgaactagaggctggttgagaaacgttattctcttttgaagcaggaggagtggaggcaacaagttgccaagcgtttccagcaagttgcgttgttaccagttctagctgttgtggttgattttgaagttgcaccaatccttgacttggatctataataatttgttgttgtccagttgcttgattttcaccaggagtccctattttgctgcaagtagctgccagtaaagccagaggagagggctgagagtcctgggagcctgaggttttgggttttttattgttattctctggctcagaggttttccctccttctgtagccatcgccgctgccgctgccgcctcctcctcctcctccttcttctgatctgtttccagagctgttcgcttattaccaagctctcccatctctgctgaaaaattaagatcaaattgacaagagaactgaacagcattagtcctcagaaacat

SEQ ID NO: 19556 - DNA, 678 bp, Homo sapiens
  SIMILAR (546)..(484): 801254mologous to Homo sapiens Human secreted protein, SEQ ID NO: 7678,accession number G03597,Smith-Waterman Score=91.
atgtggaaccgactttgcaactgggtaacaagtataggttggaagagtttggagggctcagaagaagataggaagagttcccaatggggcacactgcctagtggagctgtgagaagagggccaccatcctccagatccaagaatggtagatccaacagcagcttgcaccctgtgcctggcaaagccacaggcactcaactcgagcccatgagagcagtcatgggtgatgaatcctgcaaagccacagggacagagctgctccatgccttgggagcccacccactgcaccggcttctcaaacagcacagccacatgatgtttcaaaaagtccaagtggaacctcttcggaaagatgccccaccattggcagaggctgtgacctttttcctcagaatgaaaccacggaccttcacggtgagcgttacagctcttaaagatggtgtgtccggagtttgttccttcagatgttcagatgtgtccggagtttcttccttccagtgggttcgtggtctcactgacttcaggagtgaagccgcacaccttcgcaaaaggccaggttgtaccaccttccttacaatacagaaacaagctctctcaaccacaagcatcaatgacattatccagtttcgtggaatcactggcaatgcccccatgtatcagaatgtcttctgtggctga

SEQ ID NO: 19557 - DNA, 604 bp, Homo sapiens
  SIMILAR (341)..(249): 741254mologous to Homo sapiens Human secreted protein, SEQ ID NO: 7678,accession number G03597,Smith-Waterman Score=109.
atgggcagtgggcctcgggtgagacctagtgctgtgctggcttcaggtctgaatcagagcagtcctagtggtggtagccacagggtgcttatatcaccattccccccaagctccaggcagttcagcacagagagactctatttgggagaaaataaaggaagacaacaagagtctctgcctgttgatccagagaattcttctggatcttacacaagaccatcaagggggtacctctatgagtctgcaaaagccacagtgttactggctttggggttcttggtctcactgacttcaagaatgaagccacggaccctcacagtgagtgttacagctcttaaagatggtgtgtccggagtttgttccttcagatgttcagatgtgtccagagtttcttccttccggtgggtttgtggtctcgctgacttcagaagtgaagctgcagacctttctcaaaaaggtcaagttaacagaaacacatgtccagggcttatacccaaacaagaattccagagaacaaagatcgagatggtagatggggaaagaagaatcagttcagtaatatttcccgtatctgaagagcaagtttatacaatgacaagattca

SEQ ID NO: 19558 - DNA, 1086 bp, Homo sapiens
  SIMILAR (188)..(63): 801254mologous to Homo sapiens Human secreted protein, SEQ ID NO: 7115,accession number G03034,Smith-Waterman Score=179.
atggtgtgtccggagttcgttccttcagatgttcagatgtgtctggagtttcttccttctggtgggtttgtggtctcactgacttcaggagtgaagctgcagaccctcgcggtgagtgttacggctcttaaaggcggtgcatctggagttgttcattccttctggtgggtttgtggtcttgctgacttcaggaatgaagctgcagaccttcatggagtgaagctgcagaccttcgtggtgagtgttacagctcataaaggcggtgcggacccaaagagtgagcagcagcaagatttagtgcaaagagtaaaagaacaaagcttccacagcctggagggggacccaagtgggttgcccatgctggctctggtggcctgcttttattcccttatttggccccacccacatcctgctgattggtccatttcacagagagctgattggaagattattgtgggatctgccccgcagcccgcaatgcaatggggctctttccttgttcacgggcagatcggcaggtcgagaaataatagacgcacacaagatagtgaaaactgggtccagggggggtcaccatcttctggtcccgtggtgccgccaatgcactggatataccagcatttattattaagtttagtgaggtcaggggtaggtgtatccccaaacaaattggaaacaaaatactgggacaagagtcttcatagcagcactattcacaatggtccaaaggtgaaaacaaatgaccgtcaatgggtgaatggacaaacaaatgtggtctatccatacaatggaacgtcatgcagccataaagagaatcgaagcacaggtgtatgccacaatgtagatgaaactaaaaagcatgctgctattagaaagaaaccagacatgaaagagattcacaatgcacatcgccttatgaaggcagctgagaatgcctgtagcaagggaacctgtggagctctgtttaatcctgagtttccaaaacctcctgggtcacagaacccctttgatgtagacagcgttttactgagagtgtgggaaatgctgctctgtgatgatacagtgactttgatttgtttaggatga

SEQ ID NO: 19559 - DNA, 1954 bp, Homo sapiens
  SIMILAR (233)..(952): 801254mologous to Homo sapiens adenosine deaminase acting on tRNA 1,accession number AF125188,Smith-Waterman Score=957.
gcgcgtttcctgaaggtcgatggccaggtggtcttcataaactatactgccttgtgatgcctccctagaaatgagaggtctcaataccagctcagaccatgtggaccgcggatgagattgctcagctatgctatgaacactatggggatcaggctgcccaagaaggggaagcctgagccaagccatgagtggacattattggcagcggtggtgaagatacaatctccagcttgacaaggcctgcgacacccctgataagccggtgcaagtgacaaaggaagttgtgtcaatgggaacaggaacaaaatgcataggacagtccaaaattgaaggaagaacggagacatccttcaatgatagccatgcttgaggtcatagcccagaaggagtttccaaaggtaccttctccaccaactccagttggcagccaccctgaaagaggatagcatctttgtcccaggaactcaaaaaggagtgtggaaacttagacgagaccataattaatgtgtttttctccagccatacaccctgtggggatgcctccatcattccgatgcttgagtttgaagatcagccttgctgtcctgtcttcagaaattgggccaacaactcatcagtagaagccagtagtaacctggaagctcctggaaatgaaagaaaatgtgaagaccctgacagtcctgtaaccaaaaagatgaggcttgagcctgggactgcagccagggaggtcaccaacggagcagctcaccatcagagttttggcaagcagaaaagtggcccaatctcaccaggcatccacagctgtgatctcactgtagagggactggctactgtcaccagaatagcccctggtagtgccaaagtgacagacgtttatagaactggagccaagtgtgtacctggagaagctggagactccggaaagccgggtgctgcgtttcaccaggtgggggctgctccgagtgaagccaggccgtggagacagaacacggtccatgtcctgtagtgacaagatggcccgattggaccgtcctgggatgccaaggggcactgttgatgcacttgctggaagagcccatctacctgtcagctgtggtcattgggaagtgcccatacagccaggaagccatgcagaagagcacctgattggaaggtgtcagaaagtggtctgctttaccaaaaggcttcggagttcaagaattaaaaatactgcagtcagatttactatttgaacagagccgcagtgcggtgcaggcaaaaagggctgatagcccaggtcgacttgttccttgtgggggcagccatcagctggagtgcagttcctgagcagcctttggatgttactgccaatggctttccacagggaacaacaaagaaaacaattggaagccttcaggcaagatcccaaatcagcaaagtggaactcttcagatcattccagaagctgctaagcagaattgcaagggacaagtggccacactccctcagggtgcagaagctggatacctaccaggagtacaaggaggctgcgtcctcttaccaggaagcctggagcacactccggaagcaggtgtttggatcctggatcagaaacccaccggattatcaccagttcaagtgagaaggaaatgtttgctctggtagcaggaccctttcatcctgaactgccttcctccacgcaggacaagtcttagcttttttggtagttaaatcagggaacattctttctgagctttgcatctctgttgtgtaatacagatggaatctggaacttagagcaagctatacttgattgaagtagctctctgctaaaatggcatctcactaatgacctcactatctgacttccattgtgttttattgcttctctaaaatatgaaatcagagtttggaacatgatgctttgaaagtactctgcagcagctctgttttatgggttcctacattgatcaag

SEQ ID NO: 19560 - DNA, 295 bp, Homo sapiens
  SIMILAR (1)..(162): 941254mologous to Bos taurus plasmalemmal porin,accession number X75068,Smith-Waterman Score=274.
accaagtacagatggactgagtacggcctgacgtttacagagaaatggaataccgacaatacactaggcaccgagattactgtggaagatcagcttgcacgtggactgaagctgaccttcgattcatccttctcacctaacactgggaaaaaaatgctaaaatcaagactgatgaatccagcttcacactaatgtgaatgacgggacagagtttggcggctccatttaccagaaagtgaacaagaggttggagacccctgtcaattttgcctggacagcaggaacagtaacacgg

SEQ ID NO: 19561 - DNA, 354 bp, Homo sapiens
  SIMILAR (7)..(222): 931254mologous to Homo sapiens voltage-dependent anion channel,accession number L06132,Smith-Waterman Score=357.
atgctaaaatcaagacagggtacaaagcgggagcacattaacctgggctgcgacatggatttcgacattgttgggccttccatccggggtgctctggtgctaggttacgagggctggctggccggctaccagatgaattttgagactgcaaaatcccgagtgacccagagcaactttgcagttggctacaagactgatgaattccagcttcacactaatgtcctcctcctgaatctggagaggacttgcttcctcactggccccacaccaacacctcctcctctgtcctggttgccaggaacgactttctctctgacatgggcaatgacaggtagatacacaattaatagccag

SEQ ID NO: 19562 - DNA, 2015 bp, Homo sapiens
  SIMILAR (103)..(726): 521254mologous to Rattus norvegicus voltage dependent anion channel,accession number AF048828,Smith-Waterman Score=420.
gccgctcgctcggctccgctccctggctcggctccctgcctccgcgtcgcagcccccgccgtagccgcctccgagcccgccgccacatcctctgagcagaagatggctgtgccacccacgtatgccgatcttggcaaatctgccagggatgtcttcaccaagggctatggatttggcttaataaaacttgatttgaaaaccaaatctgagaatggattggaatttacaagctcaggctcagccaacactgagaccaccaaagtgacgggcagtctggaaaccaagtacagatggactgagtacgggcctgacgtttacagagaaatggaataccgacaatacactaggcacccgagattactgtgggaagatcagctttgcacgtgggacttgaagcttgaccttccgattcatccttctcaccctaacacttgggaaaaaaaatgctaaaatcaagacagggtacaagcgggagcacattaacctgggctgcgacatggatttcgacattgctgggccttccatccggggtgctctggtgctaggttacgagggctggctggccggctaccagatgaatttttgagactgcaaaattcccgagtgaccccagagcaacttttggcagttggctaacaagacttgatgaattccaagcttcacggtgaatgtgaaatgaccgggacagagtttggcggctccatttaccagaaagtgaacaagaagtttggagaccgctgtcaatcttccctggacaagcaggaaacagtaacacgcgtttcgaaatagcagccaagtatcaagattgacccttgacgcctgcttctcgggtaaagtgaacaactccagcctgataggtttaggatacactccagactctaaagccaggtattaaactgacactgtcagctcttcatggatggcaagaaccgtcaatgcttggtggccacaagctttggtctaggactggaatttcaagcataaatgaatactgtacaattgtttaattttaaactattttggcaggcatagctacctttcagaattttagtgttatctttttaatgttgtatgtctggggatggcaagtattgcttaaatatgttaggccctccgggtttaaagttggatttcagcttttaagatgttatcccttccagagggtacaggaaggaaacctattttccaaaaaaggtccctttcagtgggtagactcggggagaaacttggtgcccccttttgagatgccaggttttttttttaatctaaaaatggctgcaagtggaagcggaataatatgtaggccactttgtaaatttcatattgagtaaatgaatgaaaatggtgatttcccgaggaatcgaaccttggttccctaacccctaattcgatgagaggcttcctggcttggatggtgtgtacaaaacctcacctgaatgggactttttttagaccagatcttcatgaaccctgttcccacccccagtttcatcaatcacctctttttaccaccaaaaaggtctgcaggggtgtggtaactgtttccttttgtgcccattttgggggtgggagaagggtggatgtgatgaaagcccaataaatcaaggacttaatcccttccttgtgttgtgttttttttttgccccttgccaccagaagtatgaaatagcttccccaggagctcccagctataaagcttgggaagtgtctgtgtggattgtaaatcacatgggtgacaaccactcaggaatcttaaattgggacttctggtggtattctcaccactcaatttgtttttttagcagatttaatggggtacattttaggagtcttcccattttgttgggaattaggatccctccccctttcaaatgctgtaattaaccaacactttaaaaaacttggaataaaatatttgaaacctcaaaaaaaaaaaaaaaaaaaaagggcggccgctctagagtatccctcgaggggcccaagcttacgcgtacccagctttcttgtacaaagtg

SEQ ID NO: 19563 - DNA, 932 bp, Homo sapiens
  SIMILAR (608)..(652): 531254mologous to Ovis aries type II small proline-rich protein,accession number L77968,Smith-Waterman Score=56.
atgaaagagaagaatcctgaggaagttctaaaattttggtttgagcaccagggtgtatggtggaggatctggatttgggaaaaaagggacatcctggggagctcccgaggggagaacttgccggagccgccccagggatgcattgcagttagccttgggaggaccaaggggacttccccaagggaaggggacaacatcattggagccaaagaagctgagacaacttcctggcccggtgattctagtgttttcttggtcacgaacaggcccacaaggctggccccaaacctgctggaatgcctgtccccctggtccaggggccaggaaggagaaggatcaacagcagccacacacaggaaccaggatgattcctggatctgtatccttcacacttactataccttcagtaccatcagtgctcgttcactcacaggttttacaaagagacgaaacatgcattcctattttaatggagaaaacaagataaacgtatgcctaggaatggagacatttattatcatcgatgacgatgagactgcttgtgagctaatgtcatccctcctcccatgtgctctgtgcccctgccagcctgagtgatcaccagtggcccccaccggccctgtgtccctcctccaggcctcagcctgtgcccttccttggtctgggacactctcttccaggcctcagccctgtcccactcatccctcaggtattgaggcttagctgtgtcttcctctagttacccaactgggttagcttcctctctcctgctccacagcacctggtacctccctgtcccagcacttgtcctactatgttgaaattgttttaagcgtcagcagcagatttaaacgccatcagggaagagactgtgtcttctcttatactctcactgtctagcaccagacgatcagtaggtgcccaataaatat

SEQ ID NO: 19564 - DNA, 1297 bp, Homo sapiens
  SIMILAR (403)..(909): 781254mologous to Homo sapiens CUA001,accession number AF248964,Smith-Waterman Score=636.
gcaccaaggcggcagtcttgattcccttttggccagcagtttttaggtctgtcagtactgcactgcaagaatggcagattttgggatctctgctggccagtttgtggcagtggtctgggataagtcatccccagtggaggctctgaaaggtctggtggataagcttcaagcgttaaccggcaatgagggccgcgtgtctgtggaaaacatcaagcagctgttgcaatgtttagtcccaggaagcaccactcctgcacagtgcctgagattttggcctgaaatcgcccggatccttcggcctggtggatgtctttttctgaaggagccagtagagacagctgtagataacaatagcaaagtgaagacagcatctaagctgtggttcagccctgactctttcctggtcttgtggaagagaaagagctgcagcgggagcccctaacccctgaggaagtacagtctgttcgagaacaccttggtcatgaaagtgacaacctgctgtttgttcagatcacaggcaaaaaaccaaactttgaagtgggttcttctatgcagcttaagctttctatcaccaagaagtcttctccttcagtgaaacctgctgtggaccctgctgctgccaagctgtggaccctctcagccaacgatatggaggacgacagcatggatctcattgactcagatgagctgctggatccagaagatttgaagaagccagatccagcttcccctgcgggcttgcttcttgtggggaagggaaaaagaggaaggcctgtaagaactgcacctgtggccttgccgaagaacttggaaaaagagaagtcaagggaacagatgagctcccaacccaagtcagctttgtggaaactgctaccgtggagcgatgccttccggctgtgccagctgcccctaccttgggatgccagccttcaaacctggggaaaaggtgcttctgagtgatagcaatcttcatgatgcctaggaggttcctgacatgggacccatctgctcctccagccaactcctgtccctcacatcccaccatggtggctcctcccacctcctctggatttgttcactctgagatctgtttgcagagtgggtgcttagcagacagagtgaagctggctgggggggcacagtggtgtgttagtgctgctgtgttattcaaaagaccaaggtattatgggacctggtttcagaatgggatgggtttcttcacctcatgttaagagaagggagtgtgtcctgaagaagcccttcttctgatgttaaaatgctgaccagaacgctcttg

SEQ ID NO: 19565 - DNA, 1271 bp, Homo sapiens
  SIMILAR (956)..(1234): 951254mologous to Homo sapiens CUA001,accession number AF248964,Smith-Waterman Score=484.
  misc_feature (1)...(1271): n = a,t,c or g
cggaagcgagctcatgcggcagtcttgattccctttttggccagcagtttttcaggtctgtcagtactgcactgcaagaatggcagattttgggatctctgctggccagtttgtggcagtggtctgggataagtcatccccagtgggaggctcttaaaggtcttggtggataagcttcaagcgtttaaccgggcaatgagggccgcgtgtctgtgggaaaacatcaaggcagctgttgcaattctgcccacaaagaatcccagctttggacattattttgttcaggtttagtcccagggaaggcaccactctggcacagtgcttgagatttttgggctggaaatccgcccggattccttcggcctgggtggatgttctttttcctgaaggagccagtagagacagctgttagataacaataggcaaagtggaagacagcatctaagctggtgttcagcccttgactctttctggtcttgtgggaagttgaaagagctgcagcgggagcccctaacccctgaggaagtacagtctgttcgagaacaccttggtcatgaaagtgacaacctgctgtttgttcagatcacaggcaaaaaaccaaactttgaagtgggttcttctaggcagcttaagctttccatcaccaagaagtcttctccttcagtgaaacctgctgtggaccctgctgctgccaagctggtggaccctctcagccaacgatatggaggacgacagcatgtgcatcttctgtggatgtagtttaactcaccgttggcctcttgagcatgtggtccaggttgaaacatgatggatcaacccaaaaggaggacaagggtggacacccttctttaccccctgnactcccaagtttccctctcgaagccctgnaagtcactttagcttttcaattaagcagaagacccacgacctgtatcactcattgctttgaacactctcccaggatctcattgactcagatgagctgctggatccagaagatttgaagaagccagatcccagccttctgcgggctgcttcttgtggggaagggaaaaagaggaaggcctgtaagaactgcacctgtggccttgctgaagaactggaaaaagagaagtcaagggaacagatgagctcccaacccaagtcagcttgtggaaactgctacctgggcgatgccttccgctgtgccagctgcccctaccttgggatgccagccttcaaacctgggggaaaaggtgcttctgagtgatagcaatcttcatgatgcctag

SEQ ID NO: 19566 - DNA, 678 bp, Homo sapiens
  SIMILAR (99)..(398): 401254mologous to Homo sapiens Cytochrome C Oxidase Polypeptide VIa-liver precursor (EC 1.9.3.1),accession number AL021546,Smith-Waterman Score=100.
  misc_feature (1)...(678): n = a,t,c or g
cccaagattttggcacgagggcgcttgcggcagtccagatcaaaaatggcggtagttggtggtgtcctccggtttctctggctgctggcgtcggtccccgcccacagctgggccggccctatgttcgagtggcgccccatggccaagtagcggctcagcttcgccatgtggaagactctcacccttctttcgtggcgcttcccccggggtgggcagtcaagcaatgctgaaatgtgtagcctgaagtccgcaccactggagagcacggagagaccccgagttcatcgcctacccccgatctccgccatcaggaccaagcccgtttccctgggggagatggtaaccatactcaacaatacataacccctcattgtgaatccactttccaacttggctaccgaagattgaataaaagaagaatcttggaccactaacccgggcaccaggggcacccaacaagcactggttttgggaccgtttactcttggcacattggacccagaaaaaaagtatatttggggacctttaagctcaccttcttttactttgtatcaaaatgattgacttggtatacttgggtctccccatcccttttgccttgttgggcaaggagattggcttaaataaataacttacccttaaaaaaaagagttctacaacnctgtctatggtctcgat

SEQ ID NO: 19567 - DNA, 450 bp, Homo sapiens; identical to SEQ ID NO: 5563
  SIMILAR (55)..(354): 941254mologous to Homo sapiens PTD009,accession number AF078862,Smith-Waterman Score=472.
  misc_feature (1)...(450): n = a,t,c or g

SEQ ID NO: 19568 - DNA, 2037 bp, Homo sapiens; identical to SEQ ID NO: 5565
  SIMILAR (31)..(387): 851254mologous to Homo sapiens 150 kDa oxygen-regulated protein ORP150,accession number U65785,Smith-Waterman Score=497.

SEQ ID NO: 19569 - DNA, 467 bp, Homo sapiens
  SIMILAR (334)..(465): 971254mologous to Homo sapiens TRAF2 binding protein encoded by clone 15,accession number W42401,Smith-Waterman Score=245.
ggaattcccgcgtcgacgatttcgtgccccaccccgaggggtcaggggtcagaggccgccggatggcgtaagatcggccgctggtggtggtgataccgggtacccgggctatggcgccggcgcagcgctgccctctgtgccgccagaccttcttctgtggtcgcgggcacgtttacagccgcaagcaccagcggcagctgaaggaggctttggagaggctcctgccccaggtgcggaggcaaggctagagatgggatgggagtgcggggcaggtcagtgaaggccagagcgggtgtgatttgggggtccccctcggggttctacttggcctctctgcggcaggtggaggcggcccgcaaggccatccgcgccgctcaggtggagcgctatgtgcccgaacacgagcgatgctgctggtgcctgtgctgcggctgtgaggtgcgggaacacctgagccatggaaacct

SEQ ID NO: 19570 - DNA, 742 bp, Homo sapiens
  SIMILAR (307)..(642): 671254mologous to Homo sapiens TRAF2 binding protein encoded by clone 15,accession number W42401,Smith-Waterman Score=349.
ttgggatacacctaccacattatccaaccgttccacccctaactagagaaaaagaaagccctgtcctacatagacttgtacacaaatccttcagaacagcttcacttgtagcagctcccaaattggaaacaattcagatgtctatcaacaggcaaatggattaacaatggaatagtattcccaggatgaagacagaattattgatacgtacgacacagatgaatctcagaagtccagacctggccggcgtggtggctcatgcctgtaatcccgacactttgggaggccaaggcgggcggatcacgaggtgccacacctccctggatgatccaagatgaagaatacattgctgggaaccaagaaataggaccatcctatgaagaatttcttaaagaaaaggaaaaacagaagttgaaaaaactccccccagaccgagttggggccaactttgatcacagctccaggaccagtgcaggctggctgccctcttttggccgcgtctggaataatggacgccgctggcagtccagacatcaattcaaaactgaagctgcagcaatgaagaagcagtcacatacagaaaaaagctaatcatgctctctaccaactaccatgaggctaaaagcaaagtcaacaaacccctattataccttccaccaaattctttatcattgtctttcttaggaaacagacatactcattcatttgatttaataaagttttatttttccaaatgtagaaa

SEQ ID NO: 19571 - DNA, 681 bp, Homo sapiens
  SIMILAR (187)..(675): 781254mologous to Homo sapiens TRAF2 binding protein encoded by clone 15,accession number W42401,Smith-Waterman Score=665.
tttcgtcgccggatggcgtaggatcggccgctggtggtggtgataccgggtacccgggcttatggcgccggcgcagcgctgccctctgtgccgccagaccttcttctgtggtcgcgggcacgtttacagccgcaagcaccagcggcagctgaaggaggctttggagaggctcctgccccaggtgcggaggtggaggcggcccgcaaggccatccgcgccgctcaggtggagcgctatgtgcccgaacacgagcgatgctgctggtgcctgtgctgcggctgtgaggtgcgggaacacctgagccatggaaacctgacggtgctgtacggggggctgctggagcatctggccagcccagagcacaagaaagcaaccaacaaattctggtgggagaacaaagctgaggtccagatgaaagagaagtttctggtcactccccaggattatgcgcgattcaagaaatccatggtgaaaggtttggattcctatgaagaaaaggaggataaagtgatcaaggagatggcagctcagatccgtgaggtggagcagagccgacagggaggtggttcggtctgtcttagagcctcaggcagtgccagacccagaagagggctcttcagcacctataagctggaaagggatgaacagccaagtagctttcagcttacagcagcccttaag

SEQ ID NO: 19572 - DNA, 4017 bp, Homo sapiens
  SIMILAR (1342)..(2190): 991254mologous to Homo sapiens 29-MAR-1991 New platelet factor 4 receptor superfamily member PF4ARii,accession number Q37107_cd1,Smith-Waterman Score=1468.
atgaagaagacagaagacaacaacgcacttgtgttcactgtgaatgttaaagccaacaagcaccagaagaagctctatgacactgatgtggccaaggtcaacaccctgattcggcctgatggagagaaggaacatgttcgactggctcctgattacaatgctttggatgttgccaacaaaatagggatcatctcaactgagtccatgggtcatgcagtgctggccatcaatggcatggacgtgaatggcaggtacacggccgacgggaaagaggtgctggagtatctgggtaaccctgctaattacccggtgtccattcgatttggccggccccgcctcacttctaatgagaagcttatgctggcctccatgttccactcgctctttgccatcggctcccagctgtctcctgaacagggaagctcaggcattgagatgctggagacagacacattcaaattgcactgctaccagacactgacaggtatgcatctccacggaggccagaggagtgtgatggagaaggtggagcgctatgtgcccgaacacgagcgatgctgctggtgcctgtgctgcggctgtgaggtgcgggaacacctgagccatggaaacctgacggtgctgtacggggggctgctggagcatctggccagaacagcttcacttgtagcagctccaaattggaaacaattcagatgtctatcaacaggcaaatggattaacaatggaatagtattccaggatgaagacagaattattgatacgtacgacacagatgaatctcagaagtccagacctggccggcgtggtgccacacctccctggatgatccaagatgaagaatacattgctgggaaccaagaaataggaccatcctatgaagaatttcttaaagaaaaggaaaaacagaagttgaaaaaactccccccagaccgagttggggccaactttgatcacagctccaggaccagtgcaggctggctgccctcttttggccgcgtctggaataatggacgccgctggcagtccagagctccagaaggggagagggaggtgccatggagtgaggagcagaccccagacccacacacttccaggagcctccgtatcccggctgaggtggcgccgcggagtaagcggcgctgtgtgctggagcggaagcagccgtacagtggggacgaatggtgctctggaccggacagtgaggaggacgacaagcccattggggccacccacagcaagcttcttcaaagagctgtctacactaactctagtgcctcaactcccagttacctctgcactcttacaggcagcttctgcctcctcaccctcccagggaagcttagggtcctgttctgggaactggacagattggacaactataacgacacctccctggtggaaaatcatctctgccctgccacagaggggcccctcatggcctccttcaaggccgtgttcgtgcccgtggcctacagcctcatcttcctcctgggcgtgatcggcaacgtcctggtgctggtgatcctggagcggcaccggcagacacgcagttccacggagaccttcctgttccacctggccgtggccgacctcctgctggtcttcatcttgccctttgccgtggccgagggctctgtgggctgggtcctggggaccttcctctgcaaaactgtgattgccctgcacaaagtcaacttctactgcagcagcctgctcctggcctgcatcgccgtggaccgctacctggccattgtccacgccgtccatgcctaccgccaccgccgcctcctctccatccacatcacctgtgggaccatctggctggtgggcttcctccttgccttgccagagattctcttcgccaaagtcagccaaggccatcacaacaactccctgccacgttgcaccttctcccaagagaaccaagcagaaacgcatgcctggttcacctcccgattcctctaccatgtggcgggattcctgctgcccatgctggtgatgggctggtgctacgtgggggtagtgcacaggttgcgccaggcccagcggcgccctcagcggcagaaggcagtcagggtggccatcctggtgacaagcatcttcttcctctgctggtcaccctaccacatcgtcatcttcctggacaccctggcgaggctgaaggccgtggacaatacctgcaagcttaaatgcctctctccccgtggccatcaccatgtgtgagttcctgggcctggcccactgctgcctcaaccccatgctctacactttcgccggcgtgaagttccgcagtgacctgtcgcggctcctgaccaagctgggctgtaccggccctgcctccctgtgccagctcttccctagctggcgcaggagcagtctctctgagtcagagaatgccacctctctcaccacgttctaggtcccagtgtccccttttattgctgcttttccttggggcaggcagtgatgctggatgctccttccaacaggagctgggatcctaagggctcaccgtggctaagagtgtcctaggagtatcctcatttggggtagctagaggaaccaacccccatttctagaacatccctgccagctcttctgccggccctggggctatgctggagcccagggagcggaaagcagctcaaaggcacagtgaaggctgtccttacccatctgacacccccctgggctgagagaacctcacgcacctcccatcctaatcatccaatgctcaagaaacaacttctacttctgcccttgccaacggagagcgcctgcccctcccagaacacactccatcagcttaggggctgctgacctccacagcttcccctctctcctcctgcccacctgtcaaacaaagccagaagctgagcaccaggggatgagtggaggttaaggctgaggaaaggccagctggcagcagagtgtggccttcggacaactcagtccctaaaaacacagacattctgccaggcccccaagcctgcagtcatcttgaccaagcaggaagctcagactggttgagttcaggtagctgcccctggctctgaccgaaacagcgctgggtccaccccatgtcaccggatcctgggtggtctgcaggcagggctgactctaggtgcccttggaggccagccagtgacctgaggaagcgtgaaggccgagaagcaagaaagaaacccgacagagggaagaaaagagctttctttccgaaccccaaggagggagatggatcaatcaaacccggctgtcccctccgcccaggcgagatggggtggggggagaactcctagggtggctgggtccaggggatgggaggttgtgggcattgatggggaaggaggctggcttgtcccctcctcactcccttcccataagctatagacccgaggaaactcagagtcggaacggagaaaggtggactggaaggggcccgtgggagtcatctcaaccatcccctccgttggcatcaccttaggcagggaagtgtaagaaacacactgaggcaggaactcccaggcccaggaagccgtgccctgcccccgtgaggatgtcactcagatggaaccgcaggaagctgctccgtgcttgtttgctcacctggggtgtgggaggcccgtccggcagttctgggtgctccctaccacctccccagcctttgatcaggtggggagtcagggacccctgcccttgtcccactcaagccaagcagccaagctccttgggaggccccactggggaaataacagctgtggctcacgtgagagtgtcttcacggcaggacaacgagaaagccctaagacgtcccttttttctctgagtatctcctcgcaagctgggtaatcgatggggagtctgaagcagatgcaaagaggcagaggatggattttgaattttctttttaataaaaaggcacctataaaacaggtcaatacagtacaggcagcacagagacccccggaacaagcctaaaaattgtttcaaaataaaaaccaagaagatgtcttc

SEQ ID NO: 19573 - DNA, 1388 bp, Homo sapiens
  SIMILAR (413)..(1105): 481254mologous to Homo sapiens PTD009,accession number AF078862,Smith-Waterman Score=309.
cggcccccattgacgccgcattagaggcctgaagtaccgggtcgacccacgcgtccgggcggaagacaggaagcggattctagttcccaagccgcaccgcctaaatactgccggagtctgcgctagttgtgacgcagtactatagcgctgttttcctgcactgataaacgaaaagcaatccaccaggtctcggcagctaactttccggcactacttatgcccgagcgtgtcgctcccagtgcgcaagtgcagcaggtggctgcacggagggcgcgggaggaggaggaggagaatgaggaggaggatggctgggtggggccggcggcaagtgctgtgatgcggttccggggaggggccgtcgggtagaggctgaataccagtttccgagcggcaaggcagcgattggcgattttttagtgtgtatgtggtgaacaaagctggcggcttgatttaccagttggacagctacgcgcccacgggcttgaggcttgagaaaactttcaagttatccgctggatcttgctggctcaagctaacacgatgagcgtgtgttggttgctttcggccagcggggacggcatcccgagtggggtcatgcagtgctgggccatcaatggcatgggacgtgaatggcaggtacacggccgacggggaaagaggtgctggagtatctggggtaacccctgcttaattacccggtgtccattcgattttggccggccccgcctcaacttctaatgaagaagcttatgctgggcctcccatgtttccactcgctctttgccatcgggctcccaagcttgtcttcctggaacaagggaagcctcaaggcatttgaagatccttggaagacaagacacattcaaatttgcactggctaccagacactgacaagggatcaagtttgtggttctaagcagatcctagggcaagctgggattagattctcttctccgaaagatttatgaggatttacttcagactttgccctcaagaatcccattctaattccttagaaatgcctatcaggtgtgagctctttgaccagaacctgaagctagctctggaggtggcagagaaggctggaacttttggacctgggtcataggctgaacctgttatggacctccaaattctgagagttcctgcaacaagaatactgctgttgacactccagtggaaatcccagcagccttgttagtgcacttgaaagtgggagaatgctgaccctgatgacttgtactgattcctgagccttaacactgtgctctttccttctgtatataccatggtcttactttccaactctgtacagatttatttatggaggagctaggtccataaatgttgtaataaatattcctttgatcttggtgtttgcaaaaaaa

SEQ ID NO: 19574 - DNA, 312 bp, Homo sapiens
  SIMILAR (248)..(9): 921254mologous to Homo sapiens unnamed protein product,accession number AK001510,Smith-Waterman Score=378.
ggcacgaggggagtcctcaaagttccatctgtgatttcttcggcagttggtattctcctttgtaataaattttgaaaaaatggggaccgtgcagaaataacagccttgtgggctttgagctcttcatctaaacagttctgatgtccaccaaaagcttcttccagttcagagtctgaagaaaagctaaggacgacatcgtaataacacatgtaatcaaagagtccacgcatatctacatcaagggaattcttcactaagctgaacaaggataacgacattttgaaaccctgagtcttccattccaaactctcc

SEQ ID NO: 19575 - DNA, 317 bp, Homo sapiens
  SIMILAR (167)..(3): 1001254mologous to Homo sapiens unnamed protein product,accession number AK001510,Smith-Waterman Score=303.
ttgtcttgtggtttctcatggccatggtcaaggctatacaactttgattcgcaaccatagccttgctgagaataggatgaggtccctataaaagtctgttgggcctgtgaatttccccctaccctcggggaacatgaatgaggataattagatgcattagcacccattttcttcagtcactcaggcattccgtctgcgggttcttcagagtataatcccagaggcctttatgaaccttcaaccctggatccagcagcctcttttcatccatttccggacaatctaacttccccctgggagtagcagtcctcaggcct

SEQ ID NO: 19576 - DNA, 389 bp, Homo sapiens
  SIMILAR (155)..(220): 651254mologous to Homo sapiens Human secreted protein, SEQ ID NO: 4518,accession number G00437,Smith-Waterman Score=64.
gatcaagagccttttgggcatagtgaaattttaaaaccttgaaaaataattagatatataaatgaatgtgttcccaggaaattaagatactatcttaaaaacttataagattctggtatgaaatacatgcttttttcccttgggctcacggggtcgtcttttgtgtagctcaggaattttgcttgcccactgttgttctccttccagttcctcgtctcctcattatgaaagacatggtcagacgactgcaggaactgcggcacacggagcaggtgcagagggcctatgccctgaactgcggggaaggcgccactgtcagctatgaaattcagattcgagtgctaagagagtttggtcttgcagatgctgctgcagagctgttgcagaat

SEQ ID NO: 19577 - DNA, 2257 bp, Homo sapiens
  SIMILAR (1042)..(1647): 921254mologous to Homo sapiens unnamed protein product,accession number AK001510,Smith-Waterman Score=952.
tttttttttttttaccaagcacgaataagtgtttccgttttatttaacacttaagcagaacatttttgactatacatctatataatgcacagtactaaaaaagtgcaaaatattcatcataaacatgaggaaagtgaataccacaatggttgcatcaactcaactaggcaattttgctcgttaacaaaaacacagctttttctgaaagttttttggacgttaacagctgttcaacatcatcttccatctaattccttctgaactgcttcaggttgcctagcacatatgcagctggtgttaagaaggtcgtaaaaaacaccacaagtccaacagccatttccgcggcagacaggggccgctggcgcgggggccccgagtgggcgaagcggggagcgggctgcaggccgagcagggccaagcggcggtagtggcggcgggcaggacagcgcccacgcaggagaggcatatcgcgtcaggggtatcttgttaaggaaaacttttcagtgtcttaaagattattttttaacctactacacaagtagcaaggtggtgcctgtaaaagtaccatgcagacaagtgcttacgatagacaagtgctcactgccaagaagcagccaccggaatgccaggactgtcagcaatgactttccgcggaagagttgttctcgagaaagatgcactcattgcatgcgaccacccgagggacgccggccgccgaacggaaacatgaattcgtggaaatggccatctggtgacgagtcaaaatggcggcgaggggaacctggagcagtcccggagcctgagccactgacaggagaggagagggcggcggcggcggcggtgggaggaggatggccgggggtgctggcgccggtgcggacggcggtgctggtggcggcggcggcggaggcgacggcagcggtcccagcggcagcagcagcggcgggaggagcctccgggcattgtaaccacccagttatgcaaggtagaaacctcagtcatcgtttccttcttcctctccaccattccccttaccagtttgggacctcatcctattctcagcaaggctatggttgcgaatcaaagttgtatagccttgaccatggccatgagaaaccacaagacaaaaaaaagagaacctctggtcttgccaccctcaaaaagaagtttattaagcgtcggaaatctaataggtctgccgatcatgccaagcagatgcgagaactcctctctgggtgggatgttagagatgtcaatgcattagtggaggaatatgagggaacatcagcattaaaggagctttctctacaagccagtttggctagaccagaagcccggacattgcagaaagatatggctgatctttatgagtacaagtattgtactgatgtagacttaatatttcaagaaacttgttttcctgttcatcgtgccattttggcagcaaggtgtccattttttaaaacactgctttcttcctcaccagagtatggggcagagataataatggacatcaatacagctggtattgatatgcccatgttttctgctttgttacactacctttatacaggagagtttgggaatgggaggactcaaggtttcaaaatgtcgatatccttgttcagcttagtgaaggaatttgggaacaccaaattcccttgatgtaggatatgcgtgggactcttttgattacatgtgttattatgatgtcgtccttagtttttcttcagactctgaactggttgaagcttttggtggaaatcagaactgtttagatgaagagctcaaagcccacaaggctgttatttctgcacggtccccattttttcgaaatttattacaaaggaggatacgaactggtgaagaaatcacagaccgaactttgaggactcccacaagaattatattagatgagtccattataccaaaaaaatatgcaacagtgatattacactgtatgtataccgacgtggtggacctctctgttttgcactgtagcccctctgtggggagtctcagtgaagttcaggctctcgtcgcagggaagccaaacatgaccagggcagaagaagccatggaactttaccacatagcactgttcttggaatttaacatgcttgcacaaggcagctgctgggaatgtattccaccaaatgacgaagcaaaccaagaacaaagaagtgaaggatctagaaaatgggctccaacacgggaaggaagcaaagggagatcccacgcatcagccacacagtag

SEQ ID NO: 19578 - DNA, 4042 bp, Homo sapiens
  SIMILAR (2333)..(4039): 991254mologous to Homo sapiens KIAA1525 protein,accession number AB040958,Smith-Waterman Score=2987.
atgatggctgggcctcaactcaccgcggcagacagggggcttggcgcgggggccccgagtgggcgaagcggggagcgggctgcaggccgagcagggccaagcggcggtagtggcggcgggcaggacagcgcccacgcaggagaggcatatcgcgtcaggggtatcttgttaaggaaaacttttcagtgtcttaaagattattttttaacctactacacaagtagcaaggtggtgcctgtaaaagtaccatgcagacaagtgcttacgatagacaagtgctcactgccaagaagcagccaccggaatgccaggactgtcagcaatgactttccgcggaagagttgttctcgagaaagatgcactcattgcatgcgaccacccgagggacgccggccgccgaacggaaacatgaattcgtggaaatggccatctggtgacgagtcaaaatggcggcgaggggaacctggagcagtcccggagcctgagccactgacaggagaggagagggcggcggcggcggcggtgggaggaggatggccgggggtgctggcgccggtgcggacggcggtgctggtggcggcggcggcggaggcgacggcagcggtcccagcggcagcagcagcggcgggaggagcctccgggcattgtaaccacccagttatgcaaggtagaaacctcagtcatcgtttccttcttcctctccaccattccccttaccagtttgggacctcatcctattctcagcaaggctatggttgcgaatcaaagttgtatagccttgaccatggccatgagaaaccacaagacaaaaaaaagagaacctctggtcttgccaccctcaaaaagaagtttattaagcgtcggaaatctaataggtctgccgatcatgccaagcagatgcgagaactcctctctgggtgggatgttagagatgtcaatgcattagtggaggaatatgagggaacatcagcattaaaggagctttctctacaagccagtttggctagaccagaagcccggacattgcagaaagatatggctgatctttatgagtacaagtattgtactgatgtagacttaatatttcaagaaacttgttttcctgttcatcgtgccattttggcagcaaggtgtccattttttaaaacactgctttcttcctcaccagagtatggggcagagataataatggacatcaatacagctggtattgatatgcccatgttttctgctttgttacactacctttatacaggagagtttggaatggaggactcaaggtttcaaaatgtcgatatccttgttcagcttagtgaagaatttggaacaccaaattcccttgatgtagatatgcgtggactctttgattacatgtgttattatgatgtcgtccttagtttttcttcagactctgaactggttgaagcttttggtggaaatcagaactgtttagatgaagagctcaaagcccacaaggctgttatttctgcacggtccccattttttcgaaatttattacaaaggaggatacgaactggtgaagaaatcacagaccgaactttgaggactcccacaagaattatattagatgagtccattataccaaaaaaatatgcaacagtgatattacactgtatgtataccgacgtggtggacctctctgttttgcactgtagcccctctgtggggagtctcagtgaagttcaggctctcgtcgcagggaagccaaacatgaccagggcagaagaagccatggaactttaccacatagcactgttcttggaatttaacatgcttgcacaaggctgtgaggatatcattgctgagagcatctcattagataccttaattgccatcctcaagtggagttctcatccatatggctctaaatgggtgcaccgacaagctttacatttcctctgtgaggaattttcccaggtcatgacttcggatgttttttatgaactcagcaaagaccatctgcttactgctatccagtctgactacctacaggcaagtgaacaagatatccttaaatatctgattaaatggggagagcatcagttgatgaaaagaatagcagatagagagccaaacttactgagtggcactgcccatagtgtgaacaaaagaggtgtaaaaagacgggacctggacatggaagagctcagagagatcctttcttctctcttaccttttgtgcgaattgaacacatcttacctataaacagtgaagtcttaagtgatgcaatgaaaagaggcttgattagtactcctccatcagatatgcttcctacaacagaaggtgggaagtcaaatgcctggttacggcaaaaaaaatgctggcatctatgttcgtcctcgactcttctctccctatgtggaagaagcaaagtcagtgctagatgagatgatggtggaacaaacggttcttgtgcgcttgcgaatggttagaatgtccaatgtgccagacacgctctacatggtcaataatgccgtgccacagtgttgtcacatgatcagccaccagcagatcagcagcaaccagtcaagccctccttcagttgtagccaacgaaattccagttcctcgtctcctcattatgaaagacatggtcagacgactgcaggaactgcggcacacggagcaggtgcagagggcctatgccctgaactgcggggaaggcgccactgtcagctatgaaattcagattcgagtgctaagagagtttggtcttgcagatgctgctgcagagctgttgcagaatcctcacaaattctttcctgatgaacgttttggggatgaaagtccactcttgacaatgagacagcctgggagatgtcgcgtaaacagtacacctcctgcagaaaccatgtttacagatctggactcttttgtggccttccatccacccttgccccctccaccacctccctaccaccccccagctaccccaatccataaccaactcaaagcaggctggaagcaaagacctcccagtcagcacccttcacgttcattttcttatccctgtaatcattcgctgttccactccagaacagctcctaaagctggccctcccccagtctacttgccgagtgtgaaagctgcaccgcctgattgtaccagcactgcaggactgggcagacagacggtggctgctgctgccgccaccaccacctcaacagcaacagcagcagcagcagcagcatctgagaagcaagtgcgaacacaacctgtgctgaatgatctgatgccagacatcgcggtgggtgtgtccacactgtcactcaaggacaggaggcttccagagcttgctgtagacacagaattaagccagtcagtttctgaagcaggaccagggcctccccagcatctgtcgtgtattccacagagacatacacacacttctcggaaaaaacacacactagagcaaaaaacagacaccagagaaaatccacaggaatatccggatttctatgacttctcaaatgctgcttgcagaccttctactcctgctctcagcagacgcaccccttccccttcgcaaggtggatattttggtcccgatctgtacagccacaataaggcatcaccaagtggcttaaagtcagcctacctacctggtcagacgtctcctaaaaaacaggaagaagctaggagagaatatccactttcccctgacgggcatctacacagacaaaagaatgagccgatacacctggatgtcgttgagcaacctccccagcggtcagactttcctttggcagccccagaaaatgctagtaccggtccagcccatgtcaggggacgaactgcagtagaaactgacttgacttttgggctgactcctaacagaccttcactttctgcatgtagctctgaagctcccgaagagagatccggtagaagactggcagacagtgagtccctgggccatggagctcagagaaatacagatttggaaagggaagattcaataagcagaggaaggaggtcaccaagcaagccggacttcctctacaaaaagtctgccctctga

SEQ ID NO: 19579 - DNA, 2157 bp, Homo sapiens
  SIMILAR (949)..(2028): 1001254mologous to Homo sapiens unnamed protein product,accession number AK001510,Smith-Waterman Score=1854.
atggaatactatgcagccatgaaaacaaaggagatcatgtcctttgcactaacatggatagagctggaggccatcgtcctatgtgaattaacacacgtcctaagtgaattaatgcagaagcagaaaaccaaataccacatgctctctcttgggtctccggttccaaccttcgcactctggaacttcgatgtggcccaggatttccaccattttatcgaaaacgctagatcttcgcagtgccgaggacgtccgaggatgacaggggctggcgcgggggccccgagtgggcgaagcggggagcgggctgcaggccgagcagggccaagcggcggtagtggcggcgggcaggacagcgcccacgcaggagaggcatatcgcgtcaggggtatcttgttaaggaaaacttttcagtgtcttaaagattattttttaacctactacacaagtagcaaggtggtgcctgtaaaagtaccatgcagacaagtgcttacgatagacaagtgctcactgccaagaagcagccaccggaatgccaggactgtcagcaatgactttccgcggaagagttgttctcgagaaagatgcactcattgcatgcgaccacccgagggacgccggccgccgaacggaaacatgaattcgtggaaatggccatctggtgacgagtcaaaatggcggcgaggggaacctggagcagtcccggagcctgagccactgacaggagaggagagggcggcggcggcggcggtgggaggaggatggccgggggtgctggcgccggtgcggacggcggtgctggtggcggcggcggcggaggcgacggcagcggtcccagcggcagcagcagcggcgggaggagcctccgggcattgtaaccacccagttatgcaaggtagaaacctcagtcatcgtttccttcttcctctccaccattccccttaccagtttgggacctcatcctattctcagcaaggctatggttgcgaatcaaagttgtatagccttgaccatggccatgagaaaccacaagacaaaaaaaagagaacctctggtcttgccaccctcaaaaagaagtttattaagcgtcggaaatctaataggtctgccgatcatgccaagcagatgcgagaactcctctctgggtgggatgttagagatgtcaatgcattagtggaggaatatgagggaacatcagcattaaaggagctttctctacaagccagtttggctagaccagaagcccggacattgcagaaagatatggctgatctttatgagtacaagtattgtactgatgtagacttaatatttcaagaaacttgttttcctgttcatcgtgccattttggcagcaaggtgtccattttttaaaacactgctttcttcctcaccagagtatggggcagagataataatggacatcaatacagctggtattgatatgcccatgttttctgctttgttacactacctttatacaggagagtttggaatggaggactcaaggtttcaaaatgtcgatatccttgttcagcttagtgaagaatttggaacaccaaattcccttgatgtagatatgcgtggactctttgattacatgtgttattatgatgtcgtccttagtttttcttcagactctgaactggttgaagcttttggtggaaatcagaactgtttagatgaagagctcaaagcccacaaggctgttatttctgcacggtccccattttttcgaaatttattacaaaggaggatacgaactggtgaagaaatcacagaccgaactttgaggactcccacaagaattatattagatgagtccattataccaaaaaaatatgcaacagtgatattacactgtatgtataccgacgtggtggacctctctgttttgcactgtagcccctctgtggggagtctcagtgaagttcaggctctcgtcgcagggaagccaaacatgaccagggcagaagaagccatggaactttaccacatagcactgttcttggaatttaacatgcttgcacaaggcagctgctgggaatgtattccaccaaatgacgaagcaaaccaagaacaaagaagtgaaggatctagaaaatgggctccaacacgggaaggaagcaaagggagatcccacgcatcagccacacagtag

SEQ ID NO: 19580 - DNA, 238 bp, Homo sapiens
  SIMILAR (1)..(162): 931254mologous to Homo sapiens Amino acid sequence of a human phosphorylation effector PHSP-2,accession number Y68770,Smith- Waterman Score=267.
agccggaaaatccagggactcctgaagtcatgtgggaaacctgtcgaggagctgctggcaaagcttcaaggcctccacaggcagcccggcctccgccagccaagcccctcccacgacggcagcctcagccccctccaggaccgggcccggactgctcacccctgaccctcttgcactctccctgccccccggacgccgcccagcttgcttgtgtataagttgtatttaatggttctgt

SEQ ID NO: 19581 - DNA, 210 bp, Homo sapiens
  SIMILAR (1)..(207): 861254mologous to Homo sapiens Amino acid sequence of a human phosphorylation effector PHSP-2,accession number Y68770,Smith- Waterman Score=324.
gaggcagacatgcccgatgagatcaacattgatgaattgttggagttagagagtgaagaggagagaagccggaaaatccaggacttcatccaggagctgctggcaaagcttcaaggcctccacaggcagcccggcctccgccagccaagcccctcccacgacggcagcctcagccccctccaggaccgggcccggactgctcacccctga

SEQ ID NO: 19582 - DNA, 601 bp, Homo sapiens
  SIMILAR (30)..(503): 441254mologous to Homo sapiens Amino acid sequence of a human phosphorylation effector PHSP-2,accession number Y68770,Smith- Waterman Score=233.
cccacgcgtccgggccaggctgggtccagcagcgcgatggcagctcagcggctggcaaagcgcgtgctggagcaagctgcagtctccatcgcgggcccgcgggcatgcgcgggcagtcccggggggctgcagaaagcggccacgcgcgcgtcaccgtcaagtatgaccggccggggagcttgcagcggcggctggacgtggagaagtggatcgacggaccactggagggactgtaccgcagacatggaggcagacaatgcccatgagatcaaacattgatgaattgttggagtttagagagtgaagaaggagagaagccggaaaatccagggggttttagggactcctgaaagtcatgtgggaaacctgtcgaggacttcatcccaggagctgctggcaaagcttcaaggcctccacaggcagctccggcctccgccagccaagcccctcccacgacggcagcctcagccccctccagggaccgggcccggactgcttcacccctgaccctcttggcacttttccctggccccccggaacgccgcccagctttgctttgtgtattaagttgtatttaaattggttctgttaacaattaaaa

SEQ ID NO: 19583 - DNA, 256 bp, Homo sapiens
  SIMILAR (2)..(109): 1001254mologous to Homo sapiens leucine-zipper protein,accession number AB021663,Smith-Waterman Score=203.
accaccctccccgccgccactaccaccaccaccactaccaccagccccctccctccccctgtccctcccctcctttgacctcccccagccccctgtcttggatactctgggtgttcattttagctctgcagaaaaaaaatcagtgtttcgtgaaggtgttggagaggggctgtgtctgggtgagggatggcggggtactgatttttttgggaggttatgagcaaaaataaaacgaaacatttcctctgaaaaaaaa

SEQ ID NO: 19584 - DNA, 420 bp, Homo sapiens
  SIMILAR (8)..(307): 1001254mologous to Homo sapiens leucine-zipper protein,accession number AB021663,Smith-Waterman Score=523.
  misc_feature (1)...(420): n = a,t,c or g
tttcgtgccacagcagccccctcctccttctccacctcaaccttctcgcctggccccctacccacatcctgccaccacccgaggggaccgcaagcaaaagaagagagaccagaacaagtcggcggctctgaggtaccgccagcggaagcgggcagagggtgaggccctggagggcgagtgccaggggctggaggcacggaatcgcgagctgaaggaacgggcagagtccgtggagcgcgagatccagtacgtcaaggacctgctcatcgaggtttacaaggcccggagccagaggacccgtagctgctagaagggcaggggtgtggcttctaggggctggtcttcagctctggcgccttcatccccctgcctctaccttcattccaaacccctctcnnnnnnnnnnnnnnnnnnnnnntt

SEQ ID NO: 19585 - DNA, 1609 bp, Homo sapiens
  SIMILAR (7)..(687): 711254mologous to Homo sapiens leucine-zipper protein,accession number AB021663,Smith-Waterman Score=743.
  misc_feature (1)...(1609): n = a,t,c or g
ctgacctggatgactgagcgagttgatttcacagctctcctccctctggagcctcccctaccccccggcaccctcccccaaccttccccaaccccacctgacctggaagctatggcctccctcctcaagaaggagctggaacagatggaagacttcttcctagatgccccgctcctcccaccaccctccccgccgccactaccaccaccaccactaccaccagccccctccctccccctgtccctcccctcctttgacctcccccagccccctgtcttggatactctggacttgctggccatctactgccgcaacgaggccgggcaggagggaagtgggggatgccgcctctgcccccgccacagcaggccccctccttccttcttccaccttcaaccttctcgctggggccccctaacccacattcctggccaacccacccgagggggacccgcaaagcaaaaagaagagagacccagaaacaagtcggcggctctgaaggtaacccccagcggaaagcgggcaagagggtgaagcccctggagggcgaagtcccaggggctggaaggcacggaattcgcgagcttgaaggaacgggcaagagtccgtggagcgcgagatccaagtacgtcaaggaccatgctcatcgaggtttacaaggcccggagccagaggacccgtagctgctagaagggcaggggtgtggcttctaggggctggtcttcagctctggcgccttcatccccctgcctctaccttcattccaaacccctctcggccgggtgcagtggcttatgcttgtaatcccagcactttgggaggccaagggcaggaggatcgtttgaggcccaggaggtcaactaccagcccgggcaaccatagtaagaccctggctctattaaaaaaaaaaaatcaacccttcttccccaccaaaccacccaactcctctctactcttatccgttttatcctctgtctctccttatcacctctcttccgttatttctggatctccttccctcctttctcgtccaaatcatgaaaatgtttgggccttaggtcaatgtcttatgccccgtcacataaccacccgaggcacccgaggccccaccagagaagccagctggggagcttgggaaacctgggtctcttgaattttcaaacctgggtttctttacaggtggtttgtcctggggtggggtgggagtggcccgaacagggataagaancctgaaagggacctatgccaaatgaggaaagtaaagtccagggcggggcttttgagaagggggacccccatatcccctacaggcaaaaaagcaggcctagggtgacccttgggaacacctacgcctaagggagggaggcctaaaggcggccccaggtttgcagtgcgggaagatgagcaggccagtgggaggaggggcagggcagggctgtagttggtgactgggtgttcattttagctctaagaaaaaaaaatcagtgtttcgtgaaggtgttggagaggggctgtgtctgggtgagggatggcggggtactgatttttttgggaggttatgagcaaaaataaaacgaaacatattcctctggaaaaaaaaaaaaaaaaa

SEQ ID NO: 19586 - DNA, 2446 bp, Homo sapiens
  SIMILAR (347)..(826): 951254mologous to Homo sapiens dJ1103G7.7 (PUTATIVE novel protein),accession number AL034548,Smith-Waterman Score=869.
cggccgccatggcgaccccggccaggcccggcgaggccgaggacgcggccgagcggcccctccaggatgagccggcggcggcggcggcaggcccgggcaagggtcgcttcctcgtccgcatctgtttccagggagacgagggcgcctgcccgacccgggacttcgtggtaggagcgcttatcctgcgctccatcggcatggacccgagcgacatctacgcggtcatccagatcccgggcagccgcgaattcgacgtgagcttccgctcagcggagaagctggccctgttcctacgcgtctacgaggagaagcgggagcaggaggactgctgggagacttttggtggtgctgggggcgaggcaagtccagcttgaagacgctcttcatcctcttccggaacgagacggtggacgtggaggacattgtgacttggctcaagcgccactgcgacgtgctggccgtgccggtgaaagtgaccgacaggttttggatctggaccggggagtacaaatgcgagatcgagctgcgccagggggagggcggggtcaggcacttgccaggggccttcttcctgggggccgagaggggctacagctggtacaaggggcagcccaagacatgctttaaatgtggttcccggacccacatgagcggcagctgcacgcaggacaggtgcttcaggtgcggggaggaggggcacctgagcccttactgccggaagggcatcgtgtgcaacctctgtggcaagcgaggacacgcctttgcccagtgtcccaaagcagtgcacaattccgtggcagctcagctaaccggcgtggccgggcacctaaacacccggctgcctgccagggtgaacacacaagccagcttatccctcttaaagtgcccaaaactttttttttaaaaccattttttatcgtttttgaaggagatctttttaaaacctacaagagacatctctctatgccttcttaaaccgagtttactccatttcagcctgttctgaattgggtgactctgtcacaattaacggactgcgggagaactgtagcgtgcagatgtgttgcccctcccttttaaaattttattttcgcttttctattgggtattcgttttgattcttgtactttttctctctctccttgcccccctcccgccctccccgccccataccttttcttcccctggaattttcaccctttgggcctgccttgctcatctttatgccccagcactaggtacggggcccaacacgtggtaggcactccatacagtgtttgactgaattgaaaacattgttgactgtggcttctatcagagtgtctaccttttgcagctctttcccctccctcatttaatttggctgcttttaatctacgtgggtctgaggaatttgtgaaaccagtgttgttaggaagtgtatataatctggaatcaatgaagctctggaatgggtgggccaagggcttcttcttatgggcacaaaggatggcatgggactttcatggacagctcttttgggtgggctcagaaggccatttttttatagaatcatcggaatctagaatattcctgctggaaagaacctgagagttggtttggaccaattccctggttttccaggcagatgaaacagggcccaaagaggttaaattgacttgggtgaaaatcacatatgcttgtctggtgcccagagccaagcctatagtagacgtcccctgaccccaaagccctggtgctcattccactacctcgtcacacgttcacaacaatttcctcaaccacttgagggcccagaaagtcttgatctctccagaatgatcagcccagaggaatgctgagaaatcacctggaggagggagcagaaagagaaggtttttaaggaggggcttctgaatacttggggagatacggaacggaccagggacccacactccaggggtgcattcgttgctccctggggggcaccactttctgggattaccagtgtgcccaggtccctttgggaggcccttaccccttcccccattccattgcccacccagtgagaaaatggggggtggcccctgtgttaaaggaaacctaccgaaaggttttacatttgtcacctttaggcctcaattagctacgaaccttaggagaaggcagcctagcttggagctcattgtgcaacttcctgatttttcaggagaaagatgggattttaaacccaaaatttatggagtgagttgtttaactcttaaaatgtacttggggagatagggccaagcggagaggtcatgggccaacttaagtgttatccgagtagaaaagacagtacactgcttttcttttaagtgtttgccttttcctttgctatatgttttgctatttccttgtggcttagaatgtacccattgattgttaaaagttttgttctgaataaatatttatcttttgtattgct

SEQ ID NO: 19587 - DNA, 2331 bp, Homo sapiens
  SIMILAR (1627)..(1983): 621254mologous to Homo sapiens Fragment of human secreted protein encoded by gene 81,accession number W78324,Smith-Waterman Score=317.
atggcggcggccgcggttgcggcggctccgggacgagctcccgagccagccgggaggacacttactacagctgctcagaagcaccactggaaactcagacatctgttttcctccatgattgtggaaaagttcacccaggattatctgtggctttcaattgcaactcggcatccctggaaccagtttacaagggtccaacggctgtcttgctgcatgacactgctactctgcaacatggtcatcaatgttatgttctggaagataaacagcaccactgccaagagagatgagcaaatgcgtccatttgctgtggcctggtctgaactgctggtcagcatccatactgctgtcatcctcttcccaatcaatcttgtcatagggcggctcttcccgttgattgagccacaggagactctgcccctctttcctcccatccaggcctcctgcctctcagatgcttctgttgagcctctctctgccacaatggtagttgagggttgtcagctgaaacagcagaagtggaggttcttcactgggaaaagaaacattctggacacaagtataatcctcattagcttcatcctcctggggcttgacatgaagagtatttctctacataagaaaaacatggcacgataccgcgatgaccaggacagattcatcagcttctatgaggcagtaaaagtgaactctgctgcgactcaccttgtgggcttcccggttctcctggcaactgttcagttatggaacctgctgcgtcatagccccaggctgcgggtcatcagcaggacactgagccgagcctgggacgaggtggtgggctttctgctgatcatcctaatcctgctgacaggctatgccattgcctttaacctgctgtttggatgcagcatctctgactaccggacatttttcagctcagcagtgactgttgttggtctcctgatgggaatttctcaccaagaggaggtcatagatgagatagcagggaacttcagcagagcagttcatggtttgcaagctcttaacaaactacaggaagcttgtgagttcctccagaaactaacagccttaaccccaagattttctaagccagctcagataacaggactagctttcaatcccttcaaggatttggacaacagaaacattgttggaagcattggaagtgtgttactaagcgctaatcgtaaattgctccaagtccatgatttaatggaggacattgagatcatgctctggagaaatgttagcttggaaacccatcccaccagcctcaacatgagcacacatcagcttacaatcacagtgaacgtcacttccttggagaaatccttgatagtgagcatagatcctgacagtccccttttaatgacactctacctggggttccagtatcagcctaactgcactcacttccacctgaacatcacccttccaaaggataaggtgtggcaaaaagtcctccagtgtaccctgctggaattctgcttgtgtgcaacaactgtgctgcctaccgtaaactgctggaagcccagactcccagtgtacgcaagtgggctctacgtcgacagaatgagcctttggaagtacggctgcagcggctggaacgagagcgcacggcccaagaagagccggcgggacaatgagacccccgaggagcgggaggagacagacgagcagcgggcacgccggctgcagcgggatcgggaggccatgaggctgaagcgggccaatgaaaccccggaaaagcggcaggcccggctcatccgagagcgagaggccaagcggctcaagaggaggctggagaaaatggacatcgatgttgcgagctcagtttggccaggacccttctgccatggcagccttagcagctgaaatgaacttcttccaactgcctgtaaaatggggtggagttggaacagccagcttctgggcaagatggcctttgaaagagcagaacagcagctctctgcactgaaccacaccctcctgcctgcccctctttccccacctacctaccccacccacccacaccccacagccacgaggaccagtgctgctgccacccacgaggccctgtcctctgctgccagaggcaggcctgggtttattgcaggtggacctgagcagcccttgcatatgggaacaggatgatggggtcaggagggacctggctcaaggcagctctggacaagggagcaggcagtccagagaactggcctccccagcccacttccacaaggttgtgcttctaggactgtggggcccctgtgtggcccaatgaagttgtgaagtcaaataaattaattttatctttaaaaaaaaaaa

SEQ ID NO: 19588 - DNA, 2805 bp, Homo sapiens
  SIMILAR (13)..(1875): 1001254mologous to Homo sapiens ELL,accession number U16282,Smith-Waterman Score=3240.
gatggtcgcaagatggcggcgctgaaggaggataggagctacgggctgtcgtgcgggcgggttagcgacggcagcaaggtgtcggtgttccacgtgaagctcaccgacagtgccctgagggccttcgagagctaccgcgccagacaggattctgtttcactgaggccatctatccgatttcaaggaagccaagggcacatctccatcccccagcctgactgccccgcagaggcgcggacgttctccttctacctctccaacatcggccgcgacaacccccagggcagcttcgactgcatccagcagtatgtctccagtcatggggaagttcacctggactgcctgggcagcatacaggacaagatcacggtgtgtgccaccgacgactcctaccagaaggcgcggcagagcatggcccaggcggaggaggagacgcggagccgaagtgccattgtcatcaaggctggaggccgctacctgggcaagaaggttcagtttcggaaaccagccccaggtgcaacagacgcggtgccctcccggaagcgggcaacccccatcaacttggcgagtgccatcaggaagagtggtgccagtgccgtgagtgggggcagcggggtgtcccagaggcccttccgtgaccgagtgctgcacctcctggcactacggccctaccgcaaggctgagctgctgctgcgactgcagaaggacggcctgacgcaggcggacaaggacgcgctggatggcctcctccagcaggtggccaacatgagtgctaaggacggcacgtgtacactgcaggactgcatgtacaaggatgtgcagaaggactggcctggctactcggagggggaccagcagctgctgaagcgggtgctcgtccggaagctgtgccagccacagagcactggcagcctccttggagaccctgctgcctccagccccccaggcgagcgtgggcgctcggcctcgcccccacagaagcggctgcagcctcctgatttcatcgaccccctagccaacaagaaaccccggatatcgcacttcactcagagagctcagcctgccgtcaacgggaagctgggcgtgcccaatggccgtgaggccttgctgcccaccccgggcccaccagccagcacggacaccctcagctccagcactcacctgcccccgcggctggagcccccgagggcccacgaccccctggccgatgtcagcaatgacctgggccacagcggccgagactgtgagcacggagaggcggctgccccagcccccactgtgcgcctcggcctgcccctgctgacggactgtgcccagcccagcaggccacacggcagcccctcgcgcagcaagcccaagaagaagtccaagaagcacaaagacaaggagagggcggctgaggacaagccccgggcccagcttccagactgtgcacctgccacccatgccacccccggagccccagcagacaccccaggtttaaacggaacctgcagcgtttccagtgttcccacgtccacgtcggagacgcctgactacttgctgaagtacgcagccatctcctcttcggagcagcgccagagctacaagaacgacttcaatgccgagtacagcgagtaccgcgacctgcacgcccgcattgagcgcatcacgcggcggttcacccagctcgacgcccagctccggcagctctcccagggctccgaggagtatgagactactcgagggcagattttgcaggaatatcgaaaaatcaaaaagaccaacaccaactacagccaggagaagcaccgctgcgagtacctgcacagcaagctggcccacatcaagaggctcatcgccgagtacgaccagcggcagctgcaggcttggccctagccgccctccccgatggcggggatctgggagggtcgggggagcaaaaggcggtgagagaggatttatttaaaaaaataaacccgaggaagatgctcatctgagccagcaccgccggctttcagggcagcccctgcagacgtctggccctggcgggtggctgcaagcccacctcggccctccctgcgcttcctgagcagtccctgcttatgatgggctccccaggaagcccactgcctcctccctggctgcagcctccggggttcagcctcctgtctcgccagaagactcctaggcccttggggtggcgcgcctgccttttctagttttatacaaagacagccacttttagctactgctaatgagacttgagtctatttttgtacaaaagagaagcaaaatcttttttctaaacctgtgcctccctctcctcggacacccagggtctagccgctgccctgggtcctgcctgcagtattacagaggtcgtcgaaaggtgcagctgcgttctgagggcgtggggaatgggcaggtggcctctgctggtctctggctctacgtttaggcacccctttccccagcctctcctccttgggcagggtctctgctccagcaagcaaacagggtggcccaggtggctattttgagaactccagctggtgcccccagacagctgctcagagccaagggggcagagggctttcagcgcccccaggcctgccctgctatttcaggccctcagctgtcgggggccactgtgtttctgtgctccaagttgagactcggccgcagcggcgtcagacttttctttgcgatgtcctcggtttcccatttgttgctgctgctgctcattccacactgttgagaccttgtggtctcgatgctgctggcctccctccgtccctctgtccacttgtgggtcctggggtc

SEQ ID NO: 19589 - DNA, 1209 bp, Homo sapiens
  SIMILAR (661)..(1002): 511254mologous to Homo sapiens MEN chimeric transcription factor=MEN {translocation junction point},accession number S77890,Smith-Waterman Score=230.
atgagtgctaaggacggcacgtgtacactgcaggactgcatgtacaaggatgtgcagaaggactggcctggctactcggagggggaccagcagctgctgaagcgggtgctcgtccgcgcacacaacacccagcgccagagacaaaacgaacgaagcgacactcgtccttgccaacgcgccgccccccgacgtttctcacacggcacccggaggggcacgttacctctggccagtcccgaccgggcccgggccccacggacgggacactgtcggacccaaaggcgcctggaccgaactggcgggggcttcccccctctgacaggagcttgggcgatgctggctgactggatccatgaaggaacaccatccagggggcgttccgacaacgatgagcccagtgcaggctctgtgggaggcttgcggcagcatggcccaggaccaagagccccaaagctaacaaccactaaagtgaaagcactggccagcccggtgctgggccaaaaaattgcagccctgtgcttggggcttacagcccagggcctcaacatcatggacaacccgggctccctggccatacatgtccacccggactcagtgttgaccaggaagaccaacccctgcacccacatctggggtttcactcagagggaaccccctctggtggccaacatgagtgctaaggacggcacgtgtacactgcaggactgcatgtacaaggatgtgcagaaggactggcctggctactcggagggggaccagcagctgctgaagcgggtgctcgtccgtcctgccaggaagtctcaaggaggattcctgaatagcgtttcccaatcatttgtgctttactggaaagggggggcctgttgtggggaggccaccgtccagggctcttcccgggacttcaccttccctctgctggaccacacgccgtggcttggcaggctctccccagagggcaaagcactacttgagtctggagaggcctgtcggaagacccggggaaaggcaaaaccaaagagacagaaagccgaccagcaggtgtccagggctggaggtgggagtggggagtggctgcagccgggcgagggtagagggtcaaaactcacaagatgggacgttttacaggatgttcgctacaccttcccaactgcccttgagctcacaggggccgtctttgttgactcagggcacaggagcaacattctctga

SEQ ID NO: 19590 - DNA, 2275 bp, Homo sapiens
  SIMILAR (1391)..(1972): 631254mologous to Homo sapiens p40,accession number U93570,Smith-Waterman Score=594.
atgaggggcagtgttcaaatgttcacaaatgggaagggagctgagcaccatccttcattcctgcaagcgtggccatcattggccttgcaagccctgacctggctgtctacagccttgccagcatgggtcatgcttcttacatgcatgggcaatctacacccagggatcttgtttgttgctcctttcattgatatgtcatcagcaagcacctctgcagaggccaggacacagggagaagacgccatctatgaaccaggaaacgggtcctcaccagacactgaatctgctggttctctgctcttggactctctggcctccagaactttttcgggcaaacccctacctctgccttctctggtgtctgcgacccaggatctgaccactgacgttacccctgcagcctggctgcagagactcaaagtggaccaacgatcaacgtcaccagaaattttactctacctgttgggaaagggggatctttttctgctagagtttctaagttgctatagtggatgcctccagtgtatgtcaatttgtagcaggatgagccgcagacaaaactcctcagacaccgagttaaagaaggaaggggtttattcagctgggggcattggcaagactcctgtctccaagagccaagctccccgagctgtgataaatgagagcccaattccagcatctattgctgagatgttctccagcagtctgggaaaatgtctgcagcatttcctggtgtctttccctcacaacgtctccaagccttcccctaagttagctttaggggttgggaaaaacaaagtactgtcccttggtctgggttgcttggatccccagtggaaaatactcattgtcatagtgaatggctttctgtgtggcaagcaacaggtcctagaccaaactcctggtgtttcattagcatttccaaagatagctgaaagagatagcacctgggggaaaggccagctgtggggcagcttcagcagacttaaacgttcctgcctgtcggttctgaagatagcagtggatcccccagcacagtgctcaagctctgctaagggacagactgccttctcaagtgggtccctgatccccatgcctcctgactgggggacacctcccagcagacacctcatacagaagagctcccgctggcatctggcaagtgcccctctgggacgaagcttcccagaggaaggaaaaggcagcaatctttgctgttctgcagcctccactggtgaggcaaacagccaggcaaacagggtctggagtggaccttcagcaaactccagcagacctgcagtcgaggggcctgactgttagaaggaaaattaacaaacagaaaggaatagtatcaacatcaacaaaaaaaaatgtccacacaaaaaccccatccgaaggatcacaactcctcaccagcaagggaacaaacagtatggagaataagtttcacgaattgacagaagtaggcttcagaaaaataaccagtttagagaagaacataaatgacctgatggagctgaaaaacacagcacgagaacttcgtgaagcatacacaagtatcaagagcagaattgatcaggcgaaagaaagcatatcagagattgaagatcagcttaatgaaataaaatgtgaagacaaggttagagaaaaaagaatgaaaagcaacaaacaaaacttccaagaaatatgggactatgtgaaaagaccaaacctacgtttgactggtgtacctgaaagtgacagggagaatggaaccaagttggaaaacactcttcaggagattatccaggagaacttccccaacctagcaagacaggccaacattcaaattcaggaaatacagagaacagcacaaagacaatcctcgagtagagcaaccccaatacacataatcgtcagattcgccaagtttgaaataaaggaaaaaatgttaagggcagccagagagaaagacatatcaatgagacagaaaattaacaaggatattcaggactttaacacagttctggaccaagtggacctaatacacgtctatagaactgtccaccccaaatcatcagaatatacattcttctcagcaccacatcatacttattgtaaaactggccacataattggaagtaaaacactcctcagcaaatgcaaaagaatggaaatcataacaaacactctctcagattacagtgcaatcaaattagaactcaggattaagaaactcactcaaaaccacacgactacatggaaagtgaacaccctgctcgtgaatgagtactga

SEQ ID NO: 19591 - DNA, 876 bp, Homo sapiens
  SIMILAR (360)..(830): 321254mologous to Lycopersicon esculentum putative arabinogalactan-protein,accession number Z47980,Smith-Waterman Score=118.
atggcagaaatccataggctgccaaggccagatgtcaccgaggatacacagcagcagcagtggtcagccatggccgtcggagggacagcaaagtggatggctgccttgggaaggtttctggtcacatatgttgaagtcgaaggagtgaagctgcagaccttcacggtgaccacgctcactcaaagcttcaagtattctctatccaagtatctccagcagcagcctctcctgagctctagaaccatatacccaactttctattatttatctcttcttcgaaatctcagagcctttaaactcaacgcagccgaagctaagcctatgagctcaccccagaacctagtcctcttcctgtgtttcctgtctctgcagatggcagcaccacccatccgcttgcagacaaaaggaaagcaagcccagtgccagagcagcacgaagagcaccttccagcgaggccggtcactcagaggtgtctcacctaccctttccccaacatcacaacagcctcggaatttggaccagcaactggcttcagagcaaggagaagtgggagaggctccactgtgtgctgtaatccagggtgttatccccgtgctaggccggagccggagccgcgaggaacaccccccagtgtcagcgctccccgggctgcacaggaagcgccagcgagacaaagaggccgggcctgtgctcgctgacacggtgcccttccggccccacgcgggaaaagggacatttctccgctgtttggaaacgctcactcggcgagccccaaaccctcgctggacctttgggctccccctccgtaagctgcagggcgccgtggcccacagcaggcctgagatccgaacacactcggtgccgaaccgaacctaa

SEQ ID NO: 19592 - DNA, 813 bp, Homo sapiens
  SIMILAR (246)..(548): 561254mologous to Homo sapiens small nuclear ribonucleoprotein B',accession number AF134825,Smith-Waterman Score =293.
gaccaggacatgacatcatctgatatcccagtacgtttagaaggatccctctggctgccgtgaatcttcattggcaccttcaaggcttttgacaagcacatgaatttgatcctctgtgactgtgatgagttcagaaagatcaagtgaggagtggactgtggggggcggagactggaggatgggaatggattgagtgggtgggccaagcaatagagtctggtctcaatgacagtagagggacctcctcccaaagatgtaagtcagagcaggaagccttgtggaggaggggaggccctactgtgagccaggctctgtgttagattctgtatcccagctggggttcccatgccccaggctcctgcaggacttgctgggccagtccgtggggttggcgggccatcccaacaggtgaggagttggggaaagggtaccacctcctggtggctaaaataaaggataaaggggagggtccatagttttccaacccagtacccacctggccgtgggggtcctcccccacctatgggccgaggagcaccccctccaggtgaggagcccataaggagaccagtgctaattgatagaagatgccttagctggattaatgatgagatataacctccaatgggcatgccccctccgggaatgcggcctcctccccctgggatgcgaggtaagtgcctgcagtggtgactttggcttctttccctagagcctagtgggataggaaatggagggaagattggggcaaatttctaggctgggctgtgtcacttgacctggtctagtgagacaggattctggaacctcatc

SEQ ID NO: 19593 - DNA, 2061 bp, Homo sapiens
  SIMILAR (712)..(1146): 531254mologous to Homo sapiens p40,accession number U93570,Smith-Waterman Score=381.
atggttttttgggctaggcccaggaccctgctgctttgtgcagccttaggacttggtgccctgtatacagccactccagctccaactgtggctaaaaggggccaaggtacagcccaggcactttcttcagagggtgcaagccccaagccttggtggcttcgacatggtattgagccttgtaagcaaagctactgggaagttcggactgagcagagcccaggtgtctctgaaagaaaggcagcagccccagtcaggggcttagagataaaactcccatctccctgggacaaagcacctgagggaggaggcggctgtgggcacagcttcagcaggcttaaatgttccttcatgccagttctgaagagagcagtggatctcccagcacagcgctcaagccctgctaacggacagactgcctgctcaagtgggtccctggcccctgtgcttcctgactgggagatacctcccagcaaggggcgacagacaccttatgcaacaggagagctccggctggcatctgatgggtgcccgtctgggacgaagcttccagaggaaggtacagacagcaatctttgctgttctgcatcctccgctgaaagtaataacatcaacatcaacatcaacatcaacaaaaaagacgcccatggaaaaaccccatccaaagggcctcagcatcaaagatcaaagttagataaatccatgaagacgaggaaaaaccatcacaaaaatgctgaaaattccaaaaacctgaatgcctcttctcctccaaaggatcacaactcctcaacagcaaaggaacaaaactggacggagaatgagtttgatgaactgacagaagtaggcttcagaaggcgggtaatagcaaactcctccaagctaaaggagcatgttctaacccaatgcaaggaagctgagaactttgaaaaaatcttggaggaattgctaactagaataactagtttagagaagaacataaacgacctgatggagctgaaaaacacagcacaagaacatcgtgaagcatacacaagtatcaatagccaaattgatcaagcagaagaaaggatatcagagattgaagataaacttaatgaaataaaacgtgaagacaagattagaggaaaaagaataaaaaggaacaaaaaaaagccttcaagaaatatgggactatgtgaaaagagcaaatctatgattgattgctgtagtgcccttgaacaagataacatccccaaggacctcagagaccctttctacgtcaaccaatatgagcaggagcacattaagctgcctgttatcaagcttctcctgtccagcgagctgtactgccacatctgcagccttattctgaaaggggaccaggtggccaccttactgggacaccagtctgtcttccaggccctggcctggaaagagatctatgtgatggagggtaacgaaacccccatgacagagtctgacctcagtcgtgcacccataatgatgagtgcccacatggtgatggtggatgccctgatgatggcctataccatggatatgatcagcattgagaaggtggtggccagtgtcaagcacttctcaacattcagtgcctcgaaggaacttccgtatgaccttgaggatgccatgggtgtttcccgtaacacaattaagaacactgattaccaaccacgagaagacatgcttgcttccgttttgtcttctgccatgatcgtctccccttcccctgaaactcctattcaggctgcagataaactctctctgtattcttatcccccagcacccattcctcgcctgtccaaactctccgccctagtggcctctccttcctccaatccttcagccccacctcttacccattcagaagcctcttctgccattctccctctccgggaagtggctggcgttaaaagcattgctcgcattcatgtccctttctccacgtctgataagtcgcagatcaaagctatgagtatattcaaaaggactttatgttcttctctttatatttttctcttcatcaatcttgttttcctggaaaaggtttttttcccgattaactga

SEQ ID NO: 19594 - DNA, 1312 bp, Homo sapiens
  SIMILAR (314)..(895): 271254mologous to Homo sapiens Fragmented human NF-H gene +1 frameshift mutant product,accession number W18664,Smith-Waterman Score=119.
atgcgccgagcaggctcctgcgcagcagagcggtctgcagagctcagccctctgtacccgtctactaaggctgcccggctgcaaggcctggccgaaggtggcaagctgcatgggctcctgccctgtttcacctgcgggcaggaggcagcgggcgcgacggctcttttcacggcgttcccctacggcgtggtcgacccgagggaaaggcccgctcccgctccagagtccgaggaaaggagagagagctgaaagctggtcttgcgcagagaccccagaatgcgcccctgaaaaacagaatcaaagcgcagtgttagggaggcgggagagaggagggggagggtggggagagggacacgaggcgggagggagcatgcgagggatacaaggtgacaagaggacaggaccccagtcggccggtcgcgacctccgtccccaggcttcagggggacgcggaggggacgctgagcccacggagcgcggggcccgcagcccggggggagggggtggcgcgatgactgtaagcgcaggtccgggctgcggaagtccagaggagggtgcatgcgctgcggatactgccgcgtccagagaaacgatttcgggagctggagcagtgaaaacgagtccgcagatgaggaccaaaacgttttcaatcgctgctcagcgcgttcgcagaggaaagaagaggctgagagccttccgtggtataaggtgctttaaggtgggagagccgcagaaggctcgcagcccccagttgcagaacctaggtgcagcagaggggcaagagcgctgcccttgcccgacacctcttggcgtcaacccagtgcccgcaggcagctccctaagacgtcgagcttccagcctctccaagcgctcctttcgccgtcctgctgtcaaaacccaggctctctcaaaacaagccaaagtcaccgttctcagttgcctctccctaacatggagacaaacgcccacaacccagtcgacaccttatctagatcccacatttaagctctcgggctcctgttcactcacactcggttggccaagtaacaggaaaataagcaccttaggccggacacagcccacgctccagctgagggaccgcctcttaattatgtgcgcaagcagcaaaagcagagctaatctgcatctcctcttctcaaccccgcagcctgccttcccccgaggccaaggtttaggtttatgtttaatcttatcacgaatgccattccggacgaatgtgcctttcaaaacaatgacgctttgccaacctaactcagcgtcccaaccagagccctggaccaccactcggtga

SEQ ID NO: 19595 - DNA, 1956 bp, Homo sapiens
  SIMILAR (31)..(1107): 941254mologous to Homo sapiens junctophilin type3,accession number AB042636,Smith-Waterman Score=1751.
atgaagggctgcggcgtgtggaggggctgcgcccggaaggaagcggtgtgcgcccggaaggaagcggtgtggacccagaaggaagcggagccttggacctcccactctcgggcaaaggccgaggcagccctcacagcagctcagaaagcccaggaggaggcgcggatcgccaggatcactgccaaagagttctccccttccttccagcaccgggaaaacgggctggagtaccagaggccgaagcgtcagacctcctgtgacgacatcgaggtgctgtccaccgggacacccctgcagcaggagagccccgagctgtaccgcaagggcaccactccctccgacctgacccccgacgacagccccctgcagagcttccccaccagccccgcggccaccccgccgcccgcgcccgccgccaggaacaaggtcgcccacttctcgaggcaggtgtcggtggacgaggagcggggcggggacatccagatgctcctggagggccgggccggggactgcgcccgcagcagctggggcgaggagcaggccgggggctccaggggtgtccgcagcggtgccctgcgcggcggcctgctcgtggatgacttccgcacccgaggttcgggccgcaagcagcccgggaaccccaagccgcgggagcggcggacggagtcaccccccgtgttcacgtggacttcccaccaccgggccagcaaccacagccccggaggctccaggctgctggagctgcaggaggagaagctgagcaactaccggatggagatgaaacccttgctgaggatggagacgcacccccagaaaagacgctacagcaagggcggcgcctgccggggcttgggggacgaccaccgccccgaggaccggggcttcggggtgcagagactgcggtccaaggcccagaacaaggagaacttcaggccggcctcctccgcggagcccgccgtgcagaaactggcgagcctgcggctgggcggggccgagccccggttgctgcgttgggacttgaccttctccccgccccagaaatccttgcctgtcgctctagagtccgacgaggagaatggggatgagctcaagtccagtacggcagcatgggatccttgcgctccccgcaacgtgctcaaccccagctgctccaagagtctgtgcccctgtgctgcaggaatgaagggctttgggaatgaagggctgtgggacggtggctacataggatctgcgcacggccaggccctcaccccagcagggctctgctcgctcgtggctgccaggcagtgcgtggtgctgaacagaagtgctgcaagccagtctgcccctcggctcccggactctgctttctgcctggtgcccagcttctcacgcagcatgcactgctcctgcgctttctctgtggcagccgcggttgcacggcccatgtcttccccgctgtgtgttcatcctccactggacagctggctctgcttccactccgtggctgttgtgaatcctgctgccgggaggctcagcgcctatcctggtggtcatggcccaggggacctgcttccctgcacacagtcgggcagggcaggacagcatgtgcccggctggctgctgctgcatggagaatttgacgagttttcattaacccgagagcagcctggttttatcgacagctggacccgtcggactgaagagaccctgaggcctgtggtggtccccaagctgctggcgctcctgggccgtgtgcgggtggcaactcccctcacagtcttcatgggacagtgcggatttcacctcatacagctgcgcaatggatgtgtggacagagctagtcgggacgtggaggctcttctggttttcgagcaggaaacgtgctgtgagcaggaatcgcgaggagtggttactcaatttcttcccagccagagctttgtaaacctgcgcttctcacccctcagtgaagcctga

SEQ ID NO: 19596 - DNA, 647 bp, Homo sapiens
  SIMILAR (384)..(497): 391254mologous to Homo sapiens proline rich peptide P- B,accession number D29833,Smith-Waterman Score=67.
aagctggaaagatagcttgattacttatgaaatgaaaaaaagttttcctaaatgaatgtaacagtttaaatcatactgttacgaaaacaacactgtcaagattaaaaagaaattctgctccttttagtaataaacaatgtcgtgtgacactttggaacgcttctctcgttacaaaccagcgtctttactgaaggtccttccgctgcagagctgcgcaatggatgtgtggacagagctagtcggcacgtggaggctctcctggttttcgagcaggaaacgtgctgtgagcaggaatcgcgagtgagttccatggcgtccccgggtcagcgcgcgtgcaggaatcgcgagtgagttccatggcgtccccgggtcagcgcgcgtggggtcctgtctcgctggctcaccactggtggccagggcatgtctcccccagccctgagtctccgcagtggtgaccagggcatgtctcccccagccctgagtctcccggcagtggaggcagcgtgggcacagggtttgtcacagcctgtaagtgaatggaggacacaaaaataaccagagaggcaggctctgccctccgggagtgcacaggcggtttttcccatgtgtgcgttcatgtaattaaacgtctccgtttgtttcaaaaa

SEQ ID NO: 19597 - DNA, 940 bp, Homo sapiens
  SIMILAR (358)..(501): 351254mologous to Mus musculus SPR2D protein,accession number AJ005562,Smith-Waterman Score=71.
gccattggccatcgtcctgctgtcctacagccccgagaggccaggggctttgagaacacagtcagggacccggatctcgcagcaaactcccgtggccgacagggccttgtggaggcctgaccccgtcatgctggagcctggccggcagtgctggggagcgtgtggacctgaaaccaggcagccgcgtccaggccccactgcgctgcgcgtactatggccggggaagaacaggcggcttgtgtgcatgaagacaggacccagtgtcggggggacaaagctgccccgcaagctgcccatctctgtgggccgccgcgagggtctggctcggtcagcacggcccccagagctagataatgtcctgtctgctccagttgccctggccctggggccccggaagacaccccagaggcaggagggtgtggctgcagtggatgtcggtgctgcctccgcacacaggagcccccggctccgctgcagccacctcacccaccgatggcccaaacaccgagagaggaagtcggaagacgtgggtggaccccaggatgccccggaacagacccctgtctttggggtcttcgcctgttgtgccccctctgggaccctcacagatcagggaccagaccctgggcacaggtccaacgtgacaccacagaaactaaggctcagaggggactcgtacgttgtcaacgtgggtgtgggtgaagacctgagcctggcctcgatgcacagtcctgctccccagggaggactggctggggaatgccaggaaggggcagagctgcgcaatggatgtgtggacagagctagtcggcacgtggaggctctcctggttttcgagcaggaaacgtgctgtgagcaggaatcgcgaggagtggttactcaatttcttcccagccagagctttgtaaacctgcgcttctcacccctcagtgaagcctga

SEQ ID NO: 19598 - DNA, 697 bp, Homo sapiens
  SIMILAR (2)..(130): 951254mologous to Homo sapiens Human secreted protein, SEQ ID NO: 7837,accession number G03756,Smith-Waterman Score=210.
  misc_feature (1)...(697): n = a,t,c or g
gccccgcgccgcatttttntccccgctgcttccccttctcctgggcttcctgctcctctccgctccgcatggcggcagcggcctgcacaccaagggcgcccttcccctggatacggtcactttntacaaggggccccttgggaaggggaattagccccaaaagtccctggaacacccacttgctcagctctatacggcctcaggtcattcccaaaagcaagttcgtctttggtgaagttcgacaaccagtaaccctacggtgaggaagcaggatgagttcaagcgtcttgctgaaaactcggcttccagcgatgatctcttggtggcagaggtggggatctcaggtatggacaagtccaggacggctgggggggcagagagggaggaagctagaaatcgtttccctacttggaacaggaatacccagcatctttccttttgagccactctcaaggagtgtaagtaaacaggttcatggtctctaaaggaatctgctgcccacagtaggcttaacctgagcagattttgggaccatggaatctaagctcagctgtacaggtgcctgaagggaagggaacccctcttccttcacattccacccctctctgacattaaactgtgagaactttgagctctccttgcagggaacactgggcagagggggtgctatgtcccctaggggacagcatagtcagtt

SEQ ID NO: 19599 - DNA, 1018 bp, Homo sapiens
  SIMILAR (416)..(682): 951254mologous to Homo sapiens ERp28,accession number X94910,Smith-Waterman Score=434.
gagcctcctggggtgtccacgtgagcgcgcgtgagtccgcccccccagtcacgtgaccgctgactcggggcgttctccactatcgcttacctacctccctctgcaggaacccggcgatatggctgccgctgtgccccgcgccgcatttctctccccgctgcttccccttctcctgggcttcctgctcctctccgctccgcatggcggcagcggcctgcacaccaagggcgcccttcccctggatacggtcactttctacaagattatggtgacaagctgaacatggagctgagtgagaaatacaagctggacaaagagagctacccagtcttctacctcttccgggatggggactttgagaacccagtcccatacactggggcagttaaggttggagccatccagcgctggctgaaggggcaaggggtcttacctaggtatgcctggttgcctgcctgtatacgacgccttggccggggagttcatcagggcctctggtgtggaggcccgccaggccctcttgaagcaggggcaagataacctctcaagtgtgaaggagactcagaagaagtgggccgagcaatacctgaagatcatggggaagatcttagaccaaggggaggacttcccagcatcagagatgacacggatcgccaggctgattgagaagaacaagaggagctgtaaaaaggctgtctgtgattttccggggtttggtgggggtagggaggggagagttaacctgctggctgtgagtcccttgtggaatataagggggtagtgggaaaagtggtactaacccacgattctgagccctgagtatgcctggacattgatgctaacatgaccatgcttgggatgtctctagctggtctggggatagctggagcacttactcaggtggctggtgaaatgacacctcagaaggaatgagtgctatagagaggagagaggagtgtactgcccaggtctttgacagatgtaattctcattcaattaaagtttcagtgttttggtt

SEQ ID NO: 19600 - DNA, 723 bp, Homo sapiens
  SIMILAR (132)..(722): 1001254mologous to Homo sapiens dJ548G19.1.1 (novel protein (ortholog of mouse zinc finger protein ZFP64) (translation of cDNA NT2RP3001398 (Em:AK001596)) (isoform 1)),accession number AL121771,Smith-Waterman Score=1057.
aattcccgggtcgacgatttcgtggcagggtggggggtgtggaaaaataaaaggaaaagtccttgcaccatgtagatcagcgtcccccactttggcatcccggccggccggggacctcccagtctgcggccatgaacgcgagcagcgagggcgagagcttcgcgggctcggtgcaaattccaggtggcacaacggtgctggtggagctgactcccgacatccatatctgcggcatctgcaagcagcagtttaacaacctggatgcctttgtagctcacaagcaaagtggctgccagctgacaggcacatccgcagcagcccccagcacggtccagtttgtatcggaggaaacagtgcctgccacccagactcagaccaccaccagaaccatcacctcggagacccagacaatcacagtttcagctccagaatttgtttttgaacatggctatcaaacttacctgcccacggaaagtaatgaaaaccagacagccactgtcatctctctccctgccaagtcacgcaccaaaaagcccacaacaccacctgctcagaaaaggcttaactgttgctatccaggttgccaattcaagactgcttatggcatgaaggacatggagcggcatttaaaaattcacacgggagacaaaccccataagtgtgaagtctgtggcaagtgctttagccggaaagacaagctgaaaactcacatgcggtgccaca

SEQ ID NO: 19601 - DNA, 2087 bp, Homo sapiens
  SIMILAR (497)..(1333): 501254mologous to Homo sapiens ERp28,accession number X94910,Smith-Waterman Score=405.
atggctgcagaagccccaccatcacatttgcatccaaagccagaagaaaaggggcacattgctagccacatctgctcccttttcatcacaaatgccaaacttttcccagaaactcctccagctgtgtgctggagaagttcacaagtatgtagaggaccaagattatttagactattggttctcatagtatgtgttttgggtggcacaacggtgctggtggagctgactcccgacatccatatctgcggcatctgcaagcagcagtttaacaacctggatgcctttgtagctcacaagcaaagtggctgccagctgacaggcacatccgcagcagcccccagcacggtccagtttgtatcggaggaaacagtgcctgccacccagactcagaccaccaccagaaccatcacctcggagacccagacaatcacaggaagtcaccaagaaaaggtgaaaaccagaaaacccttaaaagtgggcctgtttccattgactggcagttcccagacctgcctatggaccaagatcccctgggagcttgttaaggataccggtgcccgggctccacctcctgaatctgaatgtctggagccgaggctcagcagcggctctgcacaccaagggcgcccttcccctggatacggtcactttctacaaggtcattcccaaaagcaagttcgtcttggtgaagttcgacacccagtacccctacggtgagaagcaggatgagttcaagcgttttgctgaaaactcggcttccagccgatgatctcttgggtggcggaggtggggatctcagattatggtgacaagctgaacatgggagctgagttgagaaatacaagctgggacaaagagagctacccagtcttcttacctcttccgggatggggacttttgaggaacccagttcccattacactgggggcagttaaaggttgggagccatccagcgctggctgaaagggggcaaaggggtctacctaggtgatggcctggagttggtctgcactgtataactgacgcccttggccggggaattcaatcaggggcttctggtgtggaggcccgccaggcccctcttgaagcaggggcacaagataacctctcaaagtgtgaaaggagactcagaaagaagtggggccgagcaatacctgaagatcatggggaagatcttagacccaaggggaggacttccccagcatcagagatgaccacggaatcgctagggctgattgagaagaaccaagatgagtgacgggaagaaggaggagctcccagaagagcttaaaccatcctgactgcccttcccagaagaaagggggccgagaaaagaggagctgtaaacaaggctgtctgtgattttcccagggtttggtgggagtatggacggggagagttaaccctgctggctgtgagtcccttgtggaatataagggggtagtgggaaaagtgggtactaaaccccccgattctgagccctgaagtatgcctggacaattgatgctaacatgcaccatgctttgggatgtctctaacctgggtctggggatagctggagcacttactcaaggttggctggtgaaatgacacctcagaaaggaattaagtgctatagagaggaggagaggagtgtactgcccaggtctttgacaggtgtaattctcattcaattaaagtttcagtgtttttggttaagtggacctgaagccattcttttttcttttcaaattatactttcgtctatgacctgctttcctctttgaatgtaagctggtatagactccactttcccagggtaacaaactatcctcataacactgtggaaagtggcatacctttgttattttccagtgatattcagactgacatggattgactgtcaatggtaaagtttgtctattttccagtccttaaaactcaatagcagtattgatgaatatattgaaccaacattgatggaccatggtgtaattattttccatgctttgtgagggtacacataggcaaattcttaggttttactgatatattctgtggacttgggatttacacaggctaaatggatataggtccgatttcaaaat

SEQ ID NO: 19602 - DNA, 799 bp, Homo sapiens
  SIMILAR (327)..(383): 681254mologous to Plasmodium lophurae histidine-rich protein,accession number M15317,Smith-Waterman Score=103.
atggcccaacaacttcccatcgccccagtgggttggcttataaataatctgagggcttccaggtacaagccattactgaatataatgctggtgttcgcagcggagatgatcgtgctggtggcattggggctgatggtcgtcgtcgtattggagctgaccgtggtggtcgccctgacgatgacggtggtggtcatagtgcggatgatgggtggtgatattggggatgatggtggtggtggtagtggggatgatggtggtggtggtagtggggatgatggtggtggtgttatgtggcaattctttgactccatgtcaaagaatgactccatcatccccactaccaccaccaccatcatccccactacgaccaccaccatcactattagagcagaacaatttaccatcctgacctggaagcctgttgtgtcctctcaaaagaacacatcatcattccgtggcttgacataatgctgggcttctttactcatatgtgctacaaatggtaccccaatttactctgtccccaagggtattctcggttcacaactctgtctgacagtgaataacaataagtacgatcagttgttgcaaaaatagattttaccgttagatcaaaacttggcagcaagcgcatcaagaactcccgtgtgtccagcccactgctttagaactactgccttaagtatatttccactttgaaactcactcccctgatccttaggagctgtttacaaattaataagaatgagcccattagagtccacacgaaatcgtcggcccgggtattccgacccgatcg

SEQ ID NO: 19603 - DNA, 733 bp, Homo sapiens
  SIMILAR (613)..(461): 441254mologous to Mycobacterium celatum RNA polymerase beta,accession number AF057459,Smith-Waterman Score=84.
atgaatctgagggacatccggccagcaggggaaggggaagagagctcagtgggtgcttttaagagtgtacatcgtctagtgaacacctaccacacggcaggccctgggctcataaaaacgaacgtttacggacagcttattgtacagcaaaagctgacctcatcctcaaatcagcccgacggggtagatgccactgttccccgcattttgcagacaaaggtaaatcatcagacagaaaagcctttcggcttctgccagaatgaacagacaagaggcatagcaacctccggagaccccaccagccgccgtttctccctctgtccaccgggctttgcttctgttgttcttcctgcccagaacggctttacctgtcaccaggttcgcccctcagccttcccacccgtcaccagccttccaagttctgctgcactgtcagttccatcagccgactcaccccgatttccccagcccgccggatgtacccttcgtctgggcccccaggccccctgccacctggacgttgcctgctggcttgcctgtttctgacactgggctctgggcttcctggaatagcaactgggtcctcggattccagtaccccaccatgactgccgccagccactcctatgtcagtcttggctgtctgccaggcactgctgatgattgcccccagaaccgtactattaatcccattacacagatgagcaaactgagacccacagaggctgagtaa

SEQ ID NO: 19604 - DNA, 438 bp, Homo sapiens
  SIMILAR (1)..(90): 1001254mologous to Homo sapiens calpastatin,accession number D50827,Smith-Waterman Score=150.
gctgcttccagctccaaagcacctaagaatggaggtaaagcgaaggattcagcaaagacaacagaggaaacttccaagccaaaagatgactaaagaaatacaagttaaggtgtgaggacttctgcatcttacagtcagcacagaacacactgagacttgaatcaagtcagcaacagagcaaaataaagatgcaaacttcgttttttaaaaacatgatatctaaaaagcagaatgtgcagagtcttttctttgccaagcaaaacagtttccaccacgtaagtgctgtctttctccatgggcctggccttgtatgttattatagaaacactgtggggaatgggattcttagcaagttatggcggtaagacccaaaccttgccattttttttatcctaatctacaattcatgtattgttgtctcaagaaaaatccacataa

SEQ ID NO: 19605 - DNA, 1036 bp, Homo sapiens
  SIMILAR (205)..(1035): 951254mologous to Homo sapiens Human Protease and associated protein-2 (PPRG-2),accession number Y70008,Smith-Waterman Score= 1367.
acaaaagaaaagctaagtgaatttttgcacattctacacacagtgcctgtaaatctcatttgtactttcagtttgcccttaattttttttgttagtgtttagaaaacaatgttttaaacattcttcagtgttctgatttcttattaccccctttcctcttgggcttttgaactgtatttgatgttgctttgggataatgtttataagtcttccagtatgaatcccacagaaaccaaggctgtaaaaacagaacctgagaagaagtcacagtcaaccaagctgtctgtggttcatgagaaaaaatcccaagaaggaaagccaaaagaacacacagagccaaaaagcctacccaagcaggcatcagatacaggaagtaacgatgctcacaataaaaaagcagtttccagatcagctgaacagcagccatcagagaaatcaacagaaccaaagactaaaccacaagacatgatttctgctggtggagagagtgttgctggtatcactgcaatatctggcaagccgggtgacaagaaaaaagaaaagaaatcattaaccccagctgtgccagttgaatctaaaccggataaaccatcgggaaagtcaggcatggatgctgctttggatgacttaatagatactttaggaggacctgaagaaactgaagaagaaaatacaacgtatactggaccagaagtttcagatccaatgagttccacctacatagaggaattgggtaaaagagaagtcacaattcctccaaaatatagggaactattggctaaacccatagggccagatgatgctatagacgccttgtcatctgacttcacctgtgggtcgcctacagctgctggaaagaaaactgaaaaagaggaatctacagaagttttaaaagctcagtcagcagggacagtcagaagtgctgctccaccccaagagaagaaaagaaaggtggagaaggatacaatgagtgatcaagcactcgaggctctgtcggcttcactgggcacccggcaagcagaacctgagctcgacc

SEQ ID NO: 19606 - DNA, 1774 bp, Homo sapiens
  SIMILAR (67)..(1356): 1001254mologous to Homo sapiens testis calpastatin,accession number U58996,Smith-Waterman Score=2229.
gaattcggggggagtctccctgacttccagcaacaatccttgagtctgggactgccctggcctaagatgggccagtttctatcttcgactttcttggagggctcaccggccacagtgtggcacgataagctttgtgacggtgaacgcagaggagcaagagaagcagttcgtatcttccaggaccaagcaaaagctaaagaagaaaaactagagaagtgtggtgaggatgatgaaacaatcccatctgagtacagattaaaaccagccacggataaagatggaaaaccactattgccagagcctgaagaaaaacccaagcctcggagtgaatcagaactcattgatgaactttcagaagattttgaccggtctgaatgtaaagagaaaccatctaagccaactgaaaagacagaagaatctaaggccgctgctccagctcctgtgtcggaggctgtgtctcggacctccatgtgtagtatacagtcagcaccccctgagccggctaccttgaagggcacagtgccagacgatgctgtagaagccttggctgatagcctggggaaaaaggaagcagatccagaagatggaaaacctgtgatggataaagtcaaggagaaggccaaagaagaagaccgtgaaaagcttggtgaaaaagaagaaacaattcctcctgattatagattagaagaggtcaaggataatgatggaaagccactcctgccaaaagagtctaaggaacagcttccacccatgagtgaagacttccttctggatgctttgtctgaggacttctctggtccacaaaatgcttcatctcttaaatttgaagatgctaaacttgctgctgccatctctgaagtggtttcccaaaccccagcttcaacgacccaagctggagccccaccccgtgatacctcgagtgacaaagacctcgatgatgccttggataaactctctgacagtctagaacaaaggcagcctgacccagatgagaacaaaccaatggaagataaagtaaaggaaaaagctaaagctgaacatagagacaagcttggagagagagatgacactatcccacctgaatacagacatctcctggatgataatggacaggacaaaccagtgaagccacctacaaagaaatcagaggattcaaagaaacctgcagatgaccaagaccccattgatgctctctcaggagatctggacagctgtccctccactacagaaacctcacagaacacagcaaaggataagtgcaagaaggctgcttccagctccaaagcacctaagaatggaggtaaagcgaaggattcagcaaagacaacagaggaaacttccaagccaaaagatgactaaagaaatacaagttaaggtatctggtatctgcatgtaaaatcttcagctggtggatggtgacttttgaagaacaaaaggctttggcaacagaaaacaattgttctgggtgatttctagaatggtttttgttgagtctctgaacatcctaaatattggtttgttattcttttccagaaagaaaatgaatttgactggttcacctgtgtactgagtattgataaactttgaatttttttaattgccttcaattgggagagaaagctttatatttgtgtgaggacttctgcatcttacagtcagcacagaacacactgagacttgaatcaagtcagcaacagagcaaaataaaggttagataagtccttgtgtagcaaatttcgagcataagaaataaaatctaattaattcttagggt

SEQ ID NO: 19607 - DNA, 4171 bp, Homo sapiens
  SIMILAR (430)..(1137): 831254mologous to Homo sapiens Human Protease and associated protein-2 (PPRG-2),accession number Y70008,Smith-Waterman Score= 976.
  misc_feature (1)...(4171): n = a,t,c or g
agagtgagcccggcgcctacaacgcaacaccccgcgctcctctccggctcccccgccgtgcggatcggagccagccggttgttgccatggcattcgccagctggtggtacaagacgcatgtcagtgaaaaaaccagtgaatcgccttccaaaccatgagaaaagaaaggatcatatgagaaaaaagcagcaagcctcggcagcagtcaatcctccagaacctatgctggtggaacagcctctgtcaccaaggtgtcagctttctctggtgcaaccagcaagtcttacagtatgaatcccacagaaaccaaggccattccagtcagccaacagatggaaggaccacatcttcctaacaagaaaaaacacaaaaaacaggctgtaaaaacagaacctgagaagaagtcacagtcaaccaagctgtctgtgggttcatgagaaaaaatcccaagaaggaaagccaaaagaacacacagagccaaaaagcctacccaagcaggcatcagatacagggaagtaacgatgctcacaataaaaaagcagtttccagatcagctggaacagcagcccatcagagaaatcaacagaaccaaagactaaaccacaagacatgatttctgctggtggagagagtgttgctggtatcactgcaatatctggcaagccgggtgacaagaaaaaagaaaagaaatcattaaccccagctgtgccagttgaatctaaaccggataaaccatcggggaaagtcaggcatggatgctggtttgggattgacttaatagatactttaggaggacctgaagaaactgaagaagaaaatacaacgtatactggaccagaagtttcagatccaatgagttccacctacatagaggaattgggtaaaagagaagtcacaattcctccaaaatatagggaactattggctaaaaaggaagggatcacagggcctcctgcagactcttcaaaacccatagggccagatgatgctatagacgccttgtcatctgacttcacctgtgggtcgcctacagctgctggaaagaaaactgaaaaagaggaatctacagaagttttaaaagctcagtccagcagggacagtcagaagtgctgctccaccccaagagaagaaaagaaaggtggagaaggatacaatgagtgatcaagcactcgaggctctgtcggcttcactgggcacccggcaagcagaacctgagctcgacctccgctcaattaaggaagtcgatgaggcaaaagctaaagaagaaaaactagagaagtgtggtgaggatgatgaaacaatcccatctgaagtacagattaaaaccagccacggataaagatggaaaacccctattgcccagagcctgaagaaaaacgccaaagcctcggagtgaatcagaactccattgatgaactttcagaagattttgaccggtctgaatgtaaagagaaaccatctaagccaactgaaaagacagaagaatctaaggccgctgctccaggctcctgtgtcggaggctgtgtgtcggacctccatgtgtagtatacagtcagcaccccctgagccggctacctttgaagggcacagtgcccagatgatgctgtagaagccttggctgatagcctggggaaaaaggaagcagatccagaagatggaaaacctgtgatggataaagtcaaggagaaggccaaagaagaagaccgtgaaaagctttggtgaaaaagaagaaacaattcctcctgattatagattagaagaggtcaaggattaaagatgggaaagccactccttgcccaaagagtcttaaggaacagcttccacccatgagtgaagactttccttctggatgctttgtctgaggacttctctggtccacaaaatgcttcatctccttaattttgaagatgctaaacttgctggtggccatctctgaaagtggtttcccaaaacccccggttttccacgacccccaggctggagccccatccccgtgatacctcgcagagtgaccaaggccctcggtgattgcattggataaactctctgacagtctagggacaaagggcagcctgacccaggatgaggaacaaaccaatgggaaggttaaagttaaagggaaaaagctaaagctgaacatagagacaagcttgggagaaagagatggacattattcccacctgaatacagacatctcctggatgataatggacagggacaaacccagtgaagccaccttacaaagaaatcagaggattcaaagaaacctgcagatgaccaagaccccattgatgctctctcaggagatctggacagcttgtccctccactacagaaacctcacagaacacagccaaaggataagtgcaagaaggctgcttccagctccaaagcacctaagaatggaggtaaagcgaaggattcagcaaagacaacagaggaaacttccaagccaaaagatgactaaagaaatacaagttaaggtatctggtatctgcatgtaaaaatcttccagctggtgggatggtgacttttgaagaaccaaaaggcttttggcaaccagaaaacaattgttctggggtgatttctagaatggtttttgttgagtctctgaacaatcctaaatattggtttgttattcttttccaggaaggaaaatgaaatttgactgggttcacctgtgtactgagtattggataaactttgaatttttttaattgccttccaattggggagagaaagctttatatttggtaagaaatatatttgataaagtttcttaaagcaacaccaaaaaaaacaaaagaaaagctaagtgaatttttggcacattcctacacacagtgcctgtaaatctcatttgtattttcagtttgcccttaaattttttttgttagtgtttagaaaacattgttttaaacattcttcagtgttctgatttcttattaccccctttccctcttgggcttttgaactgtatttgatgttgctttggggataatgtttataaggtcaaacataggatatggtaccattgggcacatatctcctcttggggctgctaataataaattaataaccaggtaacctggacaaaccaggaagcaccaaaccccttttccagtttgaactcttctttgccaggtgtgaggacttctgcatcttacagtcagcacagaacacactgagacttgaatcaagtcagcaacagagcaaaataaaggttagataagtccttgtgtagcaaatttcgagcataagaaataaaatcttaattaattcttagggtactcatctgacttgaactctgttgggtttactgtggtagtaaaactgtgctttctattatctatacataaaacctgagcagcaactgtgtctttagagctattgccacattagcctttgcactgtatagcgtctggctttatggaacttaagtttaccaaatataaaaagaaacttctgcttttaaaaaaattatatatatatattaaatttgaaacctgcatttctcccacagcaatgtaagaagtaggctctgatgtcctaccactttgaatggttttctaatatcttaatgaatagttcctgaacattgcactgatatcatcgattagaattttgatatttaatttcatctttatttcctgggtagagaatgcagggaaaagatgtcaggtacataacataaaacaggattggggaatttattgtttcccaaaggggcatgggctttccttaggcatcagtttggaggcttttgttatggacttaggctgacttgtgggcagcgggggcaaggcaaaaaccattaacactgcttataaatggcaccacatcttgttaacctcccccccaaatactctctgaaagtcatgcacatacctatgggattttacacaccaccagcttaaaatgctatgtctctatccatcagaaatacgtcattattctatttttaaggcagcaacaagaaaagaaaaaacacttttcctgagggatttctaaccatgtatctaatcctcccatttgggcagtataggtgtttgcttttttgttttctttttttaagaaaaaccttgaaacctttgacactggacagatgtggtttgcaaggatacggctggcagtattactaattttccatgtgtantccgggaagtantttt

SEQ ID NO: 19608 - DNA, 1104 bp, Homo sapiens
  SIMILAR (19)..(126): 371254mologous to Neospora sp. antigen N54,accession number U76556,Smith-Waterman Score=74.
ctcgggaggctgagctttcctcggcctgagcagccagaccccgggcaccgcgctcacccctcttcgccgccacgtccgcgaaggcctcacgcgcgaggcaggcgaggcccgaggcgccaccacttcacgacaccggagcgaaccgggcgccagaggtgcgacccccctgccccgaatcctgccggtgggagtggctgcatttgaaccaaacggccttcgcgggcagcagccgtcgccccgcagtcccggggctcccaagggcctgtgaccgacgccgccctccgcgtcttcgtccccgaagccccgggaaccatccgccctcgggagaccatgctgcagatgcgaggaaagccgtttcctggaacatcggaattctaaccccagggtgaaggactcacgacaggcgaggggcagacatgctgaattccacgggcgaactggagttttcgaacgaagaagatcccgagatcatctcccaactcacttccctgcctctgtccggtgggaaaagctcagctggtgtgcccgaaaaaacgggctatccggactccgtttatgtcatggcagccaacatttttcagggtattcgaatcgaaaagtcggcacagaaagtcttaatcaagtatgggaatgaacccctgcggtccttgtccgagtctgaggatcagtcctttcagcgtttgtcttatgagctggctttcagtgccctgaaatatcaagatattttgggaaactatattgatagacagctgtatcttcccaagtaccacaattaccaggatccatttgaggcagtctttatttatttgtggatggctattatggtttcccaggataggaaattttcaaactcgtgtcctttctgataatgaagagcccatatcagaagttcaagaagtagagaaccttcttaacagattagcagcagcattagattctcataggagcgtgaacctgattgtgaactgcacatgttcatggaaaaattgtcttccacgaaactggtccctggtaccaaaaaggttcgagactgctgagttaaagggactgtttaatgccacagaactggaaaggggagtagccagaattcacactcaggagtga

SEQ ID NO: 19609 - DNA, 1091 bp, Homo sapiens
  SIMILAR (354)..(1088): 871254mologous to Homo sapiens nucleophosmin,accession number M23613,Smith-Waterman Score=1085.
caataagagctaactgccatcaagagccatcagtatgtcttcaagctgcatgcccagaaagctggattggttttcaaagaaagtgtttctatttttctgatgacaccaagaactggacatcaagtcagaggttttgtgactcacaagatgctgatcttgctcaggttgaaagcttccaggaactgaatttcctgttgagatataaaggcccatctgatcactggattgggctgagcagagaacaaggccaaccatggaaatggataaatggtactgaatggacaagacagttagtcatgaaagaagatggtgccaacttgtatgttgcaaaggtttcacaagttcctcgaatgaatccaagacctgtcatggtgagaacggtcagctcaggggctggtgcaaaggatgaactgcacattgttgaagcagaggccatgaatgacgaaggcagtccaattaaagtaacactggcaactttgaaaatgtctgtacagccaacggtttctcttgggggctttgaaataacaccaccagtggacttaaggttgaagtgtggttcagggccagtgcatattagtggacagcacttagtagctgtgaaggaaggtgcagagtcagaagatgaagaagaggaggatgtgaaactcttaagtatatctggaaagcagtctgcccctggaggtgggcagaaaaaagtaaaacttgctgctgctgctgatgatgatgatgatgaagatgatgatgatgatgatgacgaggaagctgaagaaaaagcgccagtgaagaaatctatacgagatactccagccaaaaatgcacaaaagtcaaatcagaatggaaaagactcaaaaccatcatcaacaccaagatcaaaaggacaagaatccttcaaaaaacaggaaaaatctcctaaaacaccaaaaggatctagttctgtagaagacattaaagcaaaaatgcaagcaagtatagaaaaacgtggttctcttcccaaagtggaaaccaagttcatcaattatgtgaagaatttcttctggatgactgaccaagaggctattcaagatctctggcagtggaggaagtctctttaa

SEQ ID NO: 19610 - DNA, 612 bp, Homo sapiens; identical to SEQ ID NO: 7601
  SIMILAR (49)..(609): 861254mologous to Homo sapiens nucleophosmin,accession number M23613,Smith-Waterman Score=806.

SEQ ID NO: 19611 - DNA, 639 bp, Homo sapiens
  SIMILAR (250)..(495): 681254mologous to Homo sapiens nucleophosmin,accession number M23613,Smith-Waterman Score=267.
atgggaaaacctgcccgcgtgattcagttacctcccaccaggtccctcccatggcacgtggggattatgggagctacaattcaagatgagatttggtgtgtgccgccacctgatggaagattcgatggacatggacgtgagccccctgaggcccagaactatcttttcagttgtgaactaaaggccgacaaagatgatcactttaaggtggataatgatgaaaatgagcaccagttatccttaagaacgccaacagtttcccttggggtctttgaaataacaccaccagtgcttttatggttgaagtgtggttcagggccagtgcatattagtggacagcatttagtagctgtggaggaagatgcagagtcagaagatgaagaggaggaggatgtgaaactcttaaggatatctggaaaaacaaagactttcatggccacaaatggcaaagaatacaagcattacaaaatcagttcagaaaagtcactagacaacaagtacaaaacacgaactccagggtttcaggcctttggattcgaggacttacacccgtggccccttggttctcaggccttctatctcagtctgagagttacaccaccagttttcctggttctgaggcttctggacttcgactga

SEQ ID NO: 19612 - DNA, 1692 bp, Homo sapiens
  SIMILAR (1)..(1689): 1001254mologous to Homo sapiens nucleophosmin-retinoic acid receptor alpha fusion protein NPM-RAR long form,accession number U41742,Smith-Waterman Score=2964.
atggaagattcgatggacatggacatgagccccctgaggccccagaactatcttttcggttgtgaactaaaggccgacaaagattatcactttaaggtggataatgatgaaaatgagcaccagttatctttaagaacggtcagtttaggggctggtgcaaaggatgagttgcacattgttgaagcagaggcaatgaattacgaaggcagtccaattaaagtaacactggcaactttgaaaatgtctgtacagccaacggtttcccttgggggctttgaaataacaccaccagtggtcttaaggttgaagtgtggttcagggccagtgcatattagtggacagcacttagtagctgtggaggaagatgcagagtcagaagatgaagaggaggaggatgtgaacagggttttatttatgaaaccgaaaggcaggggcctcaagcatatgttcggggatttggtgtgcagttggaaattggcagccattgagacccagagcagcagttctgaagagatagtgcccagccctccctcgccaccccctctaccccgcatctacaagccttgctttgtctgtcaggacaagtcctcaggctaccactatggggtcagcgcctgtgagggctgcaagggcttcttccgccgcagcatccagaagaacatggtgtacacgtgtcaccgggacaagaactgcatcatcaacaaggtgacccggaaccgctgccagtactgccgactgcagaagtgctttgaagtgggcatgtccaaggagtctgtgagaaacgaccgaaacaagaagaagaaggaggtgcccaagcccgagtgctctgagagctacacgctgacgccggaggtgggggagctcattgagaaggtgcgtaaagcgcaccaggaaaccttccctgccctctgccagctgggcaaatacactacgaacaacagctcagaacaacgtgtctctctggacattgacctctgggacaagttcagtgaactctccaccaagtgcatcattaagactgtggagttcgccaagcagctgcccggcttcaccaccctcaccatcgccgaccagatcaccctcctcaaggctgcctgcctggacatcctgatcctgcggatctgcacgcggtacacgcccgagcaggacaccatgaccttctcggacgggctgaccctgaaccggacccagatgcacaacgctggcttcggccccctcaccgacctggtctttgccttcgccaaccagctgctgcccctggagatggatgatgcggagacggggctgctcagcgccatctgcctcatctgcggagaccgccaggacctggagcagccggaccgggtggacatgctgcaggagccgctgctggaggcgctaaaggtctacgtgcggaagcggaggcccagccgcccccacatgttccccaagatgctaatgaagattactgacctgcgaagcatcagcgccaagggggctgagcgggtgatcacgctgaagatggagatcccgggctccatgccgcctctcatccaggaaatgttggagaactcagagggcctggacactctgagcggacagccggggggtggggggcgggacgggggtggcctggcccccccgccaggcagctgtagccccagcctcagccccagctccaacagaagcagcccggccacccactccccgtga

SEQ ID NO: 19613 - DNA, 687 bp, Homo sapiens
  SIMILAR (1)..(636): 681254mologous to Homo sapiens nucleophosmin,accession number M23613,Smith-Waterman Score=698.
atggacatgagtcccctgagaccccagaacaatcttttccgttgtgaactaaaggctgacaatcactttcaagtggataatgatgaaaatgagcatcagttatcttcaagaacggtcagctcaggggctggtgcaaaggatgaattgcacattgttgaagcagaggcaatgaattacgaaggcagtccaattaaagtcacactggcaactttgaaaatgtctgtacagccaacggtttcccttgggggctttgaaataacaccaccagtagtcttacggttgaagtgtggttcagggccagtgcatattagtggacagcacttagtcactgtggaggaagattcagaggcagaagatgaagaacaggaggatgtgaaactcttaagtggtagcaaggtgccacagaaaaaagtaaaacttgctgctgatgaagaagatgatgatgatgattttgatgatgaggaaactgaagaaaaagcacccgtgaagaaatctatacaagatactcgagccaaaaatgcacaaaagtcaaatcagaatggaaaagactcaaaaccatcaacaccaagatcaaaaggacaagaatccttcaaaaaacaggaaaaaattcctaaaacacctaaaggacctagttctgtagaagacattaaagcaaaaatgcaagcaagtatacaaaaagcatattga

SEQ ID NO: 19614 - DNA, 2584 bp, Homo sapiens
  SIMILAR (90)..(2129): 1001254mologous to Homo sapiens p80 protein,accession number D45915,Smith-Waterman Score=3623.
gtgattccgtcctgcgcggttgttctctggagcagcgttcttttatctccgtccgccttctctcctacctaagtgcgtgccgccacccgatggaagattcgatggacatggacatgagccccctgaggccccagaactatcttttcggttgtgaactaaaggccgacaaagattatcactttaaggtggataatgatgaaaatgagcaccagttatctttaagaacggtcagtttaggggctggtgcaaaggatgagttgcacattgttgaagcagaggcaatgaattacgaaggcagtccaattaaagtaacactggcaactttgaaaatgtctgtacagccaacggtttcccttgggggctttgaaataacaccaccagtggtcttaaggttgaagtgtggttcagggccagtgcatattagtggacagcacttagtagtgtaccgccggaagcaccaggagctgcaagccatgcagatggagctgcagagccctgagtacaagctgagcaagctccgcacctcgaccatcatgaccgactacaaccccaactactgctttgctggcaagacctcctccatcagtgacctgaaggaggtgccacggaaaaacatcaccctcattcggggtctgggccatggagcctttggggaggtgtatgaaggccaggtgtccggaatgcccaacgacccaagccccctgcaagtggctgtgaagacgctgcctgaagtgtgctctgaacaggacgaactggatttcctcatggaagccctgatcatcagcaaattcaaccaccagaacattgttcgctgcattggggtgagcctgcaatccctgccccggttcatcctgctggagctcatggcggggggagacctcaagtccttcctccgagagacccgccctcgcccgagccagccctcctccctggccatgctggaccttctgcacgtggctcgggacattgcctgtggctgtcagtatttggaggaaaaccacttcatccaccgagacattgctgccagaaactgcctcttgacctgtccaggccctggaagagtggccaagattggagacttcgggatggcccgagacatctacagggcgagctactatagaaagggaggctgtgccatgctgccagttaagtggatgcccccagaggccttcatggaaggaatattcacttctaaaacagacacatggtcctttggagtgctgctatgggaaatcttttctcttggatatatgccataccccagcaaaagcaaccaggaagttctggagtttgtcaccagtggaggccggatggacccacccaagaactgccctgggcctgtataccggataatgactcagtgctggcaacatcagcctgaagacaggcccaactttgccatcattttggagaggattgaatactgcacccaggacccggatgtaatcaacaccgctttgccgatagaatatggtccacttgtggaagaggaagagaaagtgcctgtgaggcccaaggaccctgagggggttcctcctctcctggtctctcaacaggcaaaacgggaggaggagcgcagcccagctgccccaccacctctgcctaccacctcctctggcaaggctgcaaagaaacccacagctgcagaggtctctgttcgagtccctagagggccggccgtggaagggggacacgtgaatatggcattctctcagtccaaccctccttcggagttgcacagggtccacggatccagaaataagcccaccagcttgtggaacccaacgtacggctcctggtttacagagaaacccaccaaaaagaataatcctatagcaaagaaggagccacacgagaggggtaacctggggctggagggaagctgtactgtcccacctaacgttgcaactgggagacttccgggggcctcactgctcctagagccctcttcgctgactgccaatatgaaggaggtacctctgttcaggctacgtcacttcccttgtgggaatgtcaattacggctaccagcaacagggcttgcccttagaagccgctactgcccctggagctggtcattacgaggataccattctgaaaagcaagaatagcatgaaccagcctgggccctgagctcggtcgcacactcacttctcttccttgggatccctaagaccgtggaggagagagaggcaatcaatggctcctttcacaaaccagagaccaaatgtcacgttttgttttgtgccaacctattttgaagtaccaccaaaaaagctgtattttgaaaatgctttagaaaggttttgagcatgggttcatcctattctttcgaaagaagaaaatatcataaaaatgagtgataaatacaaggccagatgtggttgcataaggtttttatgcatgtttgttgtatacttccttatgcttcttttaaattgtgtgtgctctgcttcaatgtagtcagaattagctgcttctatgtttcatagttggggtcatagatgtttccttgccttgttgatgtggacatgagccatttgaggggagagggaacggaaataaaggagttatttgtaatgact

SEQ ID NO: 19615 - DNA, 2305 bp, Homo sapiens
  SIMILAR (1024)..(1272): 921254mologous to Rattus norvegicus nucleolar protein B23.1,accession number M25062,Smith-Waterman Score=379.
atgagaccaaggactctggtgttcctccagtcatcggagccatatcattttggtgcattggccgggaattcattcaacggattgggcatggtgtttttacaaaacccgtgcaagcattttaagatcaacccaggtcttttagcaatcacatcgggcaggcccagggagaacagttcccccaaattagaaaagcaacttccaggggaaccatctgaggatcccccttattttgggccccttcaagttcccttctcattacaagaccttaagcaaataaagcgaaacttaggccgattttctaacgacactgataggaaccaggaggaggcccaaaagaaagagagaaagctcaagagaaggacagaggctctagcagctgctttgcaggtttgcaaaatccaggatccccaaggcacaagtgctgaattagctgagctaatagctcttacaagagcacttaaattaagcaaggggaaggtagctgccatttatactaactccaagtatgctttcttaactctccatactcatgctgcgattcaaaaggaaaggcattttcttaccactaatgaatctcctataaaatattgccaggaaattggcaggttattatcctcagtttttcttccacaaaaaatagcagtcatgcgttataggggacatcaaaaggaaacagataagaaagggtacactcgccagcagttttgccaggagagtacactgaacaaaggagacagggtcatttataacctgacgcgtccaccctactgctgtgtccagtttccaatagctggaatgggatctaacattctgtatttgacccgattggctagcaacttagaactttttaaaagaggcaaaggtagaggaaaacaaaggaaggaggaagtaacttgtggaatgctgagaaagatatttaagaatgtcccctggtgtgattccgtcctgcgcggttgttctctggagcagcgttcttttatctccgtccgccttctctcctacctaagtgcgtgccgccacccgatggaagattcgatggacatggacatgagccccctgaggccccagaactatcttttcggttgtgaactaaaggccgacaaagattatcactttaaggtggataatgatgaaaatgagcaccagttatctttaagaacggtcagtttaggggctggtgcaaaggatgagttgcacattgttgaagcagaggcaatgaattacgaaggcaagtccaattaaacgtaacacttggcaactttgaaaatgtcctgtacagccaacggtttcccttgggggctttgaaataacaccaccagtggtcttaaggttgaagtgtggttcagggccagtgcatattagtggacagcacttagtagctgtggaggaagatgcagagtcagaagatgaaggaggaggaggatgtgaaacctcttaagtatatctgggaaagcgggtctgcccctggaggtggtagcaaggtttccacagaaaaaaagtaaaaactttgcttgcttgatggaaagatgatgacgatgatgatgatgaagaagatgatgatgattgaagatgatgatgatgatatgatttttggtgatgagggaagctgaaaggaaaagccgccagtgaccgaattttttacgggaatactccagcccaaaaatgcagcgaaagtcaaatcagaatggaaaagactccaaaaaccatcattcacacccaagaatcaaaaaggacaagaatcccttcaaagaaacaggaaaaaaactcctaaaacacccaaaagggacctaagttctgtagaagacattaaagcaaaaaatgcaagcaagtatagaaaaacgtggttctcttccccaaagtgggaagccaaattcatcaattatgtgaagaatttgctcccggatgactgaccaagaggctattcaagatctctggcagtggaggaagtctctttaagaaaatagtgtagacaatttggtaagagaatttaccgtcttatttcatttctgtaacagttgatatctggctgtccttttttataatgcagagtgagaacttttccctacccggggtttgataaatgtttgtccaggttctatttgccaaggaattgtgttgtcccaaaatgcctgtttaagtttttaaagatggaactccacccttctgcttggttttaagtatgtatggaatgttatgataggacatagtagtagcggtggtcagacatgggaaatggtgtgggagacaaaaatatacatgtgaaataaaactcagtattttaataaagtaaaaaaaaaaaaaaaaa

SEQ ID NO: 19616 - DNA, 687 bp, Homo sapiens
  SIMILAR (266)..(616): 321254mologous to Homo sapiens natriuretic protein,accession number AB037521,Smith-Waterman Score=97.
atgcggacgagacagacgcgcaggcggggagcggggctcggcgccgccgacgcgcgggtgcagcctgggccagctcccgaccacttccctcccatcccacctcctggctcccattcactccccactgccggaaccctagcctctccttccagctcagagccctttgtgcttggagatggcattcccggaggatctgagcacatgacattggctgccctgaagtctcccctctcgtccttgaagtggcgcgtgacgagggaccagcacacaggcccagattctcacactgatcctcgcattgctcccactgggggacgagccaaagggcagccccgcctccgtgtcacccctgcatccagaccacttggctggtgctgtcacggggcttggaggctgacccaaaaccaggtcaggcccaggcaaggacagatcctcgggagctgcttcctccttcccaggaggaagggtctgaattggttcagcatgtcgggatggccagtggggccccagaacccagcagggttcccttgtgtgtgctgtcaggcattttcccagccccggaaatcaatggtcgctgtgggactcagaggggagaaacgactggccgagtgagcaacatcatcacccggaggaataagaccaaagggcgctttctgtttccaccgcacgcgtggtcgaacgcgtggg

SEQ ID NO: 19617 - DNA, 2052 bp, Homo sapiens
  SIMILAR (172)..(2049): 1001254mologous to Homo sapiens dJ1182A14.3 (similar to MST1 (macrophage stimulating 1 (hepatocyte growth factor- like))),accession number AL137798,Smith-Waterman Score=3598.
atgggccgggcacggtggctcactcttgtaatcccagcactttgggagaccaaggtcccagttcagggccctgaatccccacaaccactgactgacggccctaccacctgctgtctctcctggcggccacagcagcagcagcagcagcaggaccatctctggtatcacatgagagctacagcgccgctacaagcggtggtgcccgggccttggcaggaggatgtggcagatgctgaagagtgtgctggtcgctgtgggcccttaatggactgccgggcgttccactacaatgtgagcagccatggttgccaactgctgccatggactcaacactcaccccacacgaggctgcggcattctgggcgctgtgacctcttccaggagaaaggcgagtgggggtacatgcccacgctccggaatggcctggaagagaacttctgccgtaaccctgatggcgaccccggaggtccttggtgccacacaacagaccctgccgtgcgcttccagagctgcggcatcaaatcctgccgggtggccgcgtgtgtctggtgcaatggcgaggaataccgcggcgcggtagaccgcaccgagtcagggcgcgagtgccagcgctgggatcttcagcacccgcaccagcaccccttcgagccgggcaagttcctcgaccaaggtctggacgacaactattgccggaatcctgacggctccgagcggccatggtgctacactacggatccgcagatcgagcgagaattctgtgacctcccccgctgcgggtccgaggcacagccccgccaagaggccacaagtgtcagctgcttccgcgggaagggtgagggctaccggggcacagccaataccaccaccgcgggcgtaccttgccagcgttgggacgcgcaaatcccgcatcagcaccgatttacgccagaaaaatacgcgtgcaaagaccttcgggagaacttctgccggaaccccgacggctcagaggcgccctggtgcttcacactgcggcccggcatgcgcgtgggcttttgctaccagatccggcgttgtacagacgacgtgcggccccaggactgctaccacggcgcgggggagcagtaccgcggcacggtcagcaagacccgcaagggtgtccagtgccagcgcggagcctggaaatggttgagactaccctgccacgacttcgctcccgctcccgcctcggttcacgtttacctccgaaccgcatgcacaactggaggagaacttctgccagacccagatggggatagccatgggccctggtgctacacgatggacccaaggaccccattcgactactgtgccctgcgacgctgcgaccaggtgcagtttgagaagtgtggcaagagggtggatcggctggatcagcgttgttccaagctgcgcgtggctgggggccatccgggcaactcaccctggacagtcagcttgcggaattggcagggccagcatttctgcggggggtctctagtgaaggagcagtggatactgactgcccggcagtgcttctcctcctgccatatgcctctcacgggctatgaggtatggttgggcaccctgttccagaacccacaacatggagagccaggcctacagcgggtcccagtagccaagatgctgtgtgggccctcaggctctcagcttgtcctgctcaagctggagaggtatgtggacaacctgggagggtggaccaagtgtgagattgcaggccggggtgagaccaaaggtacgggtaatgacacagtcctaaatgtggccttgctgaatgtcatctccaaccaggagtgtaacatcaagcaccgaggacatgtgcgggagagcgagatgtgcactgagggactgttggcccctgtgggggcctgtgagggtgactacgggggcccacttgcctgctttacccacaactgctgggtcctgaaaggaattagaatccccaaccgagtatgcgcaaggtcgcgctggccagccgtcttcacgcgtgtctctgtgtttgtggactggattcacaaggtcatgagactgggttag

SEQ ID NO: 19618 - DNA, 2296 bp, Homo sapiens
  SIMILAR (71)..(829): 971254mologous to Homo sapiens dJ1182A14.3 (similar to MST1 (macrophage stimulating 1 (hepatocyte growth factor- like))),accession number AL137798,Smith-Waterman Score=1444.
ccactctgcagggcagcgctcgccatcgaatgacttccaggtgctccggggcacagagctacagcacctgctacatgcggtggtgcccgggccttggcaggaggatgtggcagatgctgaagagtgtgctggtcgctgtgggcccttacttctctccagggcgttccactacaatgtgagcagccatggttgccaactgctgccatggactcaacactcgccccactcaaggctgtggcattctgggcgctgtgacctcttccaggagaaaggcgagtgggggtacatgcccacgctccggaatggcctggaagagaacttctgccgtaaccctgatggcgaccccggaggtccttggtgccacacaacagaccctgccgtgcgcttccagagctgcggcatcaaatcctgccgggtggccgcgtgtgtctggtgcaatggcgaggaataccgcggcgcggtagaccgcaccgagtcagggcgcgagtgccagcgctgggatcttcagcacccgcaccagcaccccttcgagccgggcaagttcctcgaccaaggtctggacgacaactattgccggaatcctgacggctccgagcggccatggtgctacactacggatccgcagatcgagcgagagttctgtgacctcccccgctgcgggtccgaggcacagccccgccaagaggccacaagtgtcagctgcttccgcgggaagggtgagggctaccggggcacagccaataccaccaccgcgggcgtaccttgccagcgttgggacgcgcaaatcccgcatcagcaccgatttacgccagaaaaatacgcgtgcaagtgaggtgggcgggggggcgggcgttgggacgtgctgctgcgggtgagacgggaggagggtagtcacgggcttagggctggaggctggcgggctagggctgagtggagcgcctgcttagagaccttcgggagaacttctgctggaacctcgacggctcagaggcgccctgttgcttcacactgcggcccggcacgcgcgtgggcttttgctaccagatacggcgttgtacagacgacgtgcggccccaggactgctaccacggcgcgggggagcagtaccgcgggcacggttcagcaagacccgcaagggtgtccagtgccagcgctggtccgctgagacgccgcacaagctgcagtgagtccctggtgctcccggccccgccagggccctaaccctggggcggcatgctttgatgtctgggaccagagcctggaaatggttgagactatccctgccacgatttcgctcccgctcccgcctcggttcacgtttaacctccgaaccacatgcacaactggaggagaacttctgccagacccagatggggatagccatgggccctggtgctacacgatggacccaaggaccccattcgactactgtgccctgcgacgctgcgctgatgaccagccgccatcaatcctggacccccccccagaccaggtgcagtttgagaagtgtggcaagagggtggatcggctggatcagcgtcgttccaagctgcgcgtggctgggggccatccgggcaactcaccctggacagtcagcttgcggaatcggtgaggcacaacggcctgtctcccacagagaggagctgaggttgtgtcctctgtggttatgccactgggggctgggaatctatccctgcccccagaggtcctagccagaagatggcaggtctagcatctctcccaggagtctgttccctgtcctaattccccactcctctaggcagggccagcatttctgcggggggtctctagtgaaggagcagtggatactgactgcccggcagtgcttctcctcctggtgagcctcccttgtgtttggggacccagtctcatcccaccttcccctttccccaggcaagctaacaagtgagccttggggcaacggactgagagtcacaaatgacctagcagagcttctctcccagccatatgcctctcacgggctatgaggtatggttgggcaccctgttccagaacccacaacatggagagccaggcctacagcgggtcccagtagccaagatgctgtgtgggccctcaggctctcagcttgtcctgctcaagctggagagatctgtgaccctgaaccagcgtgtggccctgatctgcctgccgcctgaatgatatgtggtgcctccagggaccaagtgtgagattgcaggccggggtgagaccaaaggtacgggtaatgacacagtcctaaatgtggccttgctgaacgtcatctccaaccaag

SEQ ID NO: 19619 - DNA, 5635 bp, Homo sapiens
  SIMILAR (897)..(3011): 761254mologous to Homo sapiens 14-MAY-1992 Human L5/3 construct gene,accession number T62439_cd1,Smith-Waterman Score= 2836.
atggggtggctctcactcctgctgcttctgactcaatgcttaggggtccctggtgagtgcccccaaccctgatccccatctgccttcaggagggggttggccccattctcctattctaggatgagaaaaaaagtcagggagccagaggctcagtgggcatggggcagtgacctcggcctcttgagcacagctgggaagccctaggaacacatagacatggcccacttaggcttctattagcacgtctgctctagcactgaagcagtgttaggaccacacagatgcacgcacacagcaggcagtgacccctcctgagcctgatctacccctctaacctagcgtatgctttcgtgcaagtgagagcccagatttggagtctgaatgcctaccgagggcccctggctgggtaatgtgatggctctgagccttagcattctcatttgagagatgagatggggcaagctccatcacccactgctctcacagagcgtatgtgttagatctgagcccggtgcctgggccactacacagaggcaccggtgataactaccaagtctgggcctgcttcccaggggaaatttttttgacaagtatctgtgcaggggggctagactggcccttgaaagtgcatacagggtccatcccagaagccttgtagctttgatcccctgaatgaacaaagtgtggacatgccaatacacattactgacatgtatgcccacctgacctgcacccactcatgcccactctgcagggcagcgctcgccattgaatgacttccaggtgctccggggcacagagctacctgctacatgcggtggtgcccgggccttggcaggaggatgtggcagatgctgaagagtgtgctggtcgctgtgggctcttaatggactgctgggcagcgctcgccattgaatgacttccaggtgctccggggcacagagctacagcacctgctacatgcggtggtgcccgggccttggcaggaggatgtggcagatgctgaagagtgtgctggtcgctgtgggcccttaatggactgccgggccttccactacaacgtgagcagccatggttgccaactgctgccatggactcaacactcgccccacacgaggctgcggcgttctgggcgctgtgacctcttccagaagaaagactacgtacggacctgcatcatgaacaatggggttgggtaccggggcaccatggccacgaccgtgggtggcctgccctgccaggcttggagccacaagttcccgaatgatcacaagtacacgcccactctccggaatggcctggaagagaacttctgccgtaaccctgatggcgaccccggaggtccttggtgctacacaacagaccctgctgtgcgcttccagagctgcggcatcaaatcctgccgggaggccgcgtgtgtctggtgcaatggcgaggaataccgcggcgcggtagaccgcacggagtcagggcgcgagtgccagcgctgggatcttcagcacccgcaccagcaccccttcgagccgggcaagttcctcgaccaaggtctggacgacaactattgccggaatcctgacggctccgagcggccatggtgctacactacggatccgcagatcgagcgagagttctgtgacctcccccgctgcgggtccgaggcacagccccgccaagaggccacaactgtcagctgcttccgcgggaagggtgagggctaccggggcacagccaataccaccactgcgggcgtaccttgccagcgttgggacgcgcaaatccctcatcagcaccgatttacgccagaaaaatacgcgtgcaaagaccttcgggagaacttctgccggaaccccgacggctcagaggcgccctggtgcttcacactgcggcccggcatgcgcgcggccttttgctaccagatccggcgttgtacagacgacgtgcggccccaggactgctaccacggcgcaggggagcagtaccgcggcacggtcagcaagacccgcaagggtgtccagtgccagcgctggtccgctgagacgccgcacaagccgcagttcacgtttacctccgaaccgcatgcacaactggaggagaacttctgccggaacccagatggggatagccatgggccctggtgctacacgatggacccaaggaccccattcgactactgtgccctgcgacgctgcgctgatgaccagccgccatcaatcctggacccccccagaccaggtgcagtttgagaagtgtggcaagagggtggatcggctggatcagcgttgttccaagctgcgcgtggctgggggccatccgggcaactcaccctggacagtcagcttgcggaattggcagggccagcatttcttgcggggggtctctagtgaaggagcagtggatactgacttgcccgggcagtgcttctcctcctggccatatgcctcttcacgggctattgaggtatggttggggcaacctttttccagaacccacagcatggagagccaagccttacagcgggtccagtaagccaagatgctgtgtgggccctcaggctcccagctttgtcctgctcaagctggagagatctgtgaccctgaacccagggtgtgggccctgatcatcctgcccgcctgaatggtatgtggtgcctccagggacccaagtgtgagattgcaggctggggtgagacccaaaggtacggggtaatgacacagtccctaaatgtggccttgctgaatgtcatctccaacccaggagtgtaacatcaagcaccgaggacgtgtgcgggagagtgagatgttgcactgaagggactgttggcccctgtgggggcctgtgagagtgactacgggggccccacttgcctgctttaccccacaactgctgggtccctggaaggaattataatccccaacgcgagtatgcgcaaggtcccgctggccagcgcgtcttcacacgtgtctctgtctgtgtttgtggactggattcacaaggtcatgagactgggttaggcccagcctttgacgccatatgctttgggggaggacaaaacttgtaagtacagtcaaggaccaagacttgtactcaaaagttgagattttaataaaaattaatattttttactacttcaccaagggactttccttaaatggaaaatgggtttttccccctaccaaggtaaaccaggtaattaaagaagagaattattcctagtgcagtttgttttcatggtcttaatttttgctaagactccactgtttttgccttaccaatacaagtgccaacacagtgaaaaggcaaatatcatcttagtattactctgaaaatagttctgagctaatggcctactgaaaggaaaagagtggctcctgctattctattagacttattacaattatcttaagtattctttctaccctcctttaattgaatggaaacaaggatggattggaagagctgtttttctcctttctttcccccggcaatatttaccatttaatgccacttactaacactcaaagaaacaaaaccaaacttctcaattgacagtgcagtgacccaacaaagacacgggttcttgaattcaaagtggagcaggagagacggtaaatacacatttactttaatatatatatatttattatttatgtgtttaaagcacaaattagtttggtaaaaaacatctcatgtctgttttatttccacatccctgagactgacaatgggatgcctatcaattaattcatttagagagccatacaccacaagaaacaaattatttgtcctctggagcttgtcacagggggatttttaaaaaaccattaaacagaaagacaactgtgcatcttagaaagataaaaggccaattcttcctctccggctgataggttcttaataatagtgatatctactaataaggtattttacatagtgtaaagcatgttcacatacaaattacttagcctctttgagcctcagttttcttaaatgtaaaactggattaatagtacattttgtgtttaaaaagataatgtatatgaagtgtttaccatttttgcttggcatctagttcagttctcagtaactgatgtggtggtggtggtggtcatagtagcagtaagatcccgtagtaatagtagcagcagttgttttagaaattagtaactgaggcctggcaaagttaaaggctcttttcattaacacccagagggaaagaaatgaagctggtcttcagaggcaggctattttcactctgtgtcccaatttttcccccctagaccatttttatacttctggggcctcagaaaatattctcagctattctgttagattcatctcctaccatctgagagggggcttccttcaaacaaccaaatttccaggtatttctaaactgcccttcccctacaccattctttgattcagtatttcaagacccctaagagaaatggtacatttacatgtaagcacaggatagtgaagtatttacaacaagtgctttggagccagcaaatatgaatcagaatccagctttcctttcctacatacatgacattgggcagctaatttctaagatttttacttctttatctatgaaagtggagtactagtacttgctctgtgcaactgtgatggttgttacatgaggtagcatctagaagcagcttgcacattgccagacacccagtggaaggtcaatgaatgactatttgaggactaactattacagaaatgtttactcttctgagtcctgatttctagtctcctggactaaataggttcactgttttcctcccggttcagtttccagacacatcacagaattataagaatattaaaaactcaggcttatacctacacaggattttctataaccctctttctgctttgagctcctaaagctatttcatagaaaaatgaccttatttttaaatagagggggcagttgaaaatcagtgaatgggcctaccccctaatgatttttttctcagacctaattataataattagcattataaagtgctaattatctttggacacagaggacctgcacaccagagacagaggtccgcattaagtaaagtggatttcactttcttcagttgtgagatttctcttttttcttctttgtaatgatgcaaagatatatcttccaccaagcctcatttaaaagctttttccagttaagggaaactatctcttgggccatccacagccagactgcatatttgaggattatgggatattccaaagaaattgtctttcctttgtatattgtcataactttttgtggaaatgtttgttttatagttccaggccagcacctagaacctggctagattaaaaaactgcagaaatcatgagtttcttgtttggatgaaagagcacacctattaacaaatgatagacggctatcctactgtgagtcctgaaaactggtgatgtgattgttgaatgggttaggggtatagcagagaaactcagtgtgggctacatacaatttcagcttgaatcacacttaacagatcctctgttccaaccatttaaatttacaaagaagaaactaaggcacagaactacttgagaagagaagcagaattgaaaactagagctcctgattgttctcaaaataatt

SEQ ID NO: 19620 - DNA, 529 bp, Homo sapiens
  SIMILAR (528)..(1): 901254mologous to Homo sapiens splicing factor U2AF,accession number X64044,Smith-Waterman Score=792.
gccgctcatctgcacctgggagctcatcaagcccggcacttgcagggtcacaggcgtctgattgatggtgctcagcgtggcattcttggctcccacactcgccctctggaccagcagcttcttatcccccagctgcatgccgttcagccccgcaatggcctgatccgtgacgttgatgtccacgtactcacagaaggcgtagcccttggagagccccgtggcactgtccttgaccaggttgaaggccttgaggggcccaaaggatgtcagcagctctttgacctggtcatcgttcaggtagttgggtaagcccccgatgaacagcttgtgggcagagtcggggaccacagtggacacaaccccaggcacatagacggaggggttctctgacatgccaggaagcggctggtagtcgtgaggcctgcggatctttagtgactggccctggaagatgatgccatcaaaggccatagcctggggtagtttcgtccacttgagcggaattcacaaaaggccaaattctttgtcc

SEQ ID NO: 19621 - DNA, 500 bp, Homo sapiens
  SIMILAR (34)..(399): 481254mologous to Homo sapiens unnamed protein product,accession number AK027089,Smith-Waterman Score=277.
gcggccgcggcggcggtggtgtacggcgctgtgcccgtcccgctcctgggcgcccacccgctgctgctcggcggcgcggggaccagcggggcgggaggctcgggcgccagcgtcccaggaaagacgttctgctgcggcatctgcgggcgcggcttcgggcgccgcgagaccctgaagcgccatgagcgcatccacacgggcgagaagccccaccagtgccccgtgtgtgggaagcgcttccgcgaatccttccacttgagcaagcatcacgtggtgcacacgcgcgagcggccctacaagtgcgagctctgcggcaaggtcttcggctacccgcagagcctcacccgccaccgccaggtgcaccggctccagctgccctgcgccctggccggggcagccggcctcccctccacccaaggcacaccgggggcctgtgggcccggggcctcgggcacgtctgcagggcccaccgatgggctgagctacgcctgctcggactg

SEQ ID NO: 19622 - DNA, 3432 bp, Homo sapiens
  SIMILAR (1869)..(2345): 881254mologous to Mus musculus zinc finger protein splice variant FIZ1-A,accession number AF126746,Smith-Waterman Score=761.
atggaccttcttgccttcgacgatggtagcaaactttttgttgctacgagggatctcaccccacaatatttcactttaaagagaaatggaaacaactctttgatctcggattctcagggggtgccacaggaaggggttggggagaggggagagggaaaggagtggggttgtgtccactgtggtccccgactctgccacaagctgttcatcgggggcttacccaactacctgaacgatgaccagtgccacgggctctccaagggctacgccttctgtgagtacgtggacatcaacgtcacggtcagacaggagaaggcggcggcggccgcggcggcggtggtgtacggcgctgtgcccgcccgctcctgggcgcccacccgctgctgctcggcggcgcggggaccagcgggcgggaggctcgggcgccagcgtcccaggaaagacgttctgctgcggatctgcgggcgcggcttcgggcgccgcgagaccctgaagcgccatgagccatccacacgggcgagaagccccaccagtgccccgtgtgtgggaagcgctccgcgaatccttccacttgagcaagcatcacgtggtgcacacgcgcgacggccctacaagtgcgagctctgcggcaaggtcttcggctacccgcagacctcacccgccaccgccagagaagccatacggctgcgacgcctgcggaagaccttcggcttcatcgagaacctcatgtggcacaagctggtccaccggccgcccccgagcgcctgctcccgcccgcacccggcggcctgcagccccggacggctccagcggcacggatgcggccagcgtgctggacaacgggctgcgggggaggtgggggcggccgtggcggcactggcaggggtgtctggggtgaggacgcaggcggggcggcggtggcaggtgctggcgggggtgccagtccggccccgagcgcttcagctgtgccacgtgcggccagagtttcaagcattcctgggcctcgtgactcacaagtacgtgcacctgatgctgctgctgccgccctcctgcgaggccgtggcgccacgtggctggaggaggagctgcagctgccccgagtgctgccgcgtgtgcagctctccagtgcggctgcagcgccaccgcgcgttgctttcgacgccggagtccttcgcatgcgcagccagcgcccgggcctcaagtgccccaggactggcgcagcccgcgagcccgcatcaggcttccagtgggccccgtgggcatgccagcctttcccacctccgcatctggcaaagcctggccttcgctgcgttcggtgtcgccacatgccttctggaaatatcacacctccccacctgcgatgcagccgtctggccctctgtgggcctcggttcccgcatgtgccccgtgaaagaacataccttccccaactatctggcagcgtctggccttctccggcctcggcctccccatttgctgggtggagaatcacggcccggccacatcgagccaatggctggtctctggacctcggtctccacatttgctcagccggcggaacatcccttctcccgccctctacctcggtgggtggccacggccgagaggcagcgacggcccagtggaaagaggacaaaccctttccccgcgtccccggcgccgccgcccggagctgcccggaagtctcggttccgcctgccggcgctctgccaggtgaagccctggggcctgcccgggacctctggccctgttcctcctggacctgagcaggcctgcctgcactgggtgtactggcggtggggaggcgcctgcacctgggcggccgccgagccctcggaagacaccctgtaccagtgcgactgcgggccttctttgcgtcggccgcggccctggccagtcacctggaggcccactcgggcccggccacctacggctgcggccactgcggggctctgtacgcggcgctggccgccttggaggagcaccggcgggtcagccacggtgagggcggcggggaggaggcggcgaccgccgcccgggaaagggaaccggcgtccggggaacccccgtctggctccggccgcggcaagaagatcttcggctgctccgagtgcgagaagctgttccgctcaccgcgagacctggagcggcacgtgctggtgcacactggcgagaagccgttcccgtgcctggagtgcggcaagttcttccgccacgagtgctacctcaagcgccaccggctgctgcacggcaccgagcggcccttcccttgccacatctgcggcaagggcttcatcacgctcagcaacctctccaggcacctgaagctgcaccggggcatggactgactgccaggctgcgtgcgccctgccctccacccagcctcctggactcggcctggaccaggggacctcgggactgcgcgtgaggccccggccctccaaatccaaatccagacgcaggccctgaaatgaggggaccctgactggagaggtggaggccaccgaaaaacccacaaaggccccggagctgggggaccacaaacaaacagggtccttagctggggcaggggagcccaaatctagggagagactcctgagcctgaggtccctggaatgagtgtgggtagccgtaagtccccaagacatggggactttgcagtgagcaatgggtctccacaagtacctctcatcttgagagccctaatactaaaagatgggcacccacccccaccaagggaagactgccccattccctgagagccatcattcctaacgaccttgatctggagaatgtggagggagcatgtccctgaattttcctagatccctccaaatgccacccaccagagtcactgggtgaccccagaaaatggacaaaagccgaaatctgcctttcccctttttcattccctgtgctgaaagagggaccagggtagatgccccctgccctcgaatcccccctccccgactgtggaatggatcgaccctaacgatcttccccgccccaaacactagaatagactggcctgaaatccccttgcccagtagaatggactgatctatgtgcacacacccccatcacatggaatgggctggtctaggctgtggcctgcccaccttccttagagtgaatagggcggacactcctctcttttcctgtagcgtgtggaccggtcccacgcaaatctttatcctgtgaactcatctgagtgggaggtggtggacactggggtttccttccctctctccgtagcatccgttggtctttctctccatctctgttggtttgtctgtctctgtcttcctcccaatccctaggggaagggggcatttggctagggggtgcccctgtgagcctcgaccttgccccctcgtccctctccccagtgtttccaggacccccaataaaccttagtcctgtcagtcgctg

SEQ ID NO: 19623 - DNA, 411 bp, Homo sapiens
  SIMILAR (2)..(355): 981254mologous to Homo sapiens ribosomal S6 kinase,accession number X85106,Smith-Waterman Score=592.
agacgatacccctgaggagattctggcgcggatcggtagtgttaagtatgccctttctgggggaaactgggactcgatatctgacgcagctaaagacgtcgtgtccaagatgctccacgtggaccctcatcagcgcctgacggcgatgcaagtgctcaaacacccgtgggtggtcaacagagagtacctgtccccaaaccagctcagccgacaggacgtgcacctggtgaagggcgcgatggccgccacctactttgctctaaacagaacacctcacgccccgcggttggagcccgtgctgtcatccaacctggctcagcgcagaggcatgaagagactcacgtccacgcggctgtagcgggtgggaccctggccccagcgtcccctgccagcatcctcgtgggctcacaa

SEQ ID NO: 19624 - DNA, 3252 bp, Homo sapiens
  SIMILAR (1547)..(2299): 801254mologous to Homo sapiens ribosomal protein S6 kinase, 90kD, polypeptide 2,accession number BC002363,Smith-Waterman Score= 989.
gcagctggcgagtcacgctgccatctcactgtggccggggccgcccccctggcagattgcaggaccacactgccacctcgccgtggctggggccaccgcctgtccccagcatcgcctgctgcccctttctcatggctcttgggcagacactgggtgctttcgtccagagcaagtgtgagtggataatgggcagtctggccataccagccccctggaagctcacacaagcatggagaatggctcacctcgggccaagatcgcccttcaaaccgtgtctaagtgagttatcatcaagctttcgaggaggctcaacatgaagaagctacagtcagaattaattgcccagcctttatccagggagggcgctggatttagttgcctgcggagctggagccaggtagtctgaaaaccccgctgggcagaaggaaatacagtgggtacaaaatgtgaaatagatcctccaaagaagtacagccaacaagttgccacacctgtgcgtgtaccagggcctctgaactggaacagaaactgcagcaagattccacggcccctcactccctgccccaccgctttcccgaacagtagtgcctccgtgaatgggcacgcttctgcagtcggtgagctgagctactgactaaaggccattaagcgccatcccttctttgtgaccatagactggaacgtaagttgcatgccacagtccccaccaccgttcaaaccagcagtgggcaggcctgaggacaccttccactttgaccccgagttcacagcgcggacgcccacaggtgtgtgccacagtggttccctctataacgctcatcacctgtttagaggattcagctttgtggcctcaagcctgatccaggagccctcacagcaagatctgcacaaagtcccagttcacccaatcgtgcaggtaactgtgtttgcctgcagtgggttcaccgatggctacgagatcaaggaggacatcggggtgggctcctactcagtgtgcaagcgatgtgtgcataaagccacagacaccgagtatgccgtgaaggtaaggcaggcctgctgagtgagcagtctggtttttccagctgggacaggggctcctggcattggtgaatacgggtcagggaagctggttagcatcctgtgtgcacaggacagcccccacaacctgctgccccaacgaaaggttgagaagcccagcctcagcatccttgtgggtgagagcaggtctcatgtagataaaggccaggaggttgatattttggagatggggatggagtttttcttcttcattgagtttctggtgagtcctttagcaacaggatgatgcttccctatggcacgttccccctgcatgggttgttcactgtctgtgtgcacggccctgtgagggcagccactccagggcaacacacccacattcaagtaccagcaagtgacatggccacaggccaagccacccacacccacagcagtgttgtcgcctgagacagcaaacgtgacttcccctcaggagcaaaccagatgtttgctgaaagaccgctggctctaccctgtggtgagaaacagcagcactcgtgggccctcggaagagattgagatcctcctgcggtacggccagcacccgaacatcatcaccctcaaggatgtgagtggtccccgtgcaacagcatccctggtaatggagctgatgcgtggtggggagctcctggaccgcatcctccggcagagatacttctcggagcgcgaagccagtgacgtcctgtgcaccatcaccaagaccatggactacctccattcccagggggtaggagccatgcctggggcagcctttaacatcctgtacagggatgagtcggggagcccagaatccatccgagtctgcgacttcggctttgccaagcagctgcgcgcggggaacgggctgctcatgacaccctgctacacggccaatttcgtggccccggaggtgagcattccccgactgcagacccaggcgtgtgacatctggagtttggggatcctgttgtacaccatgctggcagggtaagcagtcacctcaaacaggtgtcacgatacccctgaggagattctggcgcggatcggcagtgggaagtatgccctttctgggggaaactgggactcgatatctgacgcagctaaagtgagtacatgtcccagcgttgctttggaccctcatcagcgcctgacggcgatgcaagtgctcaaacacccgtgggtggtcaacagagagtacctgtccccaaaccagctcagccgacaggacgtgcacctggtgaaggtaccggcaggcgacagtgaggacagagtggtgggaatgggatctaaacagaacacctcaggccccgcggctggagcccgtgctgtcatccaacctggctcagcgcagaggcatgaagagactcacgtccacgcggctgtagcgggtgggaccctggccccagcgtcccctatgactcctcatggggaggtgaagcagcatcacgaccactccaactcagagccctgtgcgtgggtgtgtgcaggtgggtgagctcatgcatatgtgtgtaagccaggggtccctggtgacccttgtggggcctttaaggtgaggagctggaggtgcagaggagactgctggatgaggcgacaaaggaaggtgaaagaaagggtgtggagcagctactatgttaaacaacaacaacaacttcagcagctcttgttcttcaagagaaaaatcgaaaactctgggctctttggtccagcatacaaagcccctgtgaccttggccacatcagctctctttggtgaatctctaggcacacccaccttaaaggtatgctctcacgctgtgctgtctgagcctcctgagggacacctgctggatatcacctatccacttccgcctcctgagggacccctgctggatatcacctatccacttccgcctcctgagggacccctgctggatatcacctatccacttccgcctcctgagggacccctgctggatatcacctatccacttctgcctcctgagggacccctgctggatatcacctatccacttctgcctcctgagggacccctgctggatatcacctatccacttccgcctcctgagggacccctgctggatatcacctatccacttctgcctcctgagggacccctgctgggtacatcagctcgttggctgggcgagtccgagagcagcattttgtgaagggcaggcaggacactggggtcccc

SEQ ID NO: 19625 - DNA, 1827 bp, Homo sapiens
  SIMILAR (249)..(1094): 451254mologous to Homo sapiens TFIIE-beta,accession number X63469,Smith-Waterman Score=449.
cttaaattacccactacgttgtccagtcgccgcctcagctaccgccgctgccgccgccgccgccgccgccgccaccgccagtggtgagaccccgacctggcgggtcagcgctgggcgtgcgtgcgggcaggcgggggcgctgacgagaagcaggaagagggtgcagtgccggcgtgggcggccggccgaggcggaggcgcaggaagggggcggcgagtcgtgcgaggctgcccttctcactcagcattatggatccaagcctgttgagagaaagggagctgttcaaaaaacgagctctttctactcctgtagtagaaaaacgttcagcatcttctgaggtcatcatcatcatcggtcaaagaagaagaaaacaaaggtagaacaatggaggatcgtcaggctctaaacaaaattctgatcatagcaatggatcatttaacttgaaagcctttgtcaggaagctctgggatataagtttggtgttcttgctaaggattgtgaattacatgaaggacacgggcattcagcgaggagatacgcatcctctaaccttagatgaaattttcggatgaaacacaacatttagatattggactccagcagaaacaatggctaatgactgagggctttagtcaacaatcccaaaattgaagtaatagatgggaagtatgctttcaagcccaagtacaacgtgagagataagaaggccctacttatgctcattagatcagcatgaccagcgaggattaggaggaattcttttagaagacatagaagaagcactgcccaattcccagaaaagctgtcaaggctttggcgggaccagattccaatttgttaatccggccccgttaggaggaaaatacttttccttccaatgataagagctgtcagttttctgtgggatgaaggattttcaggaaactgtgggaggagtgtcaactggtagattcccatgggaccgaggagaaaattggaagaatatctggaagccgacagggtattttcttcccatgccagggaatctgggaccaaaggaaagtgggcccctattccaggaggaagggaaaaagccctgctttcaccaggaaaaagccgacgtttttaaggacttcattaacgaaccacttggcctggaactgctgaagggattaactctgaacattaacttccagcaaaataggggaaccagtttttgcccccctggaacaggagtttaccaggttacacaatccaagagtgttcttgctcgattgctcgggggtctgaaagacctgtccttccctatctggcttctttgcgggcttgaggagaggagcagttccagtttaacaaaaacaagtgccaaattacccaaactcaaaagccttatttgaagtagaatgggcctcatgggcaatgtgatgttcccctgttaaccttctgttagctcccctgggagaaaggcgctgagcgtggcatgcaggtgtctttgctgtgtttttctccacttctaaatggttcctggttcctttcttcctcgtttgttactttagagcaagtttgcccatagtcttgaatgcaatatttgtttattccaaaaagaacatatttataataaaatcactgtagaaggatttttaagatgttagtgaattctgtttcttttcattctcggaaatggcaggaagcagctccagtctctgatttccatgggtcacgtgctggggatgtgatgaagcctgcagtctgcactgtgttgctgagcacatggatttcaccactggaacacaggtgtgctgcttgttagcaagcagagcaataaagatgtgctggatgtcaaaaaaa

SEQ ID NO: 19626 - DNA, 1765 bp, Homo sapiens
  SIMILAR (1650)..(718): 951254mologous to Homo sapiens junctophilin type3,accession number AB042636,Smith-Waterman Score=1543.
cccctcaggtgtgcagcaacagatctcacacagaaaaaggcccaggctaacttccaactggggtgggccaaccctgcccccatgcctcctgccccatacttgtcacccgtctgttcctagacagagaaagcagtgaatccactttctaagctcgtgtcgacgggagtcagccctgccactcaggggccgcggggctgaagctctgccccgggctgccctccatccacacccaagacgggaacttgtgaccaacgaggacaacgtccgctgttacccactgatgtgccgggatcccttctgtctcccacgtggagctggaggggctgcgtgctggcctccttctgccatgccacacagcagagtgttatacaagcaaagaattttggctaaaatccaaaaaaacattacccagaaaaaaaggcaaactgtgagtgatacccaatcgtgtggttcttctgtgagaggacttggaagtcgctgggctgtccgagttgcggtctttcccttcttgtggtttggcttttaattttaatgtcccttttttctaccctttctctatttttgctaccgcgacatctcatcagatgaaaaagttaataaacagaatggcgactccgatgttgaggcaagatcaccatgtccaccaggataggcgctgagcccgtactggacttgagctcatccccattctcctcgtcggactctagagcgacaggcaaggatttctggggcggggagaaggtcaagtcccaacgcagccaaccggggctcggccccgcccagccgcaggctcgccagtttctgcacggcgggctccgcggaggaggccggcctgaagttctccttgttctgggccttggaccgcagtctctgcaccccgaagccccggtcctcggggcggtggtcgtcccccaagccccggcaggcgccgcccttgctgtagcgtcttttctgggggtgcgtctccatcctcagcaagggtttcatctccatccggtagttgctcagcttctcctcctgcagctccagcagcctggagcctccggggctgtggttgctggcccggtggtgggaagtccacgtgaacacggggggtgactccgtccgccgctcccgcggcttggggttcccgggctgcttgcggcccgaacctcgggtgcggaagtcatccacgagcaggccgccgcgcagggcaccgctgcggacacccctggagcccccggcctgctcctcgccccagctgctgcgggcgcagtccccggcccggccctccaggagcatctggatgtccccgccccgctcctcgtccaccgacacctgcctcgagaagtgggcgaccttgttcctggcggcgggcgcgggcggcggggtggccgcggggctggtggggaagctctgcagggggctgtcgtcgggggtcaggtcggagggagtggtgcccttgcggtacagctcggggctctcctgctgcaggggtgtcccggtggacagcacctcgatgtcgtcacaggaggtctgacgcttcggcctctggtactccagcccgttttcccggtgctggaaggaaggggagaactctttggcagtgatcctggcgatccgcgcctcctcctgggctttctgagctgctgtgagggctgccctcggcctttgcccgagagtgggaggtccaaggctccgcttccttctgggtccacaccgcttccttccgggcgcacaccgcttccttccgggcgcagcccctccacacgccgcagcccttcat

SEQ ID NO: 19627 - DNA, 2562 bp, Homo sapiens
  SIMILAR (760)..(1518): 1001254mologous to Homo sapiens dJ931K24.2.1 (novel protein),accession number AL034430,Smith-Waterman Score=1274.
atccgcggcagcagcggctgcttgagatctgtttctggggcctctggcggtggcggcctggggcggcgcgacggctggtgcgcaggtacacttgatgctgaagtactatgagccttcggaacttgtggagagactaccaaagttttgggttgttatggtccctttagttgggctcatacatttggggtggtacagaatcaaaagcaggccttgttttccaaatacctaaaaacgacgacattcctgagcaagattagtctgggacttttcaaatccttcagaagagccaaaatccaggggaagtagcaggcttgcaatcttcaggtaaaagaagcagcttttgaatctgagcttcatatccgaaagaagagatgaaaaaataccaagttggattaagaaagaacttggcttcttgtaagctggggatatcctttccataggtgtccatctttggaacatactttttgcagaggtcttgcaaagcagtcttgtaaaatttcagtctccaaagcaaacaaaaagagtattgaaagagtgaagtaaaataaatattttgggattactaatttgtcattaaatcattctatgctgattagcttcataaacattgaactttttgattttatagccacaatgctgcatattcatactttaattcctaaagaataatttttaatgttaaaacgtgataatgcaataaatagaaaaatgtggtttacaaaataaaaacggtcttcactagttaccacctgaagtaagatgtctcgtttggaagctaagaagccatcattgtgtaagagtgaaccactgacaactgagagagtcaggaccacactttctgtcttgaaaagaattgtaacatcatgctatggcccctcaggtaggctgaagcagctgcacaatggctttggaggttacgtgtgtacaacctcacagtcctcagctctgctcagtcaccttttggtcacacatcccattttaaagatcctgacagcctccatacagaatcatgtgtcaagcttcagtgattgtggcttattcacagctattctttgctgcaacctgattgaaaatgttcagagattaggcttgacacccaccactgtcattagattaaataaacatcttttgagtctttgcatcagttatctcaagtctgagacctgtggttgtcgaatcccagtggactttagtagtactcagatcctcctttgtttggtgcgtagtatattaacaagtaaacctgcctgtatgctcaccagaaaggaaacagagcatgtcagtgctttgatcctgagagcctttttgcttacaattccagaaaatgctgaaggccacatcattttaggaaagagtttaattgtacctttaaaaggtcaaagagttatagattccactgtattacctgggatactcattgaaatgtcagaagttcaattaatgaggctattacctatcaaaaaatcaactgccctcaaggtggcactcttttgtacaactttatccggagacacttcgtgacactggagaaggaactgtggtggtcagttatggggtttctcttgaaaatgcagtcttggaccagctgcttaacctaggaaggcagctaatcagtgaccacgtagatcttgtcctgtgccaaaaagttatacatccatctttgaagcagtttctcaatatgcatccgtattattgccatagacagaattgggagtgactctgatgggaacccctggacttaaaatggacaggaacacagcctattggatccctaggctcaatatgtcctaatagttatggaagtgtgaaagatgtgtgcactgcaaaatttggctccaaacatttttttcatcttattcctaatgaagcaacaatctgcagcttgcttctctgcaacagaaatgacactgcctgggatgagctgaagctcacgtgtcagacggcactgcatgtcctgcagttaacactcaaggaaccatgggctttgttgggaggtggctgtactgaaactcatttggctgcatatatcagacacaagactcacaacgacccagaaagcattctcaaagatgatgaatgtactcaaacagaacttcaattaattgctgaagcattttgcagtgccctagaatctgttgttggctctttagaacatgatggaggtgaaattctcaactgacatgaagtatggacacctttggtcagttcaggcagattctcccctggggttgctgaactggccagatttgctttcacagtgtggctgtggattatacaatagccaggaagaactcaactggtctttcttaaagaagcacacgtccgtccatttgtgccacaaagcttgcctttccacatgaagctgtgggctcagccaggcaacctgaccttggacttgtttggctgcaaagctttagtgggcctacaaggtggctgtagagacagccaatttgattttgggtcttttcatattgttattgaagataaaaactaagagaatagcatgttcgtattacaagagaaacaaataaactagtctgttggcaattgagaaaaaaaaaa

SEQ ID NO: 19628 - DNA, 652 bp, Homo sapiens
  SIMILAR (1)..(651): 761254mologous to Homo sapiens putative p150,accession number U93572,Smith-Waterman Score=804.
cttatgccaaagcctggcagagacacaacaaaaaaagagaattttagaccaatatccctgatgaacatcaatgcgaaaatcctcaataaaatactggcaaaccaaatccagcagcacatcaaaaagcttatcaaccatgatcaagttggcttcatccctgggatgcaaggctggttcaacatacacaaatcaataaatgtaattcatcacataaagagaaccaatgacaaaaaccacatgattatctcaatagatgcaggaaaggccttcaacaaaattcaacagtgcttcatgctaaaaactctcaataaactaaatattcatggagtgtatctcaaaataataagagctatttatgacaacccccagccaatatcatactgaatggggaaaaactggaagcattccctttgaaaactggcataagacaaggattccactcctacgcaacatagtgtggaagttctggccagggcaatcaggcaagagaaggaaataaagggtattcaatcaggaaatgaggaagtcaaattgtccctgtttgcagatgacatgattgtatatttagaaaaccccatcgtctcagcccaaaatctccttaagctgataagcaacttcagcaaagtctcaggatacaaaatcagtgtgcaaa

SEQ ID NO: 19629 - DNA, 834 bp, Homo sapiens
  SIMILAR (1)..(651): 581254mologous to Homo sapiens putative p150,accession number U93569,Smith-Waterman Score=612.
atgggagactttaacaccccactgtcaacattagacagatcaacaagacagaaagttaacaaggatatccaggagttgaactcagctctgtaccaagtggacctaatagacatctacagaactcttcaccccaaatcaacagaatatacattcttctcagcaccacaccacacttattccaaaattgaccacatagttggaagtaaggcactcctcagcaaatgtaaaagaacagaaattataacaaactgtctctcagaccacagtgcaatcaaactagaactcacgattaagaaactcactcaaaaccgctcaactacatggaaactgaacaacctgctcctgaatgactactggaaatacaaacaaccatcagagaataaacacctctacgcaaataaactagaaaacctagaagaaatggataaattccttgacacatacaccctcccaagactaaaccaggaagaagttgaatccctgaatagaccaataacacgctctgaaattgaggcaataactaatagcttaccaaccaaaaaagtccaggaccagatggattcacagccgaattctaccagagtgttggaagttctggccagggcaatcaggcaggagaaggaaataaagggtattcagttagtaaaagaggaagtcaaattgtccctgtttgcagatgacatgattgtttatctagaaaaccccatcgtctcagcccaaaatctccttaagctgataggcaacttcagcaaagtctcaggatacaaaatcatgtgcaaaaatcacaagcattcttatacaccaataacagacaaacagagagccaaatcatga

SEQ ID NO: 19630 - DNA, 1521 bp, Homo sapiens; identical to SEQ ID NO: 7068
  SIMILAR (820)..(1506): 811254mologous to Homo sapiens putative p150,accession number U93563,Smith-Waterman Score=1013.

SEQ ID NO: 19631 - DNA, 1461 bp, Homo sapiens; identical to SEQ ID NO: 8627
  SIMILAR (433)..(1446): 921254mologous to Homo sapiens putative p150,accession number U93572,Smith-Waterman Score=1645.

SEQ ID NO: 19632 - DNA, 3441 bp, Homo sapiens; identical to SEQ ID NO: 3973
  SIMILAR (574)..(1962): 951254mologous to Homo sapiens putative p150,accession number U93563,Smith-Waterman Score=2340.
